United States Patent Application Publication US 2014/0325702 A1 - sequence listing, part 20

SEQ ID NO: 23097 - DNA, 1215 bp, Heterodera glycines
tttcttttagacaattcctacgcccaaatggtcgcgtgtatgcgcgcgttggcccgtcgccacccaaaactcgtccagttcattaccatcggcaaaacgcacgaaggccgcagcatcgacggcttagaggtgcagaccaagccaaatttacgatcatagaaatccacttccttaaatgtcgtcccgttgagttacatagatcggcagtcgcggctttcggaaacgcgccttttggatcgacggaggcattcacgcgagagaagtgccaaagggtggggggaatcgaaggggtcgagggcaaacaatggaggaccactgaccgaagggcgggggcgggggcgacggaggcgtggacaatgccaatgccatcgtttctcactcattcggctcatttgtcgccctttcatttgccttttcagtgggctgctcctcacactgcgctttatttcatccatttggtgaaccaatgaaaaaagcaattaaaattgcttccttttgaatttccaaattcctttcagctcacttcccgctacggaaaagatgcggaaatcactcgccttttggatgagttgacttgggtcgttgtgcctctgctgaaccccgacggttctccccacttttggcatttgcctaattcactttggcactttgtcccctttcttttcgcccaggctacgaattcacgcgttcttccactcatccaaatgtaattgcctatttgagcaataattgctcatttctccacttttctgtttttaggtccgtctttggcgcaaaaatcgttctccgacgcattgtgtgcgtgaccaatggggccgaaatcggtgctgcaagggcgtagacttgaacaggaatttcgatttccatttcaaaggtgttttggtggttttcccaactccaacgatattttcggttttcagagagtggctcaagtgacgacccatgctccgaaatttaccaaggcatttccgcattttcggagcccgagtcaaggccaacgcatttccaactttatttttcattttattactcatttcccaattcaatgatcaatttaatttccctttttccttccgcattttctctgctcagttcgccgtttgtttcagatcagttcgcgacgcggtgctgtccaaccgttaccgcggccgcatcgacggcttcatcactttgcacacgtactcccaaatttggatccatccctacggacacaaa

SEQ ID NO: 23098 - DNA, 1034 bp, Heterodera glycines
gcaatacagaccagcagcgacggacggcccaaataattcggaaccgatgaaaatggaacaaaaaatgcattcattgccaagggagggccagcggaacgcggaaagtggagaattcaattgcaaagacagacatcgctcgtgcaaaagtgggcgaatcggaaaaagcaattaaagggtcaaatgataatgtcttgttgaaaaagcgtttcattttcactttctttcgtcctttttgctcatcccttcgttaagggtgggtgttggaaggagaatcgctctgtcagactgtgcccgttttcatgggcgatcagtgcgctttttcctgcgggttttgctgatcgactgatcgacgctccgattagcgatgctttaccccgtcccttgcacaatcccccgactttatctgctgttttcaaaataaatatgcattaatccgctctctctcaacacattttatttatctgtgtctctttaatccgtcagtttcccttagcattaaattaaaatttaaaaagtttttattacattcatacacatttcacacaacattcgttctttgatgaattaaatttggctgagttttggtccattttaagtggcgaatgaattgaattcccttttcgtttctttccttttttgtgttgtgcgtattctttggtctttgtacgcatttcatttgattctttttgtttacagtaaatgtttagtaatcaaattgtcaaaacaaaaatgattaatcaacaaaaaattatgagatggataatggaaaattttggcagagttattatgaattttaaattaataattgtataaattaataaaataattattagacgattaggtaattagttaaatgatcatttttctgtcggctcctcgtgtgtaattaatatgtatgtaattagttaattcttcagacgttcttttgcctattagtcattcgcaaagaaaggaaatgttcactctttcgttgtttggtttcgtttcgttttgtgctcgttttatttgtcatatggtgtggttagtaatttgcg

SEQ ID NO: 23099 - DNA, 1327 bp, Heterodera glycines
ctgtcccgcctcacggtggggacttaaaaacatggttaagctttgttcgaaacttcagaggagaattttaagttttgaatttttacaatttaatttcttagagtcaaaaaatttcggaaccaattttttaaacgaaacagtgcacaaaaagagagggagggtagaagacgagagtaattttttgaaaggatcgcaccccatcgaatatttccttatttcttttacataactgtccaaaggtgactgctgtaattggctcttctgtagtccttaaggtacttggactttccacagtaaaatgtggtacaaattttggaactgtcccgcctcacggtgggacttaaaagcaggatagagccaagtttaaaacttcagaggagaatttaagttttgaatttttacaatttaatttcttagagtcaaaaaatttcggaaccaattttttaaacgaaacagtgcacaaaaagagagggagggttagacgaaaagagaaatttttaggaagggacgcaccccatctgatattcacccttttctgttccataagaggccagaggcgactgtgttcgttgacaagtaattgtccaattaaggtacttggacattccacagtaaaatgtggtacaaatttttgaactgtccctcctcacggtgggacttaaaaacattgaaaagccaagttcaaaacttcagaggagaatttaagttttgaatttttacaatttaatttcttagagtcaaaaaatttcggaaccaatttttaaaacgaaacagtgcacaaaaagagagggagggttagacgaaaagagaaatttttaggaagggacgcaccccatctgataattccccttttctgttccataagaggccagaggcgactgtgttcgttgacaagtaattgtccaattaaggtacttggactttccacagttaaatgtggtacaaatttttgaactgtcccgcctcacggtgggacttaaaaacatggttaagccaagttcgaaacttcagaggagaattttaagttttgaatttttacaatttaatttcttagagtcaaaaaatttcggaaccaatttttaaaacgaaacagtgcacaaaaagagagggagggttagacgaaaagagaaatttttaggaagggacgcaccccatctgataattccccttttctgttccataagaggccagaggcgactgtgttcgttgacaagtaattgtccaattaaggtacttggactttccacagtaaaatgtggtacaaatttttgaactgtccctcctcacggtgggacttaaaaactttgaaaagcctaagttcaaaact

SEQ ID NO: 23100 - DNA, 2119 bp, Heterodera glycines
aattttttaaatattttgaacacctaatttttaagttttttttgtgcatatttggtgaaccctattttgcgattttcatgcatatttggcgcatatttggcaattttatttgcatatttagatgcatattttggtcatttttcgtgcatattttttgcagccctgttcattaataacatgacaataaaatttggtgcgtttcaggcactttttcaaaaaatattttatgaattaatgttgcaaaaaaatattggaaactcagaatttcgaacaaattttttcaatcaatatgcgttgaaatattttcaggataagttagttctgtaccggggagtatatctgtaaaatttagtgcgatttttctaattataaaaagttaagttcgataaaaccgtaccagctgttttcgacagtgattggtttcgacagtactttttaattgattttctacttgatttattgtacatatgaattactattaatatacaatttgcatatacaaaatttagaattgagtaagtggtaataataaagatgcgtatgattatttttattaaaaaatcttatatacgattctcgaatcgtgtgggaaaatatgctaacaaatgctggcgttgagtgccaagatgcaaatatctacaagctctttcttatagcagaattcgaaaatcgcaaaccccgctgcaatgtaaagagcctgtccttatgattttaatttttcaaaatttatcgaaactttaccatatagagcaagtttttaaaaacaaactttactgtcgagatcaccactgtcgaaaactaacagcaccgatggaacgacgagttgtcgaccctacactggacaacactgaactggccgctctcaacagctaaaattgctcaatttccagaaaaataattaaaattttaaaaaaaaaaagaaaaaaaatgccaccagggtgggcacaaaataagaatcattttttattcgtaaaataattgaaggaaaaatggcgggaaaaaaaattcttctactttcttagaacaattcttctccaaattgtttcttccattttgaaattgtcgttctatcaattttcaatatttttgcaatttctttgtcactcattttcggattttctctttttattttccagtaaattttcattttttccaatttttccttctgcgttataaatttactcattccaaattgtttcttccatttgataattgtccctttgcttactccaattttcttacaaatttccgcataattttggtgccattcttttgctgaatattttcttttttgcttatattcattttttattccaataaatttttgtacaatttctaatttttcttcatcagttgttgatttatagcttttctgtattcgttgattaagtcctaattctttaatccattgattagttttatttcgatttgtccccaattttttcgctatttttgagttaattttattccattcttttgctgtgtattttcttcccttttgcttgattttttcttttattttataatattttccaattatttctcttttttcttccaatttttcttcttctttttcttcccatttttctccaaatatttcgtcaaatgacttttgttgttgcaattttttattttcggattcactttgatttaattggaaaattgaaaataaaagaaaatataataataatattttcatttatcaaaaattctcaaaattatttttaaaaaatacaaaattctttcttttgattattgatggccatttatttatacatttatttattcataaatgaaataaaattaccataaaaacaatttttcaaataaaataaactacaaaatattaaaaaatattcatctgatctctccggaaaaaaaattaattttaaacagaaaattgtattttgttatttggtattttttttattcaaatgacgcaataataaagtattaaaaattttaatattgtgcctcaatcaaaatcttaaaaacaaaatccaagtcattgtcgttacatcatatttttttaggtgttttttctcgaaaaatataataggaaaataattttataaaaaattggaaatttatgcagaaataagtcaaaaatggaaaattt

SEQ ID NO: 23101 - DNA, 1652 bp, Heterodera glycines
  unsure (1)..(1652): unsure at all n locations
gcatcacaacacacaaaacagatcatatctttattatcctaatttccaattctaatcattacaatnttgtttgtttattttcatttttatgacagaaataatttaattttttgtagttccatagttttgttccgtcccagtcttattgttagaagagcaatttatacattctgctgtagcaaataaaaacatttttcatgtttctttctttttttgtctatccattaaaatttcttttgaaatgttgtaaataaaaacatggtaaatgcggcgacgtgcgttgtttctttcatttttatgtttttaaatagaaattatttctttaagaaaattctctaattattacactttattaaaatttcgaatatcgcattccttcctatacagggtctccaataaaattttttaagttcaaatctataaagaatgaatatttctttagcatgactgatttttgctttatttaattaggacaatgcgaaatttgttagatttcgaatccggatttgaaatgtccaaaatgaatgccatcttcatgtcagcgatccagaaaacccccggaaaaataatgacttattttgtaaaaaatgggcggcaccgaccaaagcattccccgaagtgtcccggtcccataggaggggaaagaatttttttttacataatacgctcgctacgcatgagaattttgaaaatttttataatatggcatcgttgatgttggaaagtaaaacaatttctcagaatgtcaacaaatgcattttaccgaaatgaatttggataaaaagcataggaaaaaagtggaaacaccaccattgttcttcattcttcttcagggcggccaagtgtccttatttgtaagatttgtccttattttggcacgacctccttgctttgtgcttattcatggatttgaaaataaaaatgcaaaaatttaatattttttacttattgttttttattgaagcgaatatttgaattaattcctttttgtaaaaaatttcatttttatttttctttagtgtaaattcgttaattttaaatgcccaaaatgcccccaaaacgtaaaaataatctcttttaaaatggtcaaaatttttatttttcctccgacggcgcctatcggcaccgtcgggccccaaaaacttattttttcataaaaatgggctcaaaatctcaaaattggtcatttttttggtgaaattctgttaacaaatttcattttaatttgaaaaaaaaaatttcaaaaattttcccggcggcgcctatcggcaccgtctggtcccccaattcccaaaagttttttggaaaaagcacgcagcaaaaacattattaatttttcaaattttgaataaaatttttcaaaatgctgatttacaagattttcagttgacagggcttcgtttttatgctattaaaattttgatttaagtacctatattacatgtcttaattgcgattacatcatgctactatcacctatacaaaaaatcttattcttgggctactaagcttaattttatcctcatctgtccctattatcacaagaaaaacttggtcgccttgataaagactgaaataacatttctctcgcaaagcagagcctgattaatactccccgatatgatctaggggtttgttatctagcaaaaatg

SEQ ID NO: 23102 - DNA, 1333 bp, Heterodera glycines
tcacaacacttttattcaattaaattgaatattgttatttatacacattctatttaaaacgatgggccagttaatttgtgaatttttgttactgtaattcgataaaaactgataaaaatgttggaaaacaaacacgaaccaaaaatttgatttttttttccttggagatgcctaaaaacaacccaagatacaacaagaccaagatctctggaaatgcataaaatttttaccatgacggttatttttgtcaaattccgtgttctccgtccattttctgttgcacagggaacacaatttgctgcattttcctgttgcggcataattgctgctgctgatcactaagggcaaccaattatatccgtcaaaatttgcaaaataagcgcataaaattgtgcaaaatatgttcataattttttccaaattaagggtaacatttctcaaaagttcgtcaaatttaagctaaaaatctcgaaaatagctaaatatggtgtgaaccgattcacaagaattggaacaaattaccaattgttccaattcaggcagataaggcaaatcaattcagggcattgctaaaagctatgtatgagttctaagggatttattgacatttgcattgacattcattccattttattttattttactttacatttcatattgttgtattttttgacattatttattttgattttttttttatgcgccacataagagcactaatgtgcctgtggtttgctcaataaatataattttgggcgtgtatgtgtacttttgtaccagggatgggccaaatcgaaaaataaaatgcgaaatgaaagtaaatagaaacgcaaaattgtgaaaatttttctacaactttttaatagtaaaaaattagggttgagtccgacccctcggggggggggggggacaaatgccggaggtcgggtttaaccctaataaaaattataagcaaaaatcagcatgaaaaagctggacctagaagcctggaaaacaaaagacatgaatggaaaaagaaaaacaaataagttaaataattaaacaattaccaagtttattcataccatcattaattgacttcgtaatggaaaaacccgtgactaattgatcccactaattgaccgtccacttgcaatctctgctttgtatcgccagttagcatcaaaaattgagcaaaaaatggccctaattactctttttaatataaaaatgtgatttttgtttagacaccattaaggaaatttttgaaatttaaatacatttttaaggaaaaaatcagaaaaatttctgaaattgagaagtccaaatttaaaaagaaaattaaaattatatt

SEQ ID NO: 23103 - DNA, 1606 bp, Heterodera glycines
agatttgtgtgccgtgttggaagagcgctgacggcagacaatcgcaatgtggccttgccggttgcatttgttgcaaaatgcgttagaaaatttgcagtccgatcgccagtgatcggtgcttccacaggatgcacatgggtgcggtggatggcctcggtttgctttgttgtctgatttttgcttaggcgaaggcacatgatgcggcgatttgggtgccggttcatgttgtggccatttgggtgccggttttgccttgtgtttgcctttgctggtctcttgccattgctgaggtcgcaattggatggcgctggttgagaccggttgagtgagcagagaaagagcactttccttgacgatttgaatcgccttcaattcctcttcgactttttggagagtgatgtccgtgccggtcttttctgcgtcctccagcattttgagacacttttgcctcaggtcgtggtgctcgtcgttgagtgcaatgaccaggatatgcactttagctgttctttggtcggactcaaattggcgttttcgcaggacgcattgatatgagcgaccagcgatgagatgtcctggctcggttgctgacgaattttgaaacattcgtagcgccggacaaatagtgaacgcgtttcggcatataatcctttcagcttggtgatcgagtccacccaagtgactttgtcgggctgggtcggactgatgctgtcgcggtatttgccgtactcatcgtcgccgagtttgccgaggagtagtctgacttttgttgactcggggaggtccttaccatcttcctcaatcaaaactccaaaccgtttgaaccactgttcgaaagtgttaccggtttcggcgtcgtaattgaattttgaaattcggccgtcgatggaacttgccaaatttgcctggttcagactcgctgacgcggcgttttgcggtgcttggcccattagctgttggatggcatccgattgcacacgcatggcctcaaggaattgcttaatttggtccgcgctcatgccgaaatgtttgccggtgccgaatttgagagtccaaagttgaaaaaccgcttattgcggaaccgcaacctttcttaggtctgttggtttttcggcgaattaactgcaatatatgcagacctcacccgcctagggactattatttttgtggtgtgcagtccgtcttgttggttgaagacgactgctgactgcgccaaatttgttgtgtattgtccgagtgaataaaaccaacaaatatttatttaccaagagacaataataataaaattataaaaaatggcgaatggtcggtggagagaataatgaatgaaaataataaagtgaagaaagaagaagtgaacatcggggaagagtccacgcctttaaatagacaatgtgagggggaaggaacggacgagagaatggacaaatgtaaagatcaataatcgatgattaaacatgagcaaactacatttgctttttctccaacagaaatgaataaatttgtcaattaaatcgttatataaactacaatgaaaaaaactaaattttatacgatatttgaaataattgaagtactaattaaaataaaataaaaaaaatgaaacaaa

SEQ ID NO: 23104 - DNA, 1068 bp, Heterodera glycines
  unsure (1)..(1068): unsure at all n locations
ttgacggattaacncgggggattatggcttttaatcctaatttttagaactaatttgcataaaatgtttacgccgaatggaaatttttttagttattcaattggtacatagcatgacagagtgtgaacaaaaatctgtatttggaactgaaattgatttttaacctacaacccctaagtatgttctttaaaaaaatttggtgtccaatatttcgctgtcgaatttcccactgctggtgtcaaccagcgtagtccaattttcatgcccctattccataaaaatgtataaagcatcagaccatttcttccattttgtttaccaaccgctgcttttttcattgtcatttattaacacattagccattaactaattgcatccaaaattagaagcatgctttttggctctattaatacttcttatttttctttgaactcgctaatgaaatcggatcaattcttggtgtgacattatgagattttataaaagcagttttctccacaatattgtataaaatctagaaacactcatttttgtacgttttacgtgtaaggatatttcgtctacaggatatctcgattactgggcgtttcgccttcaaaccaggggtggagcacggatagtaaaatcctgcgtcgcggaacgcgccaggcgaaatgtcggaaaatattgatcatagtccccaaactcaaaaaatgcttaattatttatgtaggagcactgatctattgatagttgtgagcagttactacttagtaattgtggatgagcgctgtggcgatggcgcgtacggcgatgtgtgcctgtctcagctgcatatcatcgcttgttcccatattgatttgcttttgctgctgggcatacatagcattatacccgtagtatattctaaatatacacacagctttttacgacgacgaaacgcagcggtggccagcagcggggcggacgtgcggcaaaacgagcgcaggagaacgagcaacacaggcgtcgatttcaccaatccaacaagggtccaattaacacaacaactcgggcgagcgttagcgccgcgagcgggggggggggggg

SEQ ID NO: 23105 - DNA, 1495 bp, Heterodera glycines
  unsure (1)..(1495): unsure at all n locations
tgagtaagaaatatttaataaataaaacaaatatttcaagaaaaacataaaaaaaattaattctaaatacattactaaattatatttntaaggctgatntagcggaacatgaagtcatttacaaacatttttgtgggcaaaagaaaaaaatttccnaatgaatccgacgggtaaatcataataataataataataatgatgttgaaagctcttcgagagggaaagcagcatgttgcaccgcattacgagcacaaattcgaaatgaaaagaaaagtaaattttcgatttataaaaattttatttaaataaataaaatattttttaaaattatttttaaggcattagcaatggacatcaaaaagtgccaatgaagagtaacaatgcaagcaaaaatttaccacaacttccagttgcttgcaaacgataccgtaatgaattgttgaaactgatccattcctactgtaaacatacgcaaaaaatatacggtaaattaaattttttaataaattaactctattttttttagcttccaataatgccatcaaaaaaggcactcgtcgtattgaacacaaaattgtaaacattgagcagcaacaaaacagtcgcacatcaaaccagcacaaaaattcaaacagtaaactgttttgttactataaatatgcaaaaaaaaacaaaaaaaactttcctatgtcatgaaaaggatttttagtgcctgcaatttcagtccccgacttttggcgcttttccggtgacggactctaatgtccggcgcttggatttaaacatgattgaaatccctccatttttagtctaagattttgtaaaaaattcggcatttagggacaataaacgggtttttatgccatatctttaaatattattttccaaatttagaaatgccgactcgcccaaaacccgaagtgaacatcaattctcttcagccataaacggtggtgccacgctggataaatcaaaagcggacggaaatgacgaaaaggctaactaaatttaatcggaatgagggattgtgttttgaatttgttatgatgacaatgattgtggcattttcagtgttcattaactttatttttcatttttatttttaaaccatatttaaatttgaattagcgtatcaaaattgtggcacaaatcaatgagcgtctatttatatacctaatccaccatagcttttccattaatcagaattttttaaatttgtttttactgatgcccataaataatctgtgatacgacgcgctttcacatttaacctatttacaagttcaatattattaggaagattcattttgcaatttttatttatttttttatttaaaaatatcaattttattttaccattaatgtgagttaaaatttagtacatacataattaatcaatttaaaataaaaattatgagaaggaaaaactatgaataaaattagaaatttttaaattaaaaatttatttacatttttctcgaaatnttttccatat

SEQ ID NO: 23106 - DNA, 1493 bp, Heterodera glycines
tatgttagatccacaggaaattttgcatatcgttagagaaaaaaattctgcatcgattaatgctgaatttatttttgttaatgctctatttcaaaagttataagaaaaacaaaattttaaagcctcataaattttctctggtacaccaaatcgcttagcatttgcttagaaaaagcttctcattatcaagagctttcgaaagataccaagattatccaatttggttggcaaaaaccttcaaaaataattcccaaatatcgtgattttttaatattttggacaaaaataaatgaaaatattcatgttacacaacggactcgaaccaccaccctttgtccctttactatcttacaaaaaccactgagccacacatgcaaatcttttctggtacaggagctcatttcccgggcccgtgccaaaagaatgaggtaggggttaacctaccctcagctgcgggtagacctacccgttacccgcactaaaagaactacccttagttgagggtaacttaacccggttaacttaccctcagctgcgggtaacttttctaccctgacccataccagggtaacaatatgagcatgttttttaaaaaattccgaaaaaatttaaaaagatgacattaaaaaatttccttttgctaaattgtactaaaaagtctgctctatccaatgatataattttggttaaaaaattttttggatttcactgagctagagtatcgtcaaaaattttgtaaatttttactaatttttttgttggtttcttgtctattttacttttaccggttcaaaattatgattattcgattctagacaaagttattctccttttttgaaaaaatattcgccctttggaacatgaaatacacacaaaaattcactatgtttaacgtttaataactttctttataagtaatataattaaacaacttagtataattcgatagctctctaagtttcctcactaattctataaaatttcatagaatttaattaagtattgaaagagttctgattagaaaagtcaaacatctctttttgtaaggcaatttcctggtctacgccacgggttttcactattgcaccaatttcgaaccccggacccgaattcgaacaaaaagtcgaaaattttctaaattctcactttggttcctaaattgaccaaaaaatctaaatttggtcataaaccattgcaacaccaaaacatgatccttcggtgtgtggacatttcgccaactgacacttagccaactgacatctcgccaactaagccaaattcggacgtttcgccaactcacccaaaaaatgacatttcgccaactaagccaaattcggacgtttcgccaactaagataaattcgtacgtttcgccaactgacattttgccacgccaaatagccataatattaacatatgagaaaaaaaataaacgaaactgtttctttttcatcaaacatatcattccctgtcacttccttttttgtgttaaag

SEQ ID NO: 23107 - DNA, 1226 bp, Heterodera glycines
cttgttaagcaatgccgagattgatgcatgagatctgctcattgagactgatcaattggacaagctgctcgagctggtcaaggagcccaaatttgcggacatggattacggacgcatttgcctctatctgctgaggtttgtttttttggggctggtacaacaggtcgaatatgttcagagtcttacaatccgggccgaattccgggttagaactcccgttttcaccccaactcgtattattaatgtttttcgaaaaataccgggtcccagggttccgtaaaaatgctgacaaagtctacgggtctcattttcttggccagtcactctctttttttttggctattttattattcgccccaaaatttcctatttatttctttattttttcagttgcgtgccgttcatgcccgacccggagaacaccaagctgatcaaagtggccaaggagttgtacttgaactacgggaagcaaattgaggcacttcgttgtgccatgaaaatgaacgacgtcggcgctgtcagtgccatttttggagaatgcaaggatcggtgcgtgtggttttttcttttatgccctctctttttttcgctttggccttacatttttgaacgtttaaaatcattatggtaatttgttcgaaaagaaggtcgggtggcgcgtgtcgatgaatgggtgttaatggagtaggaaatttttttttaatttgaaaaaaatacaatttttttgttggaattcaatgaattttttttaagtaaagccttggttttgaaaaaaactaaatgttttaaaagtttttcttaaatttttattttttatttacggcaaagttttgggctgtatcggagtgttgatacctgatcctcgggactatccaatttctatttatattttcagtaccctcaaaatgcaaatggccatgatgctcggacggcaacaaattttcctcgagctgccggatggtgaagacggtctgctgggggagctgaacgcgaactcgcacctgcacaaacacttcctggcgttggcccgcgagttggacataatgacgcccaaatcgccggacgatgtgtacaaaatgcacttggagcaggcgcgtccgttcacgcaccaggtgggcaccacagcacgggtatactcatccatttttaacacattttatgaaaatttatattgagtttttcttcccgattcgaaaaaattaaaaaaggaatgtatgtatgtatat

SEQ ID NO: 23108 - DNA, 885 bp, Heterodera glycines
tgtacatattttaacaaattgaagaaagttgcactatgaaatattgtaaaaaaaacacaacaaataaccataaaattgcaactaattacttccttatttttgagaaaaaagcaattttagaaattgtaaattcaaaaataattataaattaaaaaaaaaaaagttttataaatattcaaagttcaaaacaaaataaccaactgcgacttatttgttaggtatgtatttttgttattttctttgaacttgcaaacaaaaagaaaaaaattctttttactttcgcaacataacgccaagtaaaaaaattcgccgtttaaattttaaatggctattttgcatttggtcactttttgctgcgctgctgctgctaaagcaacttccttccctcctttgctttgctgctgcaaattctcgacacattttagcgcccggcagggagaaaccgcaattttggggtattattcggtgattttgtttacagtatgtttggtgaggagaagagagggaaaggagggcacatcatggaaacggaaaatgggggagagaatttggggatcgaaaattggggggggggggggagcaaaagttaatcagcggggaatttggggaggaaagaattttagaaggggcgggggactgggggaggggctgatcatcgccagatttctgcccaagattttcgctcttatcaccacctcatctcccctcatcacatcatcccccccatccccccaaatttgtcacgggaaaacgcatacaaaaatcagtcaactctctcgccgaattgggacatcgcaccgcacatacaataaagaatcagtgaagagtgacaatgagataggcgagagagtgcactaggcagagagagtgggtaaaatggagggt

SEQ ID NO: 23109 - DNA, 1137 bp, Heterodera glycines
gtgcccctccccgtccccctcgtccgtcgagggtctctcctcttcctcttcttaacacaaagccggggtgcttgggagggggagggacctgcgggaagacaaaaacattttttggttgggccagactggaaccatcttcccctgcccccgtcctttcctggcttggtcgggtccaacccaattaatgtttttgcttgatcggcgaagaggggggggggggggtgcgcaatgctcgaaatgatcagtgtgtgatcatcgaggctcgtaaatggtgatgctcaactgtggccccggacgagaaaagtgatcaacaaaaagtgggcgctgggagggaagcttttaatgaacttttgggaggggcatattacaacagtcgaagcgtaaatggtgaggcagggggcgggtgatcgggagcaagggaagagatgaactgaaactatactgctggaaccacacacaatcagccaattgagttgaggagagaagagcggaagcacacaaagagagatatatgcttttgtttgctcatcactcactaccgtaggagcaacaagcaaaaggaaaaaccaaagcggacagaatatggtatcagataaatgagaaaagaaatgaaaatgaaaatttatggaccaatttgaggctttaaatgacccgccagagagagtgagaaagtttgaggattggggagtggggagtgggcgggaactcggtgatgattgagatggggagggtgatcaagtggtgatgctccattttatgatcatcatgatgatcacctttgggatagggttgggccggatgatcggttttgtcttctgttggtctgcccgccactgaacaacaaacaacaaacaattgcttgctgttgcgcggctgagggaggaggagaggggaggaggaggacaacaatgcaaatgctatgcgacggaatgaaagtgaaagccatgggtgaacgaacacaacaacaaaacaacagcggacaactacaacaaaaatgaaagcccccgtgggtcgtcgccccgcccatcgcgcccccggggcgaggcgatttggccccacggggcagggacaagccatgaggaagctgatgggctatgtagggtgtgggtgaggggagaaagcaagcaggaataaaag

SEQ ID NO: 23110 - DNA, 1146 bp, Heterodera glycines
tttttccagataaaaatattgtttcagatcaataaaaataaaagaagttttttctgagttattttagaatgtgagagtttttgtatacggttcagagccttcctaaaatgaagaacaaaatgaaggaccagaggggagattgttgcgcaaaggcactttttatgtgttggttcatatgggactattttttacagacaaaattattggtttcagaacaattaaaattaaaagctgttttaactgagttattttagaatgtgagagtttttgtatacggttcagtgccttcctaaaatgaaggacaccagaggggagattgttgcgcaaaagcactttttatgtcttggttcatatgggactattttctacagataaaattattggtttcagaacaattaaaattaaaagctgttttaactgagttattttagaatgtgagagtttttgtatacggttcagtgcctttctaaaatgaaggacaccagaggggagattgttgcgcaaaagcactttttatgtcttggttcatatgggactattttctacagataaaattattggtttcagaacaattaaaattaaaagctgttttaactgagttattttagaatgtgagagtttttgtatacggttcagtgcctttctaaaatgaaggacaccagaggggagattgttgcgcaaaggcactttttatgtcttggttcatatgggactattttctacagataaaattattggtttcagaacaattaaaattaaaagctgttttaactgagttattttagaatgtgagagtttttgtatacggttcagtgcctttctaaaatgaaggacaccagaggggagattgttgcgcaaaagcactttttatgtcttggttcatatgggactattttttacagataaaattattggtttcagaacaattaaaattaaaagctgttttaactgagttattttagaatgtgagagtttttgtatacggttcagtgcctttctaaaatgaaggacaccagaggagagattgttgcgcaaaagcactttttatgtcttggttcatatgggactattttctacagataaaattattggtttcagaacaattaaattaaaagctgttttactgagttatttagaatgggagag

SEQ ID NO: 23111 - DNA, 2565 bp, Heterodera glycines
tagggttgtaaattatatggactaaaaaacgcgaaatatggacattaaatatggactaaaaaagcccgaaatatggactaaaaaggacaaaaatggccaaatatggaccaaaatatggataaaaaatgccaaaatatatgttgtaaacccccaaaaatcccaaaaaaggtgtgcatatttaatatttgcttaaataaacctaaaaagtacaataaacaaccaaaaaatggggtttaaaacttaaaaatgcatattttttattgttgttcgttatatcaaaaacacctccaagtttgccaaatttcgaaaaaattctcattaaaaaaaaagaaatgttcgcaaaaaaatgacgaaaatatttattgaaaatgccaaaatgacgacgaaaactcaaatttttcgtgttttgtatgttgtaatttttaaaaatttccaaaaagttgatctttaggggtgtatttttcgtttttttttcatttttcttgtgaaaatttccaaaatggccaaaatatggactaaaaacccaaaaatggcgaaatatggatttattcccgaaaacccccaaaatatggatttatatggactaaaaaacttcaccaaatcaaaaaattttaacgcagaaatgctatttttaagcccctttcttcatagcatatgcgcagaaaaaatatgttaatccatataatttacaaccctaacaattacgaacgacaaacgacaaatttggcattttgtccccacatttgtcattacgtcaaaaaattaagtcgtttttcgtcactttgcttttgggtattgggtatgagttttttgaaaaaacgggatccgctccagaaaagccgggcttataggaattcctggtgacaagcccaactcaatcattttgaatcaatttggaactaataaagaatttgaacatttcattcaaacacgcaaaacttcgtcttcgcttacgatttcgggtcggtgatgcattatccagctgggggcaatcatgaacagtaagaaaaatctcggattttaataacctaaaattggaattaaaggggcttatacgacctgatcactttgccacggttttatcaacaaacgattggtcaacgagaacgaatctcttttaaagacgcggccataattaaccgaatttattgcgaaggcaaaattggtcgaaaatttcgaataaattttaatttgtttagactcatgcaaaggccatgaggacaagtgtcaaaacgggggctatttgaagccaaatgattgcacaaaatgcaattgtccggacggatacggtggtcaaaactgtaaagaactcgaagagagtgagaattaattccatcaattaaaacaaattatataaattaattgaagatttgaattgtgaggatttgagtggaattgcaagagaattggtggccaataagtcagcagtgtttttgaagacgaaggccaaatgtggggggaattggccgtgccgatgccattggcgaattaaggcaataaaataatgtttagaaaattataaaattattttgagtgttattaatgcaaattttaattgctttcagcctgaagcggggaaaaaggcgcgaattcagttcaaaagtttgaacaatttgtttgaatgcacatacaactgctcatcggcgtatgttgaggtcaaataacgagccgacgaaagggcccaaggcaaaaataaataaacaattaactaattagttacaattattaatgattatcaaaatattgctcattaaggtgccaagctttgttgtgccgcatcactcactgatctgaacgcaaatgaatataaaaattggattgcggctgaaaagccagacatggacattgtcatatccgcgcgcctttcaccaaaatggaccgtaccatctaccgtattcgagctgacgtatgaatcaggcaaggaaaattgtgaaataaatttttatatattttcaatttttctataattaatttattttaaattgaaaattgtctttatttcaatggctttcgtaaatcaaaaccattacacaattaaaactgttcaaaaatgttaaggcaaagtcaaactcataaattcgaacaaatgcgtaaataccgataatttgtttgccgagaaaaggaaccccggcaccggcggtttgaaatgttatgacgagatcaagcaccaatcttatgactgctcctgtcacggtgataagaaatgccttgctgaagaaaaatgggctcacgacgcctttctttgtccaataataaaggtaattaattaatttattattattaattaatgccaaaagacaccgccaagacaaattcatataatataggcaatttaatttttaagtagagtgaagcgggaccgggacctggtagcggacaactgagtaccaaggtttcggttttgacatggacctggactagtcccggttttcccagccaaaaattaacggttcttcaactcgaaaaggtcccggtccggttttacccaaattcccggttccgcttaactctatttttttttctatcaaaaaaccggaaataataaaaaaatagggacgataaact

SEQ ID NO: 23112 - DNA, 1202 bp, Heterodera glycines
caaaccaaaatgaaatggtcttaaaatattcctttctggacttgactgggaagtcttgatatcgaagctgttttctgcggctaaaaacggttataccaaaccccagatttttgaatccggttttcagaaaaaatgccttggtggtgaaaacaatatttcacatttcactccataactttgtgagttcggcacggatcgagaccgggataagaccattggaaagagcagctcgagctctacaagaaggtatggaaagaaaaaatagttatttctgggactttttcagaaatcagaattaattctccaatgtggcccaaattttaggcccccagccacagccccttgcttctcccagttttaagtcttggatttgtcaaataaattcaagacttcaaattaataatcaaaaattctcttaaaatttttttgaacccaattcaaaaaaggaaaaaaatttgcagtcaaaaaattattcgaatttctccaattttgtttccataatttccgaaagttattcggtatcataatgccaaaacaaaacgaaatcgttttaaaatattcctttctggacttgacttggtttcttgatatcgaagctgttttctacgctatttctaaaacggttataccaaaccccagatttttgaatccggttttcagaaaaaatgccttgtggtgaaaacaatatttcacatttcactccataactttgtgagttcggcacggatcgagaccgggataagaccattggaaagagcagctcgagctctacaagaaggtatggaaagaaaaaatagttatttctgggactttttcagaaatcagaattaattctccaatgtggcccaaattttaggcccccagccacagccccttgcttctcccagttttaagtcttggatttgtcaaataaattcaagacttcaaattaataatcaaaaattctcttaaaatttttttgaacccaattcaaaaaaggaaaaaaatttgcagtcaaaaaattattcgaatttctccaattttgtttccataatttccgaaagttattcggtatcataatgccaaaacaaaacgaaatcgttttaaaatattcctttctggacttgacttggtttcttgatatcgaagctgttttctacgctatttctaaaacggttataccaaaccccagatttttgaatccggttttcagaaaaaatgcc

SEQ ID NO: 23113 - DNA, 2167 bp, Heterodera glycines
tatggtttcaggtgcaaaattcggccatttttggacaattagttgaagcatccgtgtgtaaatcatttcacattttgaagtgagaaggcagtacgcaatcggaaaaacccatttatcacgtctaaaaagacaacaacaaaaaacgtgaaaacataggcttttactttgcgagaagaacataaatttgactgaacaaaggcggcgccaaactgaaagtgccatctgcgtacacatttttcataataccggcccattccgaagtcgcagcgcgagcaaatatcaaaattcttaacacggaattttttaaaaattaatggttttattttttttacctttgcggtccagcctgtccctgaatttgaaaaacgccggtgtccgccaataagaaattctcctcgtcagtctctgttcgtttgtacattctgtacgctggcggcaattccaatgcttccaaactgagtggtgcagcaggtggtacattttcgtcatggcgaacacgttttataacctaaaataaatgaacaaagcatactttggcagaaaaattcgtaaaagttgacctgttttgtcgcagctttggtcggaaaagcagccaacacgggggttgcagtgttctgcaatacttgcgcacggattgtagccggcgcttcgcacgtctcaactgcacgccgcttgagctgggttatacgtcgctgacactccacatgtgcggcgctcatgtcgcatgtgtggcttccaattattttgaggacattaccattaatgtcagtgtgaaggcgccctgaatttgaaaaatagtttttattttattttatgcatttacctttgcatttgtcgttagctccgaaaaactcgcatcgccaatacttccgaagtccatcgtcactgagtttgtgaagaacataaagtgaaccctcatgttccagcttctccttgtttcgctttgtctttatttcctgattggtagggcccggatttttatgtgctaaaaatcctgaaatatgtaataaaatatgtgctaaaaaatgctgaaatatgtgctaaaaacccccaaaaatgccaaaatatgtgctaaaatatgtgttaaaaattgaaaaaataagtgtgtttttgcataaaaattcccaaaaatctcattctttatcatttttagcccatacaacgcaaatcaaatacatttcgaagtgtttggggtaaaattgtctttttttgataaatcatttctataaattgaaagttccagcagagaacttcgaaatccaatgacgaattaatgaattcgagatttcattactactgattgggctgttccatttgtattgtagctaaacatagatattataagtttttccttctttataattgacaaaaaaaacatttgtaacagttatggacaaaaatagcttgccgtactaaaccgaccctcgtactaaaccggccgtactaaaccgaccccgaccgcaaatatcaacgtaaatttttaaaattgcgataatttttaaaatttgtttgagtggcttatcattttatgtagagagataacgcaaaaatgagagagtgctgaatttcagtcccagtcatatagagagtgcattgggaagagaattcacttcccttcttcgctgattcttttggtaatagacgccgattcactatgggtacgcgccagtgtcagacaaaattgctcataacgccaaatagcgcatttggcgtaaatttttgcgcgttaattcaaaagatactgatcactgccttttttgaagaccaattaacattaataaactttattcaattgactaaactctttatttaataatattatagaaagcggaaaagatgtgttcaacataatattcagatagtggaaatgtgaaatggtgaaaatgtttggaaaaatgaaatttgatcaaaagtttgggtatttgtttccattttcttgattgttttcgacacctcgatcgtgaagggcattcagcagtgtcacgtgtttcaccaacttctcaacaaccttctctggagtgccgagatgagcataacgaccgacctggatttataattttaatgggaaaaattattcattaaaccaaattgttgcacattctgtgcatgtgttccattccttgttcactgatcagcccccaccaaagatgagagcgcgcaaaaggga

SEQ ID NO: 23114 - DNA, 2193 bp, Heterodera glycines
  unsure (1)..(2193): unsure at all n locations
tttttgcgctatcaccgtcctcaccgncctcagattgcgctgtgtcgccaccaaaaatcgaatcctgcaatttgcttttattttttttaaattttcgacgtttttctttttaccggcacaacatcctccattgcccccccaattgtaacaaatttattggggacaggcaaatgggctccactctccagatattcaattcgggtttaaattcttctctttcttttgcaaaaagagcgatgaactctttttggttctgaaattttaattttggattttttaaatttaaattatctcacaatgttatctgcttccaccatagtccacccaacgaccaacccccaattctctgagctaaattgccatgtcacaatatagaataaaaacgtctcgttgcagacgccgcatttcatctaaaaaggccctaaaatttattccttttttaaattttatttttgaacccccccccatttactttttcgattacagatttaattcttcggtaggcactttaaccccatttgggtttcggtccttaagctttcgcatatccgggtgcaaatggtccccggggcacgcggtaattgcgttattcaatttagtgtgctcgacaattcatttttgcggctgcactcgtcgcaagtgcgcacttacaaataggttttttggtggcatattttttattatctattataaaaaaaatttcattgaaaaaataaagtgagtttttttggtaactgcatttctattattcgtacgcctctccctcattccttcacccattttgccgttcactcatttacctgcctttcccaatattcaaattattttattgtttacaattattacgtttttagatttatgcaaactcaatttattcatttcgataaatgcatgcaattctcgacgaggatacgcaccccatacaatggaatttgtgttctgcttttcaattcatctcatttctattgaattcattcattcattttgttgactaattaggaccattcagccgggctacaggacaacgcttaacggcgaaatcctgttatgatgctaatgctaatacgctttttagtttagttcggtttggataactggttcgacgcttaacggcgaagaccatgtttggtgctaaggacgtcggcattctcttttgtcttcattcattcatttagttgactaattaggaccattcagccgggctacaggacaacgcttaacggcgaaatcctgttatgatgctaatggtaatactctttttagcttagtgtcatgtctcggtttggataactggttagacgcttaacggcaaagaccatgtttggtgctaatgacttcgccattctcttttgtgttcattcattcattcatttatctgatgaaattttttgataaaaaaatgaattaataagaaattttcaatcattcacatcatttatcaaacattcaacgaacgaacgcgtaaattccgttcaccggtgcacggcagagtatgcatgttgctattttgcgcagcacgcagtttaccgcacacgttgagcaaagcacacatggccgcaaccgcggttataaaagttcgctagtgactccgtgcagatcatgcactctcgctcccagtacaattgtgccggcggtaccacaagggacgaagcggcaccgctgctgggctttcacgcaattgcagccgcacgtttcgctcatacagctcatgcagcatgatttggcgttgctgttgttgctgctgctctgcaggatcctggttttcatcgttctcagcttccagtatttgttcatgcaatgatccgcctcgtccagctgctcgcgtatgtgctgttgtctagccgcttgctctcgctgttgctgctgcgcctgctgcagaagatactgatgctgatgttcgatttgctgctgaagtgcgcgatggactatttcgtagcgaaccatgcggaccctcgcacgattcatatggactccaaaattcctccttggcctacaataaaaattaatcttttattgtttatataaatttgtgataaaatatgatttaaaaaatatatatggaataatcataagtaaatataaggttaaatggctattaaaaaattagcacaatagttaaattaaaattgcgatatatgccacaacagccacaacagggcttaaataaatacattatgactgacaaattaaaag

SEQ ID NO: 23115 - DNA, 1064 bp, Heterodera glycines
ttagcttattatgcatcttcagtttgcattctaaaacaattcattttttgttctaattttatgatttatttgttttctgttgactaaatagtcagttcttatagcaaatattaatttatgtttgcgtagcttcaaatgagcattctgccttcaatttcgaagggaagtgaatttttttataataaattgatagagagcaaaaagcacaatgtataatattcaaaaaatttatctatgcatttgttgaatgttcctaaacccgatcaaattttttaaacctttatatgaaaacatttattgcaggaaatgacaaattaacctgggtgagcacacatttcagataagcttcctatcattatttcttagaaacaactaataatctgttgaacagttatttcaaaataaattcgaatatattagcttattatgcatcttcagtttgcattctaaaataaaatcattttttgttctaattttatgatttatttgttttctgttgactaaatagtcagttcttatagcaaatattaatttatgtttgcgtagcttcaaatgagcattctgccttcaatttcgaagggaagtgaatttttttataataaattgatagagagcaaaatgcacaattgtataatattcaaaaaatttatctatgcatttgttgaatgttcctaaacccgatcaaattttttaaacctttatatgaaaacatttattgcaggaaatgacaaattccaacctgggtgagcaccagggatgggccgaggtttcgcttttcgcatttcgcctttcgcattattcgcattttttggcgtttcgcatttcgcttttcgcatttcgctttttggcgcgaaaagcgacttttacacccctaagaattggattaaattcccataaaatttttcaaaattttacctataaattggctaattttcagtgaaaaactgcttataagtgatcaaaatttccaatttttttccccggcggcgcctatcggcaccgccgcgcccccaaaactcctattttttcttagaaaatggcccaaaatcgcaaaatttggtaat

SEQ ID NO: 23116 - DNA, 1702 bp, Heterodera glycines
  unsure (1)..(1702): unsure at all n locations
tatcaaaaaaaaacaataatatttattcgagaaataataatatttattcgagattagactcacaaagcattttgctattagagagaataaagagagatgttggtgcaagattcaatggttaatttcttcatttaaatcaaaaataatattaaataatacattcttcaactaatatcgaatttaaaaataaattgaatcattataatttttaagaatttttgaatcaaaataaatgtgatagttttttaatttattcaacaaaagttgcatttttaaaaaagaaaattgagcccatttttgaagttagcgcgctaaaaaattagaatgggtttttattcaaactatttattttaagtcgctcccccctttttttgcttaaccggatcaacgaatatgaatgaccgtcgtccgataaatttcttccgtaaaatgtacgacggcatttatttttttgtttttgttgacactttatcattcccgcagggaatgaatgcattgacggagtgaaaagaaagaaatgggacatttatgagtgtcggagacgataaaaaagcgacgggttgataattaaaaaaaaaatgaaataacaataaattaattagtaagggggtgaacccgtgggcggggagtgaattccgtcgaagacattctcgcccggacggctgacctaccgatcgcggaagggcaatgctcgcttcagtcgtcgcattcccatgttagtttgttaaaaaagtgcttttcaaaaattaattttactataaaaatttaaatttttgctttttctggcgtaatgaataactgttttctggttttgaatcccaggaaactgatgtaaatgaccggctgctccaccttagtccccaggccgaatgcaatggattttaaattggcacctgttggcattttgttcctactttatcgcggtgccttcattacagtaattggtattattattacagttatttgtcgtgagtttgccactttcccttttgattagagggcgctcctccgagtgatggccatcaaatgatggacgcagaaatggccaagttcaaaatgttgcgagtgtcgtcaccggaaagttatgacaaactgaaaagcactcatgagaatttgtattatggggcggtgaaggcactgatgggacagctggggaagaatatgtacaaaagactgtccaaaggcaaaccaaaacaatggcatttgacaaaatggatggtgaccgtccttttaggagagcagcgacggttggccaaatgtttggaccgaattgagaaccggttcgacctgaagtcgtcggcaatttgcctggtggaaagcaaacggcgatggatggagacggaacggatgaagagcaacgaattgttggcatttgtccaggaagagggtacggtaatgtgggaacgggaattagtacggtaggtgcaatgatcggaaatggccgtttagaaaagcaccaaagcgacagtcatcgcaaaggagtggcatttatgcaagacagtaagggagttacggtagaagatactcacaaaatggtacggtatttggaggaaaatggacatgctcagcggaaggtgaaccacagaatggagggcagaaaaaacaacgaattcaatcagttcagcttcagaacagtcacctgctggaaaaagatgaaaggngaccaaaacggacagaatcggcgcggctgattcggtacggc

SEQ ID NO: 23117 - DNA, 1347 bp, Heterodera glycines
tcttacgatatttgaacgcaaacaaaaaaaatttctgaccaaaaatagctatctctttttctcattttttaccgcaaacttgtaccaacagttgcattctcttgtctggccctatcaaacaatcttacgatattgaaaacgcaaacaaaaaaaattaacttgaccaaaaaatagctatctcttttttctcatttttttaccgcaaacttggtaccaacagttgccttctcttgtctggccctatcaaacaatcttacgatatttgaaacgcaaacaaaaaaaattcttgaccaaaaaatggttatctcttttttctcatttttttaccgcaaaattggtaccaacagttgccttctcttgtctggccctatcaaacaatcttacgatatttgaaacgcaacaaaaaaaattcttgaccaaaaaatagctatctcttttttctcatttttttaccgcaaacttggtaccaacagttgccttcttttgtctggccctatcaaacaatcttacgatatttgaaacgcaaacaaaaaaaattcttgaccaaaaaatggctatctcttttttctcatttttttaccgcaaacttggtaccaacagttgccttctcttgtctggccctatcaaacaatcttacgatatttgaaacgcaaacaaaaaaaattcttgaccaaaaaatagctatctcttttttctcatttttttaccgcaaacttggtaccaacagttgccttctcttgtctggccctatcaaacaatcttacgatatttgaaacgcaaacaaaaaaaattcttgaccaaaaaatggctatctcttttttctcatttttttaccgcaaacttggtaccaacagttgccttctcttgtctggccctatcaaacaatcttacgatatttgaaacgcaaacaaaaaaaattcttgaccaaaaaatggctatctcttttttctcatttttttaccgcaaacttggtaccaacagttgccttctcttgtctggccctatcaaacaatcttacgatatttgaaacgcaaacaaaaaaaattcttgaccaaaaaatggttatctcttttttctcattttttacggcaaaattggtaccaacagttgccttctcttgtctggccctatcaaacatcttacgatatttgaaacgcaacaaaaaaaattcttgaccaaaaaaaagttatctcttttttttccttttttttaccgcaaaatttgggaaccacaagttgccttctttttgtttggcccctatcaaaaaatctttaccaaattttgaaacgcaaaccaaaaaaaattttgggccaaaaaaggggtatttcttttttttttctttttttt

SEQ ID NO: 23118 - DNA, 1897 bp, Heterodera glycines
aaaaaaacaaaaaaaaaaaaaatgttttttacggcacgcgtttcctattttggaaacagggggccggcggcatcggcaggcgccgctgagaaaaattttaatgccattgttaattagagttgaccaaaaatgatcaattttgcgattttgagctaatttatatgaaaaaattagtaaattttaagtaaattttgaaaacttttcggtaacagttttacatagaaatggccatttttggtgagttttttctaaaaatcagcataaatcagcaaatttcctcaaaaaattcagcaaaatactgataaattgtgatagtgaaatgcgttcatatggtccagggaatgaatcatttttgaatcaaattacaattgttgcttaatgattcactaagaaatgctttgtgttgacttttacacacataattaacggattattgaaaactaacaaattctaattcttttcaatttttaaataattgctatttcttagattaatgaatgattaaataatttgatatcattacatcgttagtatcaatttccttcctcaatacggacatttgggcacacattttttcgttttgtcgcggaacaatcccttcacacagtcgcatgaacagtcacaaaagcgcgcagtgcaaatctccggcttcggattgtcacaacttggctcacatccgttgcaactcttttggcccggctcctcattttcggggcactaaaatttgttaatttattgaatttattatttttttttataaaaaagggatgttgctcattttaactgaaacattaaaaataaattaattagctattaaagtttaaattgaaatggattatttaaatagcgacattcaaaagaataaaatgtgcagaataaaataatgacgacaaataatgcatttatatggaatgatttgacacaaattaaacttgttctttagtccaattagttatgatttattaaatgtcttatgaaaaacatcattatgtcatagggaaaacgggtgagaggagcacaattaattgccatgtttttaagaaaaattatttagtaagggagctaaaaaacaaacgaaaattaaaagggaatacaattaattaacaaagatttttaaattgttaatcgtagaatggttatgaaggaaataagcgaataatattataaaattaaaattatattataaaatacaatttaaattaaaatgtgaattaaattatttcttcctttcattgtctggtgataaggttgggcttattagtgttttcccagttctttctttgcacagccacgagcagcaaaataattatttttttaatagcaaattggaaaaaaaattaaaataacccgggaacattatcttattttttaaaataatttttttcactcaaacagttatgctgttattttttacggttgatttttagtggagttgcacggcattgagatcccgactgatttttggtcggaatcccgactttttcggaagcagatctcgatttcgacaccggttttcaaaactccaatctcgatcttgacttttaaatccgaatgggaactatagattgaaaataacacacatttctaagacttggtctgacaatgagcttaaatttaggaaaaagcatttcttttgttgttataatggcctagaggtggttagtagaggtcaggagtggagcgcgaccgcgatccacgaccgcggcaaattgaatccgcgatgcgccatccgcgaccgcgggatttttctgtccgcgctccagcatgagtagaggtgtgccgtgattgaaaaaaacctgtgcatcgtgaatcgtaaccgtaaccatgatccaaaaccgtgaattcacggttttctgatcgtgacatgaattcagagttgagttttgtggatccgcgg

SEQ ID NO: 23119 - DNA, 961 bp, Heterodera glycines
ttgaaaaaaattggatttttttttttcgggggcagtccccccgggaccgatgcgccaagttttatggggagaccgaatccttcgggaatagcttccctatagcctgtactttaattctgcgttggatttttgctccccataaatgtttgagtaacccaaacggacacttgaaaaaatcgattttttttgttttcggggcagtccccccgaaccgatgcgcccagatttatggggagaccgaatccttcgggaatagcttccctatagtctgtactttaattctgcgttggatttttgctccccataattgtttgagtaccccaaacggacacttgaaaaaatcgatttttttgttttcggggcagtccccccgaaccgatgcgcccagatttatggggagaccgaatccttcgggaatagcttccctatagcctgtactttaattctgcgttggatttttgctccccataattgtttgagtaccccaaacggacacttgaaaaaatcgatttttttgttttcggggcagtccccccgaaccgatgcgcccagatttatggggagaccgaatccttcgggagtagcttccctatagcctgtactttaattctgcgttggatttttgctccccataaatgtttgagtaccccaaacggacacttgaaaaaatcgatttttttgttttcggggcagtccccccgaaccgatgcgcccagatttatggggagaccgaatccttcgggaatagcttccctatagcctgtactttaattctgcgttggatttttgctccccataattgtttgagtaccccaaacggacacttgaaaaaatcgattttttttgttttcggggcagtccccccgaaccgatgcgcccagatttatggggagaccgaatccttcgggaatagcttccctatagtctgtactttaattctgcgttggatttttgctccccc

SEQ ID NO: 23120 - DNA, 1579 bp, Heterodera glycines
  unsure (1)..(1579): unsure at all n locations
taactttttaattaatagagaaagaacggcttttaagcctttgctttgctaaattggtaattttagaaaaccggtttgaaaaagtagtgttattggcgatgctcgggaaatgagaggggcgccgggtcgtagcgaaggtaaaaagaggcaaatttctgaaaattttcttaaccaaatcctttaaaaattctgaaaattttccacctgttcccaaaaagttttatgaaaaaagcgcgtcggaaaaaagagggtttgaaaagcaaagcaaaaaaaaaaggtcgtcaatttacgtggctggaccatttcgcaaaaattttggttgacccccccccctttttcatgtatgaaagccaaaaagtaataattaaaattgtcatttaatgaaacactaattaaatcagaataaaaattggatgaatttttggttgacagctaaatttcttaatttaaaggcaaatataaccaaatatctctcaataaatatttgttgttggtgggaaattttgacaattttgccatataacgcagggaaaaagtgtgaccaaattggccataaatggaaaacatgaaaacaattaataagaagacaacaaaaaatgtttgtaggcggccaaagttgtgtcaataaaaaaaatcttgacgatattattatttaataaaataagtaaaattaattaaaatataaaattgattggtggggaaaatttgtcaattttgccattgaattcaggaaaaattgtgaccaaattagccacaaatggaaaactattactagggcttctttttttaggcaaatgcctaaaatttgcgcacttaataagtgtagctaagcacgaaaaacgcgttttccgcttggtttggggtgtctacgatgacttttataatgcctatttttgcctatctcggggtttttgtgcctaaagtgccaattttaggatttacgaaaaataacaattattttctttttgttatttagcttatttcatcagtttatttttgataattgttgagatttaattcaattttccaaggtgtccctattctaatgtaacaccccaattttggaaaaaaattcgtaaatcctttttccgtcgtcatttcgtcttctcacttttagaatcttaatattttcagaattgctatatacaattaaaatttcaaatcgattggttcatgagaagtggtcaaactcccacaatagggtgtccctattctaatgcaacacagtgtactttctttaattcaagtttaatttaagtttagaatgccatgatatgtaataatctgatggcttaatgaatgtgtggcttaattaaggctaattgccaataagggattattaattaattctttgtcaaattaaagttattttatgccaaaattattttcattcaatttagtctttttatattatttttctcagaatgccatgataagcatgtgttttgcgatctttggacaacggatggccaatgtgagaggagcaattcaaggtaattattggagaattgtcagatgtcatgtaacccgggggtggagagatgacaacaaannttaattgcaaacaattcattaacaa

SEQ ID NO: 23121 - DNA, 2485 bp, Heterodera glycines
ttttaaatatgaagtcaattaattaaataaataaataaaacacacccccacaggtgaaaggacacatcgaaaacgaagacggaacaagtacacgcgtgatgattgagcactatgataaatacaatgggttatgtggatttgaatcgtttttggcgtcatgtgcttttaccttttttggattttttgttcccgtttcctatgaagatgatgattgatttaattttaaaataatttttattgtatattgtgtttcacaaattcataaacaaattcatccgaattacttggccttttcaaaaattgcataataaactcaaaatcaaatcctaaggacataaaataaataaaaactaaaacataatgaccacaaacattagagaaaatcgattgaaattttcttcgattaaaataaattttccgaaaattatttgccaaatattttttgatcagatcgtttggcatctcgccataggagtcaaaaaagtaggccacccccggcgaacgcgcccatattgcgcaccaatgggttcccggcattcccgacgggtcctgaagtggcaaaattttatttaatgtattttttggcactcaccaaattgacaattagactgcagggaaatttcgtgcactttggcaatcggtcggccggaaaagtgccaacaaaatattttctcgtcgcccggttctcaaagagagctctgtcgatgaaccgattgtccattcctgcgacgaatccgcctctccctcaaaaacaggtaaaatcccgcagccgcagtacctgctgcaccaaacaggtagatgaggcagagaaaaaagttgattggcgacttctcgatcacatccggaaaacaagtacaatcccttcgtgtgcagcattggaggagggcatttgaacaaaatcggaggaataattctcaccattcatactgtaaggtcactagtgattgatctgttccggtcaatcagaatgagcccgtcagcctcggcataggctattaaagtgaccccctcgttcggaaccgcttcggcaaaccgaatgttcaccgctgtacagccctccttgatcagctcaaagcccggcgagtcctcctgcgcattggtcatttggaagacatagaggcagtaggcagtcttgaacatgctgtagctgatcccgttgctctcagttgtacaggccatgccaaggtgctcctgggtgtcatggtacgcccttgcgtacctgttgttcttgtagtccaagttgtacggaaactgtgggtacgtcctgccagaggcggtcagttcaatatcccgcacctgaacattttttctgccagaaatacatgtcaaagcggcacttacgttgtggtggttgaagtaaaaggggttcttctgattgtgcccaatgtagttttggtttggcaccagcccaatgatgaccctccgtggcacttcctcggtgaacagattggcagaaaaatcgtatctccctccggtgatgaacagcgacttcatcagcgtttttcggatgccgtatctggcgggctccaggtccaacttctttgcaatgtcaaggctgagaccgtccatcagatcaaccgtcttcacgatcagcctgcagtcgacaatctcaagcgtgtacttgtccctatttgcggcttcctgatgtatcataaaatcgtccgactgcagggcgagctcaatatcaatctcaacattgctgatcatgtacaagtcctggttgaatatgtcggcgctcagcttgcttatcgcttgaaagcccttgctctcctccaccgcctttttccttcgatcgtttactttggtcgggtcactgtcacggaaatagcctgccacgccaaagtatgaatcctttgccgttacagggtagctgagctcggtgtccaggaacaccttgtagctgtacagctggtttgagtcgtacacctcccgctggttgatgtgcactttcaggttccggatgaacgttgcgccgggcatttggataaggccgaccgctgcgtttgccggcacatcaaccacaaccccatcatctgccacttttttgagcttgaactctgtgcacacaaacaccttgctaaggtctacatagctggtgattgggtggatctgaaccaacggatttgtctgctactgcatgtgaaaaccacctgccttaaaatgaaagggcctagagcttattgggttcagcgtcaggtactccctgtagctagagttggacacagcgcagctcgttgggggtatggtgaagaagtccagccccgcatttgccacctcagcacttgacacatccacttttttatacaacattttgctaataataaccgagcgagtcaaatcttttcttctttaacagagctttttggggaacagtttgtccaacaacgtctgagggtttcaaaatgctttcagcttttttcccgcctcctcttctcttccttcttccgcgccccttttgtagtgatgaagaggcctgtccagcaat

SEQ ID NO: 23122 - DNA, 3765 bp, Heterodera glycines
  unsure (1)..(3765): unsure at all n locations
tagtctgaaaatggtttaaattaccattttattgaggcagagtgatgacttttagttcgttcgtttccgtgtttgtgaaattcgagaattttgaattttcggctttttgtccgaattcgcgcgtccgggattcagaattgatcgaccagatttgtgaccagcaacctcgaaaatccttggaaacatgttttcacgaccttagaaaaaaaaatgtttttttcggaaaatggcgggaccaggctccactatttattatgtaccaagaaaagcatattgtgcgacatgaaaaaaaggtggtgacaaagtactcaatttgggtgaacagtgcggaaactgttggcattttgaagaaaaaaattgaaaatgagagcggcattaagcgcgcagaacagatattgaagtgcggcattacaaatggtccagccgaaatggaggacaagaaaaaactggaattttatggcattggcatttgtggtggtggccaagaaatggaggacagaaaacaattgaaacaaaaattgaaacattatggtagtaaaaaccgggaaaaaaccgggactagtcccggtcccggtcaaacccgagactttggtactcagttgtccgtgttcaggtcccggtcccgctcaactctagtctaaatcttaggaaaaaaaactcttttgcgtttgcgaacaaaagttgggacttttatttatatatttttacatttttccagctttttatacacatatttgagcgttttagcattttttccaaattttttgagaatttttgagaaatttataaaaatttctcgtgaaaatttaaaattaaaaaaaatatatataggtatacccctanaaaatcggtttttttaaagagatgccanaattaatttttaaatatacaaaatgtgattctaagcctatttaggtcatttcacgctttacgaagagctttttgtccaagaaaataagcattaaaaaaatttattcacataatttttggattttttaacatttgtgccagccctaggcattggacatggcaaaacaccaacaccaacaacaacaatattcctgacctccgcatggacggtaaaaaacgaaaaaaattgccaaaaaataattggcgtaaaacaaaacgccaacacactcaaattgaaaatcaaattatatctttgatctgatcaaatgttttaaaatcgtaaaaactcattagaaaacatagttttttacagcaaaactaaacatttattgtaatgtgagggcaaattatttattaaatataaaaaattgaaaaatgtatgaaaaatcaggtcgccggtgaggaaaaattgggtcgaaaggccatcaatttcacatatgtcggccaattgtcttgccacgtccgcaaaggcaacgcgaatgcctgcacttgtttctgcacctataaaatgcacatgtaaatgttaacaattggcttgctcagaaattacccctgtagcacccaagcaaagtaaaatttgaagctgccccaggggttgccacatttccaattaggaagcccagtttcatgaaattgccaccaaaatcaccagcgagacacaatttgagcgcattgccaggaagaacacgcaatttgttgctggcccgaagccgtttcacacgctctgtgagaacaccagcaacatttgtgcagaaaagaacaactgtcgattggccgctcttaattttaagaaaatttgaaaaaaaatttggtaaaagtacagggaaacggtctgcatcaatacgacgggtggcatacacttcgccgttgaaaagtccgcggtactcatccatgaacgactgagacgtggcaaaaaagtcgcgtccaagtaggccgagttcgtgtttcaatcttcttcgttgatcaggaacaattccaacgctttggcaaagtcggacgtcatcccaggccgacaagcgttgttgtccacttgagttgcgctttcttgggacagattttggtgtactgatcagtttcattcgtcctgctgggctgatcgatcggctcaagcggcggacaatggcaccggcaagtaaacgccacgggtttcttcacgtcagacttttgttttaatttttttttactcattaattcctgaaaaaaataattttattatttcggttaaaataactctaaagttggccttatttttgtattaaatttccttataatcgattcagaatttttttctctatcgatatgcaaaatatgaagaaattctgtaaggcgaaaaaaaagttctatagagcgaagtaaatgttgttctttacattattaagaatgaagagatagtacgtaaaagtgagagaaataaagataaaaagtaaatgtgacagaacgccaattttttcccataattatccataaaaaagatttattgccgcttttttttcttttttaccgtccatggttcccattttgcgttttcctttttccttttcaccctattgttgagtgattggaccaatctcattgtgtattcaaaacatttgatattattgcctttaccggtcccataaaaagtgtgaaaaaggtgatcttaacaatgtttgcattcggaggttatcgatggcgctaatcaagaatcttttgttccattttacgtttatttcttgcttcctatactccttgtgttttcttattttaccatcaaaaagtgctttagatgttaaaaatggtttggaaaaagacagcagacattttgatcggtggcaaggtgccacttgcgatttatcactccaaccggtataactattaatacatgttaaatgttacaacaaaatgtttattctttgaaggtcaaaaattcgcgtatttgtggccgagacacctgggccaatggtggatgggcacataacttttggtaaaaaataggaataataaaaatataatttctattaaaaatttaatttttctgaaaaatatctgcttgttgtaattctttggatactggataaaagtccatttgactatacgtcccatgttttttttaattgtacggagatatcggtatttatttcttttgtgaccccctcccgaattttttttttttacattttttatcttgcataattttaggcgctggaaacgcacctgttgtttgcactttaccttaaaataaatggcgcatgcgttttcagcgtctaaaattgcccaagaaaaaatgcaaaaaaaaaaattttttttttttctgaggggatcacaaaagggataagtagcgagatataattaaatcaaccataaatataaacaaatcatgggattggtaatcaagaaccttttgaaaacttgttcagtcaccgaaacccacacaaatgatgggctgccccacacgctggaacaccttgtgttcacgggcagtcagcggtacccctacaagggcatgttggacataatcgccaaccgctgtcttgcgagcgggacgaacgcgtacacggaccaagacaataccgcgtacgaactccgcactgccggaagcagcggttttttgaaggttctccccgtcttcttggaccatctcctgcgaccgacgttgacggtacaacaacattggcaaatttgcggttttggcaaaaaatgatttaggcatttcaaaacttaaacatacaaatttgacatcaatatctttttttgaatcatttttaaattttactttcagcagtcacaatatgacacaaaggtgcaccacatcaatggcgagggcaaggtggcctcatataggcgccaccaaaaaataaaaagaaaaattacaataaa

SEQ ID NO: 23123 - DNA, 1426 bp, Heterodera glycines
aagatcggtagtctcaagcagcactaaaataggccaatagatacaatatttactaatttttatttattttttgataaattcataaaaaattcccatttttaaacattcataaaaatcgtttgtttttttttgaaccccacaattttttgttcgttttttgaatattaatgagttgttttttgtcgttttcccaatttccaaccaaactctggaaattttgttcaccatttatttagtgaaagtccgtggacgaacaaaaaaatgattcatcaaaatcatcagcatcaatatcagctggtcgcttcagaaatgaaaacaattcaatcatttagtgggcaaattgtgaagggtattagcggatgcgtaaaacgaataatagctgggcattgaaattttgcaaaaaaaaaatttaataagatttttcgatgaaaaatttttccattaattttctttaaagaaatcacataaaatttttcagcaaagttattacaatttgccggaaaatgacaatacaaaacagaacttataaaaaagaccaaacagatataaattcacttaatctatttttaaatttggattttacattcctaaattaaaattttttttttcagttcaatttgaattcaaaatttgaatttcctcatcccagtgctctctaattcgtccctctccctaattaatggcttcatgcaaatcacccattagccttctcagcgtgcttctgatcatgctgctgatcgatccatgcttcaactattatttctttaatcccgcttgttcgttttttttaaattaaatttttataacggttcacaaattaattttgcacaaaatttcagcggatgattgtgttgtggccattcgtaatcgtactcagattccacctggggtcagttcagtctgtttaagttttgtgccatttcatgccctaggtttttggtgttttgtcgttactcaaatccatcaaaatgggcgttacctcataaatcaaccaaaaaaaaaaaaaaattatttattacgtggctcaaaagtaaacaaatttttttcccgagactcgatcccgagaccgaaaagcccgagactcgagacccaaaaaactcgagacccaagacttctttttaaaaattttcttattagcttaaaaaccgtttaaaatttttgacaagtgcaatttgtgcacatagcagattgattgcgaaggctcataaaaatttcttaatctgaaatccaaacgtctaaaaataaattttctaaaacggtatttgctcctaaacaatacacattaatagcttttgtataaacaattgagtatgcttttaccttggcaacaattcgtgccaaaaattaaaagtaaattgtcttccaacacattgtgccataacatgttgttttgaagcacttggcaaatttttcaattcagcttgat

SEQ ID NO: 23124 - DNA, 971 bp, Heterodera glycines
tcaaaaattttttccattaccctaagagctgcggaaattgtgaataattctcagaaaaatggctatctctttttaggacaattttctatctcgtaaccccgatgctaatccgttccggagagcctcttcaaaataattttttccttaccctaagagctgcggaaattgtgaattaattctcagaaaaatggctatctctttttaggacaattttctatctcgtaaccccgatgctaatccgttccggagagcctcttcaaaattttttccattaccctaagagctgcggaaattgtgaattaattctcagaaaaatggctatctctttttaggacaattttctatctcgtaaccccgatgctaatccgttccggagagcctcttcaaaattttttccattaccctaagagctgcggaaattgtgaattaattctcagaaaaatggctatctctttttaggacaattttctatctcgtaaccccgatgctaatccgttccggagagcctcttcaaaattttttccattaccctaagagctgcggaaattgtgaattaattctcagaaaaatggctatctctttttaggacaattttctatctcgtaaccccgatgctaatccgttccggagagcctcttcaaaattttttccattaccgtaagagctgcggaaattgtgaattaattctcagaaaaatggctatctctttttaggacaattttctatctcgtaaccccgatgctaatccgttccggagagcctcttcaaaattttttccattaccctaagagctgcggaaattgtgaattaattctcagaaaaatggctatctctttttaggacaattttctatctcgtaaccccgatgctaatccgttccggagagcctcttcaaaattttttccttaccctaagagctgcggaaattgtgaattaattctcagaaaaatggctatctctttttaggacaa

SEQ ID NO: 23125 - DNA, 1625 bp, Heterodera glycines
aaaaagcacagcgcaaatttgtacttcggtgttgtactccgagattgcgatgatgaggaatgcgagcagcagacacccgctttttcccatgcagccatcaaatttctgggcattgccagcgtagacgccttttacaacctatcagagaacgcgcccgataagttggaatcgaccttgcagtcgaaaatcgaccaaactgtgttcgtcaagctcaacatcaaggtgggtagtgtaaatggtcctcccgctattatctagtccagtgtcttctacgtaaaaattatgtcagataaacatgtatgttttaaggaaaagaatgagaccgcgacgctagactggattatttcctcaatatctgaggaaaaaccggtggcggtggtagtggatgttgaaagcagcgatgatgaggccgaggatgggtcatcatcttcaaatggttcacctaagaagcgcaccaaaaagaattgatgaaggtgcgaatgatgatgatgtatggcgccggtaacggacaagatgttgacccgcaagccaaattttaaggctagatattctctgatgatttttagcattcaaccaaaaaaacgctttacacgatttttcgcttttcatcttaaacaagtcgcttctatttgcatttgccatattatatatatagtaatgcgttaaaaaacgctccttatttccaccgaggtgctgaagatgtgcgaaaacagaagcattaatctcatgtttagcctttttcttttgcacacaaccacaatacatttgaagagtcaaataatgaaaaagggtgaagacgacactgctactgctgctgctgctgtcccacgaggcaaacggcccaactcaaactctgtatcagctgcccatttttctactgaatcagaggagatgaaaagttgtaagaaggaagagccgatggcgaccggatgtcgcaaaggtgcgaaacgacaatacccttattcgttgatgtcagctcgagcccaagatgtgtggtaagttttcagacccaaagtaaagcgtatgaaaataactcaggtcgctaaaacttgaccagttggaggagaaatattcaagaatggaagaggagctttcggaagacagcgatgatgcaattgatttctacgaagacggtattgatgatattgtggaaaagtgagttagcctcctttataccagctagaatgttatccattcatcctttttttaaggataaatcgtttcgaagcaaaagtgaaaaaatggtcagtaaatcatggaaatacgccagttgtcaaaaaaccacggttagttgttttcaagcagacagaacgcaccacatattatgacaacatactgaattttacagttataacacaaatgctgatgagaatagcaatgatgctgatgatgatgcgccaacatcgactgtgtacctgaatttgcacaatgacaagatgatcgagaaaagcaattaaaaaaatccctgatatggtttaaaatgatgataatgatgaggatcataaaaaactccgatatataaaccgattattttgtgagtgttttattacccaattaaaatatcgcgaaacaaaaattttttttttgatttcctgttatttgtattcagctaaatgccatccgat

SEQ ID NO: 23126 - DNA, 978 bp, Heterodera glycines
ccgggaaaaacgccgcgaaagaaattgaactgatgcactgtgtggagagctgcggccgaattggtcaaattggagggcattgccggcggcgcaaacggaagcgatgaaagcgcgtcactcatagcggtcgccgttggagggggtgacgcggaagcggcggaaggcgggcggcacggcggcgagtcgctggcactgacgcggtcatcgccgcccccaccgccgtccgtgggcaaacggacggtgcactcgccgcccattccgccgaggccgtgccgacgcgaggcattgtcagcggactctcttaagaagcgatgttcactttggccttgattttggcacccaaatgtgatcaattgtccctcccccccccaattgttcaccttttgcgccattttgtccgtctgttttggaaccaaacctaaaattgtaaatgaattgacacaaaagaaaagcgaagcaaaatcaaacaaaacaacacaaaaacattttcccattcattcattagtcgccgttgggcttcgccctaaccccaaattattcatttatcccttcgtttgtccatttgtccatccgttcgttcattattcaatttattttcccaatgatcggatgcgttgcgccattccctccccccaaacttttcattgtttgttttcctccccccccccctttttttcttctctccctttggcctttttctttagtaactgttccattgattaaacattcattctctcgcttttcaaactgttgaatgtcgtcttattggacggagaatgatttgaatcacaaaagaagcgtttggttggatggaatggggtgagggccattttatggccaaaatgggcgagtggagggggggggggacaaagggagccgcaaaagagaggagcaaagacatttatgggataaaaagaggggggagggcatttgccaattgtgccgcttttggacagatattttaaggggaattgggag

SEQ ID NO: 23127 - DNA, 668 bp, Heterodera glycines
ggggaaaattatgggaaaaaaggaaagtgcttttgcatttcgaattaaacatcggccgaaaaattgagcaaattaatgggaaaatggtcggaattcgggcgatgttcttctgatgatgggcaatgaatgaatgctttatacgcacattatttgtgcaacttactcaaatttgttgggttggcccggaaaaggaaaatgggggggggagggcgggtgccaatgccaagctgagccaagccgaacaactcgggacagatggcaccccagaggcgataaaatttgcattcatcgtatcatcacttagttcttcgtcagtaaacatctgtccccgaattatactgttattgttgtggagttgcgcctaatccgcgccatttgccccttagggcataaaacatcaaaaccagacgacggaaaacaaacgccgtacattttgttgtaattgtaatggatgcgcttctaacggcggcggttgggcagcggaagggggaggaggaaggggggggggtgacccaagtcccttatccctccccccccgtcccctcccgactatttaaagccttccccccgcccaataatgacaatacgccgccccttctgtcctctttttttgtttctttccacagggagggttttgtcctaccaataaacggacaaatgaaagaaag

SEQ ID NO: 23128 - DNA, 1378 bp, Heterodera glycines
ataagaagaagtcctggtcattaagatttgaatagcaatttaagtgaaaattagtcttgaatgatacagaatgtaacattatagccgcaccccgtttttgagttttaatttactttatatatatatatatatatatatgaaattagtaaatcatttaagataacttacgattaataacttaattttttatggcatatgaacaagttcattttaataaataaatttaatacttatattggcttctttaaaaatagggtattttttaatgtttattctacggttctaagtttccaccctcagagaccttcagaacgagttgaagcagcttagagcaagaagcgagagcgtcagatgttcattttgcgttaaatttaaatttgaatttcccgccaaatgcataaagggcaagtgccacaagcgagaaagagagagagaagcgaatgatgtattttatttatttaattttcaattattttttcatataatttttttaaagtaattttttatattatttttaatttttcatatgatttataaaaatagtatgttgtaattggtattttttttattcgtttcttgagtttttgtaattttaattatgtgaaattcaattatttattcattcctctgttataacctttttttagtcttgagttcttgaattgaaaaggtccattgggtcagtactttttaatttatcattatagagttgctttttgaaaaaagtcctatttttgtattttttaccttacaattattttcttctaaaatatttattctagtcttgaaacgggcatgaaaaaggcaattgagggtccagtatttaacacatttttgtcttttcagtgaagttataatttcttattcaattgtattatagaaaaaatttggtggatcttctaagctttttttgattcatttttttaaaattatctttgtttttgtttaaataatttgtttattttttattagttaaataataaattgttatcaacgatttaataaggcagatcatcaatttcatataaatattgtggaataaaggaaataaacgaattttcgccacgcattgactcctttttcaagagttaataagaattactttagtttattattttaattggatttcccaatacttcggttaaacgaaaaggactaatgcaaaaatgaataaacgtacgaattaatgggagaaaaagtgaatttaaagaataatcaaattgattatcaaactaaaaatttgtttcgtcgcgatcgatcaaaagtcgcgtcaccacggttttgtgaacaagtgttttgaattggcggatttttgctaaattttaaacttgataaaattatcgtaaattagattttattttattaaaaatgttctgtt

SEQ ID NO: 23129 - DNA, 923 bp, Heterodera glycines
  unsure (1)..(923): unsure at all n locations
tgtaaaggcaatcatttgtccatttatttcgcccgaaaaatgactaccgnaataaattatacaattgatatgtcatcaanataaagaaagaaaaatgagtgaatgacgaaaaataagtgtacaatattcacaaccgaattagtgagcagaataaagaaatgattttggcttcgttttaccactggaattcgttcgttctcaactttaatcacaaccaccggcccacacagaaaagtaaatgccttaaagcattgaatgcttttgtatttggtaatttaactatttttcctccaatttccactgcatttccaattgcattttcgtctccttttacttttaatatttctgagctgaagcagaagacaaaggcgaccgaaaaagtccgaattctctcttcagacaaacgatttaatttttgttaattgtctgaacggggaagagaaggaaagaacggagtgagatgagaatagagatgaattgtcaaaattggactcgcgaagaatcattgccggggggcgaatgccgccgcgcctttccgttgggatggtccgctgcttcgaaaggcttctcaaaatggaaaaattatttagcgggagcagctcgtttcccccccgccgtttcccccccgccgtttcccccccgtatcagttcccccccagctcggttcccccccgcatcgtttcccccccgagaaaattttttaaaaaaaaattgctaacttagaaatttttcaagaaaaaaatcttagaaagtttttttacaagaaaattctaagaaaaaaaatttttgagaaattttcagcgatttttttgaaatttttttgaaaaatcttagtaattccccataaaaatttcttcttagaattttcttgtaaaaaaaactttctaagattttttttatcggaaaatttctaagttagtaaa

SEQ ID NO: 23130 - DNA, 2076 bp, Heterodera glycines
  unsure (1)..(2076): unsure at all n locations
aaaaacaaaataaatgggaaaaaatgaaaaagaaaaacaacagtaattttagattttaattatttattaccatgtcctttttgtatgtttcgaacaattcgcccatcagctctcttgcgacaatgggtccagaatgaccttcgatgaaccgaaaaagcagaatctgtaaaaaagaggcggagtgtggtgtcgatcgcaggattggaatttttaattttggcttttttgaaaaagacaatttcgtagttttctttacctctctcctcttacgaccgacgaatttttttctcacaaatcaggattagtccatcgtagaaagtttggaattttgttaagaactaaggaaaattttttgtatacatttcacatattttcatatttacgatcgacattttcgctgacttttttcctttcactcccccccccaccaacttcttacgatcgactaattgtaagagacccccatgcacagttatgtatttaagtgatccaatttttaaaattctcaagtgggataattgaaatgcatatgcactctgccttcataacaaacacaattcaccccgtctttgcgcagcgcgtgcttggcaaagtggttgatcagccggcggtcgcgtgtcttttttgagtatacaatttctctgtattttttctgtctgagcatattgcgcacagtattctcttgagtccagcaggggaatagcaacaggacgaaaaggtaataaacaaagttaaatgttgtcagaagtgcgactaggccaaagctccacctatgcgagatatatggtagaaaaatttcaaatttttgtatgcaattttgcgtaacttgggtttaaagcggtaattagatgaatcgttatgggcaattttacttatttattaatcccatatgtcagcttcatatcagcaccacaaaatcccgaataaaaatggaataaagctgatatggtcaacgaagtgagagatggtcaaaattatggcggaaaaagtctttgaacatacctacatgaatctctaagttaatagaaaagaaaaacctaaaataatntaatatttgcttaatttttgatgctgatcattaaaatctcttacacaaacttgatcagatcactccttcaaggtgacctggaaataacaaaatacgttggaaatcggggaaattttcagaaaaaccccaagagctggacaaattaaaaaaaaaaatttgagtaggcctattggaagagaatattttctacagtaaattacaagagataagtttatttaattagcatttgttaacgcagagaaaaaagtgcttgttcaaagactttttcaaccagtctaactcactcatcccaggaggtaggtgttgacagatcctggatttcctagattttggtcacttaaaaaacattttcgtttctttgaaaaaaatatatgtatcttgtagagaccggacgggatcgggatcccgcaggatttcttcgggatcccgcgggatttaattcgggatcccgactcgggatccctccgaccccagttgtccggtctcttactatcttgtgacttttctttggcgcctgctgaaaatcggacagtgtggtggtgagtcaacaagaaatcttttccaacttttaatcactctgaaatttgtcactttaatgacattttaagaggcatagattacaaaagccggaaacgcgaaatcattttgggaatccatatcggggggattttaaaatcgcttctattgcacttcagggtctagctaacttttactcagggatgatacttggatggagcatttaagttctagcgcaaatccaattaacaaattccattttgaaaattttcacgcgctgctatcggcatttttatatgcttcacaaaatgattttaaaaggattgagcatcggtcccgacttttggatgaaattggaatatttgaaaacaaatttgtttttaaggtgtgtggcgaaatgatgtacataaataaatatttcataagtttaatgactgccgacttgaaaaaatacagcacagggcaggaaaattgaacaaaaaccatccaagacatcagcgggagctctctct

SEQ ID NO: 23131 - DNA, 1965 bp, Heterodera glycines
ggggatctctagagtctggatttggcggagggttggcgaccattgggcggggcaatgcgccgaaatgagggcccggcaatgggacaagcggaagtggcacttttgagggcgtgggacggaacggacagaagtccaaacgcggaacacagtgccatcttttgaaacatttccatcgatttatttggttggaaagaatgcgtcgaggggaaaaatgggttcatcaaacggttaatgttgattgagttctattcattctgagaatttggccactcagttggaataaattccatgctttttcttccgtcggagttggcattggcaagtgatcggcacgcggacaaatccttcagcaaattctgccgaatttccctccacacgaacgcccgccggacgaaactcatacaaagtgacgcattcggaggaaaagctgaagcaattggaggaatgccatttaaaatgaaactgagaatggcccaatgtgccattgttttgctcacattgcgttgtcaatgccatggcaattcccttttttcgtatttgaacactccacaaaagtggcactgaattggcgattttcatcctgctgtatctccactagcgtgccattctgttctaaaatgcagctgattagccaaaaacggaggccaaccaaaaggaaagggaccaaccgcggccaaattgggggcgatggtcggagcgaatgaccgtctgaaagggactgctcaaaaaccgaatggatttgccgctttcattggcattgtgttcatttggctcactcactgtgcacacgttctcgtgactcggcaaaccgatggcatttcccgcggttcgtttccccgtcgccccttttccgccgcccctttttttcgcccaattttcggcccctccaattggcccctcctcccccaaagtgctcattccgacggtccattctctgtccgagggattcacttctttgggcgaaattgacggaagaaagcgatcaccgctaccgagagaaaaagctgattggaggggcgaataacgagtcaaaactgaaggcaaaagaaggggggaagggagggaatgaaatgggaaaggaaaggatgactcaccaaaataaaacgcggaagtgagagggaggaagaggaagaaggaagagaagagaaggggagaagaacacatggaaaatggaggggagagggaagagctaaaggggaaaacggaaaatgaaaaaaggatgatgaagaggaggaagagaaaagaggaagagaagaaagatgagagagaaaagaatggaggagaaagaagaggagaatggagaagagggaatggaagaaatggccttcgaagaatgaaggtcttaatcagagtcatttgctggttgtttcgtacggaagtttatggattagaaagtgcggctttgagcgaactttgccctgcgcaggggaactttcctttgatttgcgttatcccattttacgtcttttcattaaaaaatggcatttgaacggacaaaaacggaacacctgccgaaccgaagtggcaaagtcggagggggcggaggaggacacaaaacggactctctctctctctctccccccactttatctcctctctctctctctctgacgcactctcttctccactaactctctcctccattcgtcgttcgttaactcattgtctctattggcacttcggcaggcaatttgaaatgaattaaatgccaatgcgagcttttgagctgattaattgtttcttttttttgaataaataactttgaatggttttaaagagaaggaagaaaaacaaaagaaaaagacgaaaaaagagagagaagtgggagagaagagagagagagggggagggcgggggtggacacgtaatacgtaccagggatgacacggaattccgacttccgacttccgacatttttggggatgaagttccgacttccgagttccgacttccgacatttttggg

SEQ ID NO: 23132 - DNA, 1312 bp, Heterodera glycines
ttatgcataaaaatgcattttggctaatttaggagcctattatttttcatgaaatgcaaaaccatggggtcccccctatggtttttaatttcaaaattcatttttattttataacttatttttaaactcatggtaaaaacatgagataaagcacattatattgggcttaaaattctctacaaaaaagctcttaaacgattttttcataaaatcaactcctgacaagttattgcgccagaactgaaattgaggcctagcaaccaaaaattttctatttccaaaaaaatttttaaaaatttttctgaaaatgacaccaatcgatagagcatgaaaaacggttgcttgaaagtggtcttcgttttgcccggaaaaatctgcaaaaaataataaaattaaaaaacggaaaattttcgagggggcctagctcgaaaatttctgaaaatttcagaaatccgaaaagatggttggatagagctcgtcgagctctacaaaaaagccgcttacaccgacctcctcccatcaaaagccggggagttattccaccggcgctgaaatggcccaaaaaagtatacaatttttccacagttttccagaaaaactggtaagccctaggggttcggtgaagaaccaaaaaatgtgcaaaactttccaactgagtgcctttacgaggccgatttttcatttaggcctttaaaaaatttttgaatcccaaaaacggcaaaaaaaaattttaaaaagtgacttttcggcgcctggcgctcagttggccctcggatcggaaaatctatagttttcctgaatgcgccgtcaaaagttacccgcaaggtcgaaatttcgaaccccaaccggcaaaccgtaaggagattttgtttttggaaatgagttgcactgttattctaaagtatataaactagcgtgtggcgcagtagttgctcggtgtagacagttggcttggtgttgttggatggtgctgctgctgacatgagcgcttcgcgcaaaggacttcgttgctagtgcatgctcggcttcaaaattcaaaattttaataggcttatgtttttttcaaaattttaaaggcgacatttcagcttcgcggcctcagacgggcgcttttgcgtccgtttcttaattttgttgggcttggacggtcgcatcgcaccctatttaaattttgttggggtcaaacgggcccttcgcgcccgttttttaatttgttgggaattttcggcagcttcgtggccttaggactggcgcttcgcgcccgttttttaattttgtgggcaacattcggccgcttcgcggcctcagaacg

SEQ ID NO: 23133 - DNA, 413 bp, Heterodera glycines
gttttttaaatttgttaagctcagatcgggcgcttcgcttctcgtttttaaatttagttggtccttttcggccgcttcgcggcatagtacgggcgcttcgcgcccgtttttcaaatgttgttttgctctgacgggcgcttcgcgcccgttttttaaatttgttgagatcggacgggcgcatcgcgcccgttacaacgctgttagaagaggttcaatagtgatcagaagaggtacaactgtgataaaaagggtacaacagtgattaaaagaggtacaattgtgatcagaagaggtacaactgtgattaaaagaggtacaaatttgattagaaggggtacatcagtgattaaaaaacgtacaaacaatgattagaagaggtacaaaagtgattagaagaggtacatcagtgatta

SEQ ID NO: 23134 - DNA, 1727 bp, Heterodera glycines
cattttcgcacaaaggacttcgttgctagtgcatgcgcgattttggaatgaatttatggatgtgataagggattttggtctacaggcatcgtgaggacgcgatagaggtacaacagtgattagaaagtgggcattcaaatagagcatttatggtaattaaggaattgtttttaatcaaaatagataaaaaaatcgatgtgttatatttttcattttttaaaatataatacactttttattaatgaaaaacaaattatgaaatgtataataattgaatagttatttaaattgaaatgaaaaaaattttacaattaaattttaaaataatagctgaaattctttaattaaatataataaataatttaaatgaaaatcattattcatcaaaaaataatttaattaaactaaaaaaatttattattaataaaaccaaacatttaaatttattaaaagtaatgaaaattaacccaaaaaatacaaagaaaaataaaatacaccgcccggcttcgaactttcccccctcccaaaaaaatgatgacccaaaatccccaatcacacagggattctgaggtcttaagtatgtcagaagtaaaatctgatcacttattcgtgatcagcgtcctaaattggcccaaaagacatatttttggaatattttcggtgaaaaaatttttccactcaaaaatcctgtcacccccctttggtcccgaatgccaaaatcacttttatttttgtatctttattttaaaagatgataaaaaggtcgaataaaatttatataatagagcaaaaaattgcggattttttaagtatttaaaatttcaaaaacacctttacagaaccgagttctgaatttttttctgaaaaatcgaaaatttccagaatttctggaataactttttttgtttttgaggtataaatttcaaataaatctcataaaattctcccgattttttgctattttttatgctttaaatgagctcaattggaccattttgaggcgagttatgaatttttaaaatttaggttgaattttcaagggccaaaaattattgatttttcaaaatttttttaccaccctccaaaaaatccaaaacgcaatataaagtgcatattcgtgttcagcccctcaaattaccccagaaaagtattttttggcaattttaggagcaaaaaaatttctcacgaaatgcaaatccatggggtcccccctttggttttgcatttaaaaattcatttttattttatatctttttttatattaaagataaaaatatgggataaagcacattagatagtgcttaaaattctctacaaaaatgctctaagacaatttttcgataaaaccgcttcctgacgagttataggcccgggactgaaatgtcccgctcaagccaaaaaatttttctatttccgggaaaaaatcgaaattttttcaaaaatgccaccaatcgatagagcttgaaaaactatgttttgaaagtgcccttcgtttccctgggaaaaatcggcaaaaaaagataaaattcaaaaacaaaaaattttcgagggggcctagctcgaaaaattttgaaaattttcgaaattttaaaattccatctgagagagctcgccgagctgtacaatatgttttctgccgccaaagcgctcagcacaatcccggccgagttattcccgaaaaacggaaaatgccgaaattgggtaccaaattttgccattttctgcag

SEQ ID NO: 23135 - DNA, 3157 bp, Heterodera glycines
cattaaagcacaaaacgacggacgacgcgcacaaagtcagatcaaaaattggacaattgtcgcgaagtgcttcacgtaaagcgagctcagttttgcatcgaaatgatataaaaggaagagaataataaaacattttaaaaaatgataatttattaaataaaatatcattaagtggatttaatgacattgaattttcagatagtcttaaaaggggtgtgaaaaagggtgcgcatttggcacgggacaaggcaaaagatgcaaacagttacatgcacgagaagggacggcatcactcggaaaataatggtaaaacgacaaatgccaatgtgaaatttcgggaattaaaattttgatttaattaaaattcatttttaaattaagaaattccacgccatcattcatcatcatcatcaatgtcaaaaggaaggcattattcatcagcaaaagaagggaatcaaaacaaaaggagcagaaaaggtgagaagttaaattggcaaggaaagttgaccaatttggcatttatgtatttaattatttaattttgcaatttgagagacaaaaaatttgaataataagggggaaaagggggaaaatgtgaggaattttgaagaaaacgaacaaaaaacaacggaagagaatttggaagaggaaaaggaagagaatatggaagaggaaaaggaagagaaagagaaaatggaagagaaaaaggaagaggaaaaagaagagaaaatggaagaggcaaaggaagaggaaaatgaagagaaagagaaaatggaagagaaaaaggaagaggaaaaagaagagaaaatggaagaggcaaaggaagaggaaaatgaagagaaagaggaaggaggtgaaaaatcattagaaagtgaggaactaagaagaagaaggcccggaagaaaatttgggtttaataatataagcaaaagcgaagaggaggaggaagaggaaagtgaggaagaaaacccattggaagagaagaaagaaaagggagaggaaaaggagagagaggaaaacgggggagagatggaaaaacaaaatgccaaaaaggaggaggaagaaagtgccaaaacgggggaagaaatgggaaaggaaaatgccaaaaagggggaagaaaaggaaaaagaaagtgccaacaaaggggacaaaacgggcaacaaaaccaataatgaaaatagtgggggagaaaagcagaaagaaacagcaacaaatgggaagaaaaatgacaaaaaggaaggccaaaagaagaaaaataatgaacaaaatgcaaaagatatggacaaaaatggtaaaaaagaaaaaggacaaatggccaaggaaaatgagacaaaaagtgccaataatgggacagtccaatccgcgacaggtgccaatgccaacggcggagcagcgaaatggggcggacagcgggcgagtgccaacaacagcaaaacggtacaataattaaggggatttatttaattaattaatggattttttactgatttagaagcggcagccaaaacggaggaggatttatgtgttcagtgacaacatttcgaattcggcgaaaagcaaaagaacaaaaaatatggtgaattaaaaatcgttattcctccgaatgccatggcattttaaggatttaattggtttttgagttggacaatttaaattggtaaaatatgaattttaatgaaaaggcgaaatttgggaacaccggctgattaaattttatttaaaaatataaaaaaatcataatattaaaaaattgaagaaattgcttcgtttttagaatgagcgcggcgctgccatcgcacaaactccgaagcgtttgcgcccgacgccgcgtcgccacccgcaccaccgcgccacacgtatcatttacgcgtcccccgactttcccccggtgtacaaaggcgcgtacgttgacgaagtcgcgttcaatttccgctaattgtaatcgttttgcgattcaattggctgtatactgtacattcattgcaataccgttcttatgttttgcacctcattttgcatactgtgtatgcttttaccgtataagaaagtaaacaaaattgttgatgaaagcaaatctctcccaaaactgtttattagtggcatttgtaactcttttcatcaattaaaaaatgaaaatgccaaatgaatgctcatttgtcagattggtttcgtcctgcgcctgccaatgtccgccggccattcgaacaaaaacaaaacatgccaattagtgttcattattcaaatagccatactgaagttggacaattactgcatttcctccctacttttaaataatctttcactgagttgtccgcctgtcatttggtccattacagtttttcattggcatttaaaaaattaaagttaccataataataatttggcggtttccccctttttccccaatggcttcccattaaaaaaagcaaaaacgaaataacttcgatttgcatttgtaaatattcggattttttcctgacacacacaaattgatcagaataaattgatcaaaacttttaaaaacgacgaatttaaaaccgtaaaaaagtgccgtaatgcggaaaaatttgatttttttcgatttttaatgaatcattctaagagaattttctgacattttcgaaaaaatcacttaacatttgcttatttttaaattttttatttgtttgttaagcataaatttattaaaacaaaaagttattgtgttttctaatgttatcaataatataggaaaagggagcagtaattacatcaagaagaatgatttgtcatgccgatctatcccaaaatggctaaaattacgataaatttggtaaaatcctaaagataaatattccacatttaaaaacaatagacaaaaaaatgattaaatttttatcaaatttaaatgaaataatccgaaataaaatcaatggaattagcgagcggaagcgaccatttgaagataaatggcaaattacaaaaatggaaatgtaaattctacgtttaaattgctgactttgcaccttttatcccatttggcctcccccaaagggattcatctgctgaggcccgccttggccttggcccatgggattcgcttggggcatcatcggctgctgacccatttggccaaataggggcactccgaatggctgctgaccatcggcggacatat

SEQ ID NO: 23136 - DNA, 1662 bp, Heterodera glycines
  unsure (1)..(1662): unsure at all n locations
actgagtcgacgcggcccggtactagtgcncttttattcctcctttattggtcacattttttcacaattttttccttcttttttattcgtcgctcattgtcttctttagaattaactcgcgaaaagcattaatataatttcacatgtatgtcgatttatgcaaagtattgtttctacccgaccactacttcctctaattgttaccccctcatcccttttctcgacatacattcctgatatttcgtgccgaccgccgctggaagaacctgactgttctgactgcctaggccacgaatgtggccaaattctatagaatatttacatacttcattttcgaactccgtcctctatttctacccacagtcaaaattttttataccacaatacatccttattgcccaaatcgatccaaatgcactgaattgtatagaaaatagggaatcgtggccatttcatgtatttgaatcaattttggacactaaaggagcatttgtgaagaatcaatttccgactttggttctaattcgggtccgggattcggatttggtcgaaaaggaggccggattcgtgatcaacgacatgaaaaccaatggaaaaaattttcgaaaaagggtgcggaacaaactttactatgaccaaggaattattgaaaaaaaaacaaaaaaaaaaaaaaaaattaaaaacccgaatttgctcaccatgtttttgggatgtggcggcgtcaaatggctgctgcaactaaaaaataaaataaatgattaaactttttttcgtttttttttgtttaaccaaccactgcatggcgtccaagggggtcaatgctgcggcttcctttctggcacttttcggtctgcgcgactcgctgcgacgggcggtggatgacaatggttgatctgatgagtctgaaacaaaatccattattttaataaaacatattctatataaaatgatgtgaaaagtattattatctaatttgaaaaaaaaagttattttcttttatataaaataattgtttttaaaaaattaaaagatttttataaattttatattataaatatataaatttaaaaaatatataattttaaataaaatgaaagtattaatttgataaaaaagtaaattttaaaagtagtgctgtttaggcaatcagggcttgaaaaaattcaactaagacttggattctcaagcataaatcttagaaaattagcattaagcacaatgacgaacacctaattagacacaattaccactataaaagcttttcaacttttaacaataagcaatgcatccgccacctgtggtgtctttcaagttggacatgtcgaatacgggacggcccggctggtcggtagtgaacacgaggttggacggttcgccctcgcccgccttgttgaccgcacggacacggaactcgaactgttccttctctggcaggtctttcaccgtgcagcgtgtgtcgcgcactgttttggcaccaggcacgccgatgtttgcacgtgtccagtcgtcgtcgcccattttgcgttgttcaatcacatagccgtcaattgatgcaccgccgtcatgcagcggacgactccagctcaggtccaccgtgtgcttggtgaccttgccaacgcgcggcttttccggtgcgcccggcgggctgacaaacggactgca

SEQ ID NO: 23137 - DNA, 1390 bp, Heterodera glycines
  unsure (1)..(1390): unsure at all n locations
gataatgagctgaaatttgagaattcaaaagtgataatgaaatataaatagagaatctcacaattcnagctacttaatctctaaataaatactgcagcaatattgtagaaggatcgggttaataatattctctgatttattattttcacgaccatccttgtgaaattctcaaaatttcagctaattatcttctaaatataaactctaacagcgttgcggaaatattgagttaatagctccaataatctccgacttattattttcacgaccatctttgtgaaattttcacattttcagctcattttcctccaaattatctgtataaatttgctcaagtaaattgtaaatcggaaattattagcgtttatcaactccatacttccgcaacacttatacagtttattttgaggggttaatgagctgaaattgtaagaattatacaagctggacaaaccaaaataataaatggaaaattattggcgcttatcgactcgatccttctgcgacgcctatacaatttatatttccatgataatgagctgaaattttgagaatttcaaagtgataatgaaatataaatagagaatctcacaatttcagctacttaatctctaaataaatactgcagcaatattgtagaaggatcgggttaataatattctctgatttattattttcacgaccatccttgtgaaattctcaaaatttcagctaattatcttctaaatataaactctaacagcgttgcggaaatattgagttgatagctccaataatctccgacttattattttcacgaccatctttgtgaaattttcacattttcagctcattttcctcaaaatgtatctgtataaatttgctcaagtaaattgtaaatcggaaattattagcgtttatcaactccatacttccgcaacacttatacagtttattttgagggggtaatgagctgaaattgtaagaattatacaagctggccaaaccaaaataataaatggaaaattattggcgcttatcgactcgatccttctgcgacgcctatacaatttatatttccatgataatgagctgaaattttgagaatttcaaagtgataatgaaatataaatagagaatctcacaatttcagctacttaatctctaaataaatactgcagcaatattgtagaaggatcgggttaataatattctctgatttattattttcacgaccatccttgtgaaattctcaaaatttcagctaattatcttctaaatataaactctaacagcgttgcggaaatattgagttgatagctccgaataatctccgactatattattttcacgaccatctttgtgaaattttgacattttcagctcattttcctccaaattatctgtataa

SEQ ID NO: 23138 - DNA, 2441 bp, Heterodera glycines
accaaattggggcaatttcaaattaataatttaattaggctttctatcaaacatgtgagctttgtacaatttccccatgatattgcgtaaagatagtttcacatttaatagttaccaaataattaaggagttttttttaatatttttcaattacttaaagtaagaaaatttaaaataataatgctattcgaattattactttctaataattttctataaaatattttttgacttttttatgccaattttgccattaaattcttaaatatgcaatttttaaaaccgaatttaattttagagtctatagacgttgcctggataatttgaaaactcagaccgaaatcataaatgtccagtaatctgagaaacaaaaacccaagatcgggaagcaaaaaaaaaagcgggatgcccgaattgggaatccgagccatggagcataggcttaaagaatggcgcagactcctaacaaaacgtattgcccaactcccaccccgttagataaaggtgttgcgtgtcagggtaattactttgttaattgattatttgaatgttaattatttgcaacaaaaaatataaatcaatttacagtaatgtcagaaaattaaaataaattaatcaaattcaagaaagtgctttactaataaattattcataatgaaaaggccttcttcggttgtcgcttttggtagtcatttatttgtcggctttatcctgttgtcgcttttcattggcactttgggcactgagaaaaaagaggtgaaaattaaaatgtaattaataaaaacttgaaaaaatcgaatacaaaacaaatatgaaaatgcgaagcaaattctgtgaaaaatattccattttctgattatatttcattttttaatttaatctttaaatttacttttaatagtaaattttctttgcacaattcagacgaaacctgccgctgctcattctcccgccgatgtaagaaaagcattaattattttaagttaattacataatttcatttgcattttcaggccaaacatccgccgccagtcgccgcccacgcggccgctggcgccggccacgcctccgatgtaataaaataaagcataaatatcaggggacattatgtattgtttgttcagccgaaacacgcttctccttctcccgctggggctgctgctgctgcttcccacgctcatccgcccaatggcggcgccgcccacgcggccgaagtgagtcgaaatttttagagaaattagtacaaattaatttgaaaaattaaaaggcaatttaagcagctcattagcttgttgatttttgtgctttttcagccaaaacatgctgcggctcccgctatcaaaataactgatgtaagttgggaaaaagcacttcccaattttaattaattttaaattgttttaattaattttaaattgtttaattaatatataaattattttgattaatccttaaattatatttctgattcacaggaggccaacaatgtttactcggtgtgtgtggagagagacgttctgccggcgccggaaaatgcgtcaaaggacaaattgaaggcaatcgctgcgaaatgcgacgaatgcggggcggcaaaatgcaaagcgaaatgcgggggcaaagaagtgaacgacgcatgccgaacatgcattatgcaaaactgtccaccggcaaaataaaaaatagcagaaatgaggagggaaagaaaggcaaaaacggcacggaaggaggacaaaatgatggcacgacgagaaggaatggatgaatgaatgcacataaatgaacaacatttcacccactttttgtgatttgaattggccaacagatcaccacttccaactgatcattctgatcattcatgccaaaaaaacaatagtccataaataaattatacagaaaagtcattaggccgctattttgggtagaaaattgtccatgcataagttggcacactttctgatcggatagtgaattagttcaggagattaaaatgggaatgttcaaaatcacattttgtgtgtttgagatttgcctgtaagatgcttaaccgcctcccaattggagggcatatttatttttacgaataaaaagaaattaaaatcaaacaaatacaaaatttaaaaaaataattcttttaggtacaaaataatatatgaatggttgggttggatatgtacgatttcagaggtattaaattatataaagtatgataaaataaaaaaggaaaataaatgagagaataaatgatcgaatgacggctatcctttgaaggttttatcttaatataaaagattattttgcctttaaattgcctcccgtaatttggggttcttcgttgtttaatttcccgaaattattttttatttaattttgtaaaagaggataaaacggaaccgtagaaaaatgggtaattttggataatttaattaaattattttcatgag

SEQ ID NO: 23139 - DNA, 1287 bp, Heterodera glycines
gtcgataggcaccaggtatggcacggaaagacttccgttttccgacatttttggggtaggaattccgacttccgaaatttttgatgaaaagtcggaaattttttaaatttttcttttcaaaaaactagcaagttttgtacaatttctgttaataaattgaactgaaatttttaaaatttcccggcggcgcctatcggcaccgccgtaccctcctccaagttcccaaaaagtttttgaaaaaatcgcgctgtataaaacgtgtaaaaatagtcactccttttcccaaaaatgttctaaaataatgaaaaatgacaaaaaaaaatttgataaaatattgaataattttttcaagcgtatactaaaaacatttgtgaaataccttttatttggttaagaattaaaaaatttagcctattaaaatatttagaaattttttattatattgtatattttttgaaaaatttccgatttccgacgtttttggggtcggaattccgatttccgacttccgaaaatttttggggcctcggaatgccatccctgatagggaccgccggaccctctgttcctagttttttgaaaaattgcaccgcaaaaaagtgggtttgaaaagaaaaaaatagtcaatttatgaaccgttaataatttgatttccgatcaactttttaccgtcggatccaatcgaaaaatcttagtcgacccatcaaccccttttaatgcatcccgccagcccttaaaaatttatttttcagcattttttgatttttggaaattttttgaatttaattgaaattttttcgaattttccaaaatcccgcaatcccgcgcgggatcccgcaaattttaaatgcgggatttgcgggattaatcccgcgggatcccgtcccgcaaagaattttcagtaccaatcccgcagcgggatccgcaaatttgaaatttccgggctctagttccagtcatggaaaccctatgattttttgtttttcagacagtttttttcggcgcgattttgtcactattttacaaaaaaatataaaatttatggcaaaatttggtctttttttggacaaaaatctgttaacaaatcgtattaaatcaccatttttttcccgggcggcacctatcggcgtcgccaggtcccctgtcctcaaaaatttttggaagaaagaccccgcaaaaaagggtttttaaaagcgaaaaaaaagtcgtcgcttgctttttaattgcaaaatgggatttttttggggaaatctgttaacaaatcagaacgaaattacaaaaaaattt

SEQ ID NO: 23140 - DNA, 1454 bp, Heterodera glycines
ctatctctttttttgataaattttatacacatacacatgttctcgagcatgatagggagggcggtgcgcaatagaccttttatttttgagggaatttttaaatttatactctatcccagaaaaatggctatctctttttttgataaattttatacacatacaaatgctctcgagcatgatagggagggcggtgcgcaatagaccttttatttttgagggaatttttaaatttatactctatcccagaaaaatggctatctctttttttgataaattttatacacatacaaatgctctcgagcatgatagggagggcggtgcgcaatttaccttttatttttgagggaatttttaaatttatactctatcccagaaaaatggctatctctttttttgataaattttatacacatacaaatgctctcgcgcatgatagggagggcggtgcgcaatagaccttttatttttgagggaatttttaaatttatactctatcccagaaaaaatggctatctctttttttgataaattttatacacatacaaatgctctcgagcatgatagggagggcggtgcgcaatagaccttttatttttgagggaatttttaaatttatactctatcccagaaaaatgtctatctctttttttgagaaattttatacctcacaaaagcgcttgcgtatgagacggagggctgtgcacaatcgccattttatttcacagaggatttttatatttagaggttatcccagaaaaatggctatctctttttttgataaattttatacacatacaaatgctctcgagcatgatagggagggcggtgcgcaatagaccttttatttttgagggaatttttatatttatactctatcccagaaaaatgtctatctctttttttgagaaattttatacacatacaaatgctctcgagcatgatagggagggcggtgcgcaatagaccttttatttttgagggaatttttaaatttatactctatcccagaaaaatgtctatctctttttttgagaaattttatacctcacaaaagcgcttgcgtatgagacggagggctgtgcacaatcgccattttatttcacagaggatttttatatttagaggttatcccagaaaaatggctatctctttttttgataaattttatacacatacaaatgctctcgagcatgatagggagggcggtgcgcaatagaccttttatttttgagggaatttttaaatttatactctatcccagaaaaatggctatctctttttttgagaaattttatacctcacaaaagcgcttgcgtatgagacggagggctgtgcacaatcgccattttatttcacagaggatttttatatttagaggttatcccagaaaaatggctatctctttttttgataaattttatacacatacaaatgctctcgagcatgatagggag

SEQ ID NO: 23141 - DNA, 992 bp, Heterodera glycines
gggcccccccaacggccccttgaaaaaattgatttttttttttttggggccagtccccccgacccgatgcccccagatttagggggagaccgaatctttcgggaatagcttccctataccctgtcctttaattcggcgttggatttttcctccccataatttttggagtcccccaaacggccccttgaaaaaattgattttttttgttttcggggcagtccccccgaaccgatgcgcccagatttatggggagaccgaatccttcgggaatagcttccctatagcctgtactttaattctgcgttggatttttgctccccataattgtttgagtaccccaaacggacccttgaaaaaatcgatttttttgttttcggggcagtccccccgaaccgatgcgcccagatttatggggagaccgaatccttcgggaatagcttccctatagcctgtactttaattctgcgttggatttttgctccccataattgtttgagtaccccaaacggacacttgaaaaaatcgatttttttgttttcggggcagtccccccgaaccgatgcgcccagatttatggggagaccgaatccttcgggaatagcttccctatagcctgtactttaattctgcgttggatttttgctccccataattgtttgagtaccccaaacggacacttgaaaaaatcgatttttttgttttcggggcagtccccccgaaccgatgcgcccagatttatggggagaccgaatccttcgggagtagcttccctatagcctgtactttaattctgcgttggatttttgctccccataattgtttgagtaccccaaacggacacttgaaaaaatcgatttttttgttttcggggcagtccccccgaaccgatgcgcccagatttatggggagaacgaatccttcgggagtagcttccctatagcctgtactttaatggtgcgttggatttttgctcccccataaatgtttgagta

SEQ ID NO: 23142 - DNA, 1474 bp, Heterodera glycines
ggtctctccagcgttggaaaatttaaagagtaatgtacgtgtagtaatttaacaaagtgaaaaacgttccaccgattccaaaacaggaaacgaacggaaacggtgcgctactcgctcagcaaagtcaaattcttcggcccagttttttcacgaataagaaaattaggcaaaacatcaaatctcgcgcatccttcaatacgaaagagagtagatgggacaggacaggacagcctcttccaccacataactcctagccaatatttcggtaggggtggacagatctctttctaagtaggaattttcgttcttttctcgtattaataaacaaaaaacataatcaatagtagggattattccagttataactaattaaatacctaatttcgaaagatttttaaaatcgaaaaaaattttcccaagagaaaaacaaattagggtgaatttgaagaatgggtaatagtactgatggtatcacaccttttttgaaatttttttaaagaatttcaaaagtcataaaaatatttattataaggttttcggggtcgctgagctcgaatatggcatccatttcacccaattccgaacccctgatccgaattcgaacaaaaatcgaaaactcaaatttttcgaaattcacatttatccaacaaaatcgctccaaacgcaaggagattcataaaaagcagaaacagcctttgttttaacgtttcagttctttttttaaacttattatatggctgctgtgctagaagaacttcggaactttacggcccaaaaattgcacgcgaaattggcactagaagacaatgagtttgaccaatggcttgaaaacatggggcttctacacgcacgtcaaaatgttttttataatttttggctgcatgtctctgagttttatccatgcgaacattgaatttttttttgtttttttttcttttttcgtgcgtttggagcgattttgttggataaatgtgaatttcgaaaaatttgagttttcgatttttgttcgaattcggatcaggggttcggaattgggtgaaatggatgccatattcgtgctcagcgacccagaaaaccttctaaataaatatttttgacttttgaaattttttaaaaaaatttcaaaaaaggtgtgataccatcggtactattaccgagaactcttagggctatcgaataccaagaatgtctaatttagttagcttcgagcaaagttatggccagttttttgttgaatcttttcatttgatggtttttttataacaccctttttgatggcttttttataacggctcagcaccatctgttcttatttttaagaaatattttgattttggggtaatgcccaaattttgtttttgaaattttatggcataatgtcactcttttaatcaaggaaatataaggtttgcgcaaaatttggtcatttttgggcaaaaaactgttagcaaatcacattaaaaattacaatatt

SEQ ID NO: 23143 - DNA, 953 bp, Heterodera glycines
tatttaattaattaaaaatataaattttattaaatattttcaataatattgtttcagatgtgcgggttaaggatccgttcccaacaaaaattacacttaattaaattacacccctccaccgggtcacattgcactaatgaggaaactcgctcccccgccaaagaataggtaacatggcattcataaccgctagccagcaaatcgggtgggagtgggagtaaataaggggtcgagtgtcctctgctgctgcatacaccctcacaacagacaagtacattttcagcctgggggttcaaaaacacccaaaccccttcttcgtcacacgaaaggacacgtgccgcggaatgtactccgcttgcccaaaaaacaccaaagccaaaatagtcatgagcagggggcccacttaaaactggatgatttcccttttctcccgtcgggggcctgcccaattggtggcggagggcggtcagcccatttgaattgccccggggccgttttcctcccctttttggcccttaaatccgttactctttcgcctatcccttctttgtcggtgatcgtgggcgggggtgggacttcattccattctgcggtgcattctaacggtaccaattgattaatcggccgttcccattctctccccgttcccagtaatattttagcgctccgtggcttccccgcgggaaacagagcgaggattcgccccaagagccagtgattcctcgggaattcctcctgttccacaagtacaacatccccaattttgggagggccaggagcggagatccttgggccggaatgggtgtcctgggtgcggcccctcaaaattagaagctactcccggctccaaaccttccaaaaacgccggagggactcattagtggcgtaccataaatgggccaatttctcagaggaagaaggctggaatgatagttccggttcgtccggctcaa

SEQ ID NO: 23144 - DNA, 2783 bp, Heterodera glycines
gcaccgaacaaacgaaaaaaacggaaaaatatttcggaacttccttgtgaccaaaagtaaaaccaaattaataataatattttaatagtaattaccattttacagatgctgaaccacttggaaacgaacttcaagaagcgctttcttctgccgcatttttggacgattttatgccatttgttttggcatttgaatttgtcgcaaaattttgcggagaaaacggcggcaccaccaaattgtgcaaagagaaagttcaattttcatatttaaaattcataatgtataaataatttcatttttagtgcctttcccaatcattggtcgccccaaaaacaaaggcaccgtttgttggcccaaccaaattccatggcacaacgccacgctctgtgccaaaaaccacttttggcattgtgccaacaactgaacaaacttttgcctttaagccatttgtgcggcatgtggaccattttggcacgaattgtaccaacattttcttcacgtcggaagtggacaaattcttgttgaatatcaccgcgacgccatacgaaattgcatgcaatgactatgaaaaacgtgccaaaattgacgagccaataccgtccgattattggtcaggcggacgctttgtgaatgcttgcatggcggtgccaagtgcaaaatgcgaaaagtgatttttggaatttattttttttaaattttaaatttgaaggcacgtcgaactttacgcatgctatgaaagcattggcaataagccaagtgtcaatgccattggcgaattgtgccaaaaacatctgaacaatgccataaatgccgctggttttgctgttcaaatttgtgcacatcggcaccaaacggaggcgacgaatgagctcattgttgaatcgttcatcaacttttcgttcactaatgagccgtttgttaattaaataataattatttttttattaattttattaatttaggttccaaaagacgcgcattttgccaatttcaatggacaaaatttgggacacaaaaaagaaaacgccatatttcctcatcgaatttggccaagacgagcaaaaaagtgcaatccgagaaaagggcgacggagaaaattttggcggcgccaaatggcttaatgaggcaaaaagcaatgttattaatttttaattgttgtaatttagaatgatggcatcggctccattctcaaagacattgcgccacaaatagtcgacggcactttggcaaaaatgattcattttgtgccgccgtcgaacgatgacaaaatgctcccatttttccaaattgaaaggcccaaatattcaaaattcataaccaacgacacggatttgttaccttacaaaaatgacccgaacaatacaagtcaggaataaaattaaaaatattttcgttttggcatatttttagggagagcaacaccatgtgatatatacggcgcagattgtgtgccgatcagaaatttgttattgaaaattgaggcattggaaaactgtggaaagaacgaaagcgaaaacgatgcggtaaaataaaaataaaaattttaaaaaatatttaaaaatatttttagatttttaaaatgccaccatgggccccaccacttccgccaccggtgaccatgaaaaagccatccgaaacattgttatgtggaggggatatgttttgcgacaaacgaaggcttcaacaacagtacaacagattgagggagagtgagtcattttaacaaatatgaattaattaattaaaatacctaattaaaaattcaaattcacagtttgtgggcttaagcccgaagaaatggagaaccagcgcgaaaaacgacaatacgacccataccaaaaatggaccgaatccccgatcaaaatcgcattcaacaaaacagctcgtaataatcttgccacatcatacagtatttgaacaaatgttttaagtgcctgaaaattatgacctctggggcaatgccatcagagctggagcaaaattaattatgtatgaaatgatgggttgaattttttgtattctgagaatgatctttttaagtttggttgctttcggagcgtttgtcggggtttcagccgagttttttatacaaaaaaatgggggggggtggaatggaaagccgggagttatgaggaccagtgatgccgcgggttgagaaaaatttcgggtttcgggtcgggcactcgaaaaatttcgagttcgggtttcgggttgagaaaaacttcgggtctcgggtttcgggttcgggttggcatcactgatgaggacgcaaacccgaaggctcaattaagcaaaagcgacaaaaagtgccagaataaagtggacagacagtgaatgctgcgaatttttaaaattttcattttccaaaaaagcaaaaaatgcatatttttaaaattcatctctctttctataaacagggaagtcacctgtgttcggtttgaaattgttgatgaaatggtgaagggacagaatggcattgcgattgcagatgatgagcttggcggtattatcgtattattcatatatttttcacttgtcccaattttcattcataaaatttggcacattttattttttcaaatttttattaattttacccttttttgtagcctgcggcgtgtccccagtgggccgtggcggaggatggcaattccttcccctggcaatgactaaccgaacgtgcacggatgtaattttggcagcatttaaaaaatttgcattccctttttggcctcggttctcccttttggccaaggtttttttttccatttccctcccatcgg

SEQ ID NO: 23145 - DNA, 1961 bp, Heterodera glycines
  unsure (1)..(1961): unsure at all n locations
tttgttgttttccaaaggttgccttcctcgancgattatgccacttttgttttatttatctgctcttgatctgatccttatttatctttttgatctgatatattctgtttgatcttgattgtaacaatttacgaaatgaaatctgtccatttttatgttgacatttttgggggaaagagaggttcggtgccagggaagaatgaaagtgagatgggtaataatactgccgatgatcaccccaaaaagttcgaaaattttcaaaattcattttgtgttcgacctgtactagagaccggacaactggggtcggagggatcccgactgaatcccgatcaatcccaaagatttttttcgggatcccgtaaagtgcatcggttggaatcaatcgattttaagaattttttttcagggggttttgcctaccccgcaccgacctcggcttattgttcattttctgggttttctccgaccccgacctcaacttcccgcccaagccgacctggtcccggccattttgaccgggactaattttttttttattattcttgacaaacgagttaaattattttggcaaatttatttttagaacaaaactgcgcactcaaaatttaaaaaaaatcatttttttaactttttttatttaaaaaaaagaaatttaaaccaattataatatagcgaataatgaaaaggtcaacaattgtttggttaagttggcgcaagaaaaggcagcacattttaaacttttatctcaacaaaattttgcatcaattaacaaattccaatggatttaagatatttttaaacttcgaattccgtcgtaaaaaatcaatcaaatcgaattttttatgggaatttctcgtttaactgagacgttcgatcatttcgctggtccaatccttgcaatttctgtagatcaaatcgtagttcttccacatgccatcaaacacgcgctgaatgccatcaaattccgtggtgccaatgccaaagatgggctcgtccccgtaagttttcatgtaacggccccatcggtcactcgttacgtcttcacacacaatttcgtaagttctgtaggcaatttgaccacaaaggccgcattcgaagtgcacttccaaagcggtgtgagtaatgtctgaagaaacaatgaatgaacagcaacaatggataaaacaaatccattttaaggaaaaaatgttaatgcgatttttaaatgagatttcgactcaaaataattttggaataaaattataaatgcggcaaaatttataaattattttttggttattaagtagggctaacatttccaagcatgaaagcagaatccaagtaggtatgtacttagaatccaagtgcagaaaaaattgatggaatggaggaatggggagttcggggatgagaccagcagagggctgcacgtaattacggaaatatgagacaccattcggggacgggaactttccccgaaaaagtgccaaaatgccagtcgagggagcaaacctcacacatttcaaaatttcaatacattcgttacattaccttgtcccactgactgcagttgtggcctagcaactagctcatttaccacgggaacaaacagaagcggagcagagagcagcccaagcgtaactcggccggcatttgcccatcttttggtagttcggttcataaagtcacattcaacctttaacaaaattgaaaaattcaacttttcggttattaaatttgttttttaaatttaaattactcggtagaattttttggcacgcaaatacgaacaatggcaggcacatggcttctcctcattttgccaatttccgtggatgtccgggtcataaccaccttgcttgtccttgcccattgccaaaaatatcaaaacaaattctaaaagggagggggcaaggcataagcttcattagcaaacgaatcagtgaaatttttggtatttggtttaaatttgaaataac

SEQ ID NO: 23146 - DNA, 2060 bp, Heterodera glycines
  unsure (1)..(2060): unsure at all n locations
tttaattaaattaaaaaataaatttgtttattagttactccacgagcagactcggccctgtgtgccaattgtgccgtcagtgcgatcaatgcgacagtaatctggtgatatgtcctaaaattttaagaaaatttgagatggatatttctcatgtgtgatggcgctgagaaattcagttaaaaacatttggaatgagtgcaaattcttgccaaaaaaaaaaacattatttcggtttcaacacagagaacggacaaaagacctacaatttttaatgatcaaattttaaaaattaatctcacctaattatttgcttatcgtaataatttaatgaaggtgtttttgttgaatattttaataaagaaattcatttcaaatattaaaaattaaaggaaaacatatataaaaattgtaggttttttatccgtgggtcttttgtcggtggtgtggtcaattgtcttgtctgcggctcttatgtcactacgccattctctcaagaagctgatgcaaataatttaagtccctttaatcctcgctatggtttatgaatttcggaaggagctcatcccactcgcgcttcatttacgctccagaaattgtttttcaaactgagacattaaacatttttaaaatcttctttcaaaattccttgttcttatttaaaattttcaaattaaaaatttattaaattcaaattaaactgatgccccccccaaaaaaaaaagttttccatctgaccaggaaaactaagtcagtcagtgctctgtttttcctccgttgttgttgctgctgccttcggcctctgctgtcctccactcgcattggctcatcaaattgcatatttccgcggctgttgatctgaatacgccgtgcctgcttgtactttgtctgaaggatgttgccaatttgacggattggaggctaaatgcattttttaaagataatgaatgtattaaattgaataaaattctgtcttaaatttgggtgctcggtcgaacttgaaaaagtgtcaatgataaataatatttaaatttaattttgatttggaatcataattttattttataatatttaaatttaattattgttcaattataattttaacaatcgattataactttaacaataattgtaatatttaaattattattatctgaatacaccgaaatttgtaatttcggtgtctaaagaaatcaaaattccaagccgaaaatgtttccagatcattaggtattattatgatgagaatgaagatattttagctgggttttgtaactcttttcaacattttcagaattagtttaaattttggcatgaaatttctttggcataaaggctgattttatgttaaattcaatctctattgatcaatgattgatcgcttttaggatcaactcgggatataaattaattaaaactggcatgcccaattatttacacaccaattgcatccaacatgtctttaaattgcatgagccgctgaaaaaagcatgcatttatgatggcattcaaatttttttgttgttgacctcactccatggcatttgcactttggctttgcatgtcgctttactatctgaaagttaaaaaaatatatttcgattttttatttacataaatatttttcgcatttttcgagaacttcatcacaaaaatgctaaaaatcaaaaatcacatcccgactaagaatggaaagatttttaaaaattttctactaaatttatttttttcttgaccaaaatttttgatttatgaatttttaaaatctggaaaatgtgaattatttacaactttaaccaagtgcataaattctttgaaattttttcatcattctcattgcattattaccttcctgccaacttcgttgttccatcggttcatcaacgatcgtccatgccattccgcggatcgcttattgctctcctccttttcacgtacatcaaatgaatcgcttanattgctcttcattaattnnnattgtcattgtattgtctcttgagccccgaatcgaganttcngtattgagtnagaatttagaaaaaaaaactcaaaaatcaggaaaa

SEQ ID NO: 23147 - DNA, 1484 bp, Heterodera glycines
ttttggggtcaccgaccacgaatcttcaattatttgaccaattccgatttcctaatctaaatttgaacaaaaaatataatttgaaaaattcaaaatttcgatttttatttgagttcgtgttaaggattagaaattagtcaaaatacatgtcagattcatgattagcgacctctaaaatcccggataatattctttcctgctctctcattcaaatttccctcattttaatgaacttgttgaatgatttccacaaaaagaggtataagcaaaacaaaaaaattggaaattcaataatttttataaaaatttctatgaaataatttgcgatttaattttttatagaaaaaacttactaaataaaataatattggagccttttttctcgcttttacaaaaaagaacattttttgtttaaatttaaaaaagaagtagatgaccacatttttaaacaaattgacttcttctgcttttgctgctgaccgtgttgagaaatcctcaaaatggcaaattgcgccggcgccgaaaagctttacctgtaaattttttttattcctataaatggctttttgcttaaaaattccataaaattacttgactgagaattttaaaaacgaaccttaatcttcattttcattaaaagcgatgacgaagtgagcaatgttcgttagtcaaaaaaccatcaaatcagacatttgacattttcatgtcttttagcgattactttttaaaatcaattaagtaataaatttatgtcgccaaagcgacacaaatttctttgaaatttcttttatttttgatccttttcgtcgatcaattttctcccttcgctcgctcctttaattatgactcatcttttcttttctccatattttcgctatgagtcatcatttttgagggaattttttccctttgcttgtgcacatttcttcacgtgcctggccccgcccccatcgattgtgagggtataaaagcccggcccattctccattttcttgactctgatcaatttttgattaagtcagccggacagttttctgtccaagcatttgcattaaattgtaattgtgaatatttgaataaagattaagaaagagtcttagtcttttctctatctgtaaaagggacgctcaggagccctttcatacagatcattaagccattgacccccgttgggtcaaagaaaaggcttacaaaaggaaaggagaagcattttcctcctttcaaattgtcccttcagtaaaggagaggaatttcctcctttaatttgtccctttggacattcagtgaatttctgtcttttggacagaaattcgctttgcttaaaagactccccccttctgccgggagagtctgcttccccttctgccgggaagtgcaaatttttgtggccttttgcccacaatttaatattttttaacaaacttttcataataataatatttattaattagaaaattcatttgattaatgtaaaacccatacat

SEQ ID NO: 23148 - DNA, 1616 bp, Heterodera glycines
  unsure (1)..(1616): unsure at all n locations
ttttattgtttggcctaagaacaattatatgcactttttcagaagatcttataaatttaaatttttttgcaagttcggcttattaaaaaaagagaaaattttcccgttcaatcagttcattccgagttggacttgacttaaaaataattttaaaaatttttattaaccgttaccgatcagttaccataaaaagtttgaaaacgggttacggtaaccgggcgttttaacttatttctgtctttgatttgacaaccgaatttagtgatcccaattgttgtggcccattttttgttgtggtgttggtttgtgcgcacaattcaaatcctgtcaaatttgctgatgttgatgttgctgctaatgatgccatttgctgtttcatttgttgtacaaatgccaatatttgttggccactgaattttgttgcgctaacgccccgcggattcattccgaccgttaagcatttgttcagccggcacagtttacatgttttatcttgtttatataaaaattaaacatttattccaattttaatcctatctaatataccatttaactttaaaatattacattgttcaatatcacattctcctccattatcgcaattatattccttcatcttcgaaattgaacgtcgaaaaaaatgtttgcaacctgaatttgtaaatcccttactatatattttcgcttcctttttccaaatttgtctccaattgtatcttcgaatggtttttgatgctttttctcgtcaatttattcactatttttgtgcagtttttgttttgttttttgctcattaattcattcattttttgctctctttaaattaatttttttattttttataatatgtaattcatttccccatttttacctcgcttccttttctttcaaaatggcattttgcagttgttcccaagtgtccaattgttggtttttcagcttttctgcatcagttggagacaattatccttgtaaagatttactagttgaaagaataacttattcattatctaaaaagaattaaaaattcactttaaatttgctaatttaaattgaacaaagatttttgtggtaagaattttttcgttttcgaaagtggtaatgaaattgtaaaatgagagggcaaatgcttacaaattctattattaaaaagaagccaactttcgaggcgttcgggggtaaaattagttttttttgtcccaatcagttttcattctgctcaattcgtggcagcatcgtcatgcttttccgtgcaaagaaccgattgcacatccaaaataacaatttccggacggtcagcaccgttcactgaaatgccggcagaagcgaatgatttgcccgggtaaaggtgcacattgttgggcaatgtgaacaactgttgctgatcagcagtgccattgtcagtggcaagcggaacgatgccccaatgatttgccaattttgactgaaaaaaatatatattatatnatattagttgtgaactcctagggacaccgcaaagtacaataaaacaaataattanaatatactcagaatttttataatttattttttattttaattgactttgactcaaattaataaaattaaaaatgaaaatgtcacccgtttcggca

SEQ ID NO: 23149 - DNA, 1054 bp, Heterodera glycines
  unsure (1)..(1054): unsure at all n locations
gatcagctcgtaaaatgnaatattacatactcgtatagaaaattctgaattttcatatatgctctattttattacaaatttccttctgtctttattggatttttaccggcaaaactgatcataaaaatttaagtttccggtgggtgaatgcttcatttctttcatttggtggcaaatcgctgttgggacttccactgggcttgtacttatttcttcgattttccctccaaagaaaccgattcttcttgaaatgcttgttcacacatttacaagccgtagcctcagttttgtactgtattgtattttgcctaaaaatggcaaaatttgcgggaatcggttccactgttggggtccaagttgggcaaaaggggtcagaaggaatagaccagagacttgagggagcatccgataggcaaatcattgggctaactgcagtattagcagctatatttggggcaaagagagacagaattgcaataaatgccattaaaattgggctggcaattcttgccgctgcaaatcttccaccaaagctcactcttctcccgggggatcccgaattattaccgtatcccctagggagcgtattcggagttggtgaccggcggaattctcgttcatttctttgttcccttccgttcacaaaacgagaattttctccaccatttgaccctctgttccaatgtctctcattcccataatattcgttatttctttgtggcccgcggctattttgcctttcatctcttttctttgttttgcagtccctcaccaaatgcccagggcgacggcaataatagcatcttcgtctgtcgggccctcctttgacattttctctttgatattgcccaaggctcaatgcctcaacttttgaggataattctgcaacagagtcggctacagaaatttgatttgttctccgggatgccaaaagcagttcaaaatgttgtgcgagttcgtaggcacccgaataaactgtttggtcttcccgcctttacctcaaaattggagctcgggaatgagtctttccatgaactcctccataagctttttc

SEQ ID NO: 23150 - DNA, 985 bp, Heterodera glycines
  unsure (1)..(985): unsure at all n locations
aaaatttcttttttttttgttttaaaacactttttttgaagacacttagtcctttttcagcacaacagctcggctggaaaacacacttgaccagctcctttaaatttggtgattggcacaaacagcccggctggtagtacacaacaaagaccagctcaaatttgatggatttggtttgggcacaaagccttnaccacagctgaactgcttcagctagtcttgcttagccttttgaccttctcccgggtcgtggcaccaaaaattgttgtgtatttgactaagcttagactccgatgtgccttatttaattccaactttcaccaaatattaacttttccaaatgcccacaaaagggggaatcaggatgagaatgggaaaagaatggttaaaagcgagaggcaattggggagcttaaatactgacataatgggaggggccaagcgagtgacattacaaaatggttggccaaagagaaatgggaaaatgggtcaaattgagtgatggatttgtggatgaatggcaaaggaaatgttttgggcaaaaatgagaaaagggaaaatgtccgaaaaatccaaaatgaaaactgaactgaatcgaaacccaacaattttataatctataaaaataaaaaaaaacatcatgaagctagtttttaaacagattttactttattagatataaattttttaattacttttccgtacaaataaatatttatagatttttttgtatgtttttaattattgtattcacagcatttgatttatttaataattacttctgatcattttttattacaattacatcaaaatctattattctttttagccttactatattttttcgcaaatttatttattttttattaattattatatcatttaactcttgtgtttggaccgatgaagtattaattcttgatttcaaacgaattatagcacaataattatctttaataccttattgtggcaattaggtaaataaa

SEQ ID NO: 23151 - DNA, 1499 bp, Heterodera glycines
  unsure (1)..(1499): unsure at all n locations
tttcagcagttttgccagtaaaaattntagcgtaagttaaaaagggttaaaaacttacagtacctccagtaacagtaatgtaaaaaaggaaaaatacaaaaattaatcaataaacgtttgatcgttaagcagctatttaattttgtgatcttttctaagcttaattaaaaaaaaatttgtatgtaattgggtattaaaatcgatacaactgagtttttcatacgattggttttgtgcttgatacctaggaaataggcactaataactcgaaaattactctaagaaccgccaaaaaaacattttcaaaaatttcagctacataataacaaaagctgtaacatcgttgaaaagctgaacattaggaacacgaagcagttcaacattgacattcgcgtcgaggagggcaatgggctgttcactgtgacatttgacacgggcggaaaagcgacaaaatgccaatacagaagcccagatatgccaacatgggcagtccaatacataacagtgagaactgaattagcccaactaatttgaaagaaatggaaaaaacatttataaaggaatgaatttcaaaaagtcagaataaaaatgggggattaatcgcaatttaaagctatcgcaattttatccaaagtgctaagtgaatttttacactttctcctaaagattgagtttaaaaatgaccgtccgcgggcactttcgcttcagccggaaatcacatgcgaaccgcccgatcgttgcataggagtgaatgaattgatgaagaaagaaattcatgattagcttttctatgttaaattttgtaaaaaatttaaattatatttcccacaaaataattttcttttgataaacaaaaatttttcgaaaaataaaatcatttttttcataccttttcgaaatcgatggttctaatttttattagccatgacataaaaagtgtaatattgtggattttggctaaaattaaaattaaaataattatgaaagtctaaaagaagacaaataaaaacccaatgatttgataatttccgtaagaaggttcagaaaggttatgaaagaatcttaaaattgctctgaaaattaaacaaatgatcaatttgaatcatatccatttaattcttctgattgatcatgcccattcgtcctaaataaaactaaataccgtaaacagtaacttcataaattgaattcctcaaactctcaaaacattctgctaattttgtatcattttgcctaataattagggcaccaatttctagtgaaaaaacttcttttttttgctcaattgatttgaagaaaggagctcaaaaaacgcatttttgcgttaaaattttttcatttggacgttatttttcgtcactggaaatcactattttggagttttgtcacttaaaatagtgaaaattcacttttttggctttttgtcactatttttcactatttcgacatttttagtaaaatttataacaaaaatgccaaaacccaaaaaatacacccct

SEQ ID NO: 23152 - DNA, 1747 bp, Heterodera glycines
agctattaagcatgcttttagcacaaatttaaattgagcttctttctggagtcgaactcaaaaatttcgaaaaattttttccctgaagcattaggggtggtacgcagggattctgaggggttgttaagtatttctaacaatttttttgtgatagaaaggcttaaaataatgtgttaataagccctacgtgcattgcgacaataaaaatatatgttggaccaaaccactactatgcatttttggcagaaccccggattctgggggtgaaaatttttttggattttttaacaaatttttcctgatagaaatgcttaaaataaggtgttatcacgccctacgtgcgttccggcattataagttcatccctgaccaaactactgtgttccgaaaaaaaatgacatcaaaagctgaacaaattttacaactttttaaacaactttacaactcctgcacaacttttgcatcaaatccctaacaactttggtacaaatttaaaaaactattcagagcaatgataatttaattgagtaattttctatattctttttcgatagaaagtcttaaaataatgagttatgacgccctacgttcgtcgcaacaatataaatatatgttgtaccaaactactacgttgcacctttggccgagtcgcggaattgtggtgacggataaatttttgttttttaagaaaaaacttgcaacatattacgattaaataattaaattattttgattgatggaattttttacatgctagctaagcatttcattttaacgtctggatagcttttgaattctctctgtctttagaggtccctgcgtgcctgcacttatgccccagcatcttgcatgttagaggtccctgcgtgcctgtacacttccattggcgtctcttttcagcgtgttccctcctaagcagatagcacactattcagtataaaagcacactgctttgttcattgtgtcagtacgctgggtccaaatataaaaatattacctctcactttggttcacattacagtgtacagctaattattttttttatttatttttacttttacttaagtctattaatcaatttttatttcaagctagcgctatatttattttgctattattttaataaaatgccttcaaaggagcagcgacgtaaagaagcaatgcgtttgcgctcgcgtgccattcgacacacgcctgatgtgggcaatgctttagtgggtccgagcacaattggccaacaacctcttgatctcgaccagggttctggctgcttttcatatgagaatttaaatctatttgtagaaccttcaacgtcgactggaattcgtgcccaaatcagacaacaacgaaatgatagacaagctattgtgggtacgccggcaatgcaactggacaccagtgttgtttcgactccgaccaccgaaggaatacggactttgactattgttggaggtcttgatttaagctaaattaaaactaaagctatatatataaacaactgccaggctcttcaaataaaagaacccgtcataattcaaacgtgggtacgccaaacaatgcaactcagcacacggtacagcaactagaggatgcaagcgacgttgaaagcgttgcaggttttttcagcattttacatagtcttttaaacaagaagtcatagatgctcggcgtcgcaaatcagcaccgtcttttcttgctgcgggtgcgagcaccccacgttacccaagcgctaggcgctcaaaggttt

SEQ ID NO: 23153 - DNA, 1411 bp, Heterodera glycines
  unsure (1)..(1411): unsure at all n locations
ttgttgatccagctgtgtgcaaaatgggcattgacgntgtcattgaatataaaaatatgacattggggtatgaccctaatgttccgnccgaagtcatacttttgccattacattccnntggacattggactctaattgtccatgatgttcaatgtggtactcattttgccgactcttgcctacnncaatatggcagattggatgtgcaactgacggataaaattaaaaagataatttctgacattttgccgtccacattgttgaccgggattgttgatgtccaaaatcttacggcccaacacgatggaaatagctgcgggtactttgtgtgcctgtatgctgaatcatggcttatgaacaaccgcacatttgttctaccagatttatccatcaattatgaaaaaaagcgcattttgtggcacatcaatgagctgtatggctctgataatgtgccatatcatccaagggaaggggtgccaactccttacccaattgtctacagacatgcggatgaggaggccctatccacatccaaggccactgagccaatggaaattgatgagcatgatgacataatgatcatcgaaccacagacaagtggacaggctgctaatgccattctcacccaagcccaagtggctggtgaaaaccaagccgacacgcttggtttggtttccgagtcttgcgttccgcaagagccaattgcgcaggctgacgatgcaatatttgtcagaccgaagacgcctccgaggcgatcatcgcgtataggcagacggcaatcagcttcgattagccgctctccctcacccgcaccgaaacgtcgcacatcggcaaatactctaagccaagttacagcgttcactaaacggtgtcatcttgtgcacaagggttggtgttgcgcagcatcagcagcaaagcattatccagaatattcaaattctggtaagcttggcgacaagaagtgctctcattgtggggcactacttttcccgcatgaagaaagcagcatttgctgtcggcagggaagggttgttttgccaaagcttaacccgcacccaaaagagcttgaagagctcatcgtgtgcgacaaacaacccagcgaagggaaggagtttgttcggaatatgtcgcggtacaataatttgctccaatttgcgagtgtttcggctggcaataagccaagtcctgcaggcggaccgatggcagtaattctcaacggagaattccatcgccgcataagcagcatgcaggctggcacaacccagattcctggcttcggtcagttatacattctggatccagtcgaagccatggagcagcgacgaaaaaatcccaccttcacgggagagaaaattacaaacgatgaagagtttgtgcagggtcatcagcttaatgatgagacccttgaaat

SEQ ID NO: 23154 - DNA, 2606 bp, Heterodera glycines
  unsure (1)..(2606): unsure at all n locations
aattttttttgtagaggggaaaattctgacccaaactacttattgaaaaacccaatcaaaactngggaaaaatttgaagtcaaaaaattattcgaatttctccaattttgtttccataatttccgaatgttattcggtatcataatgccaaaccaaaacgnaattcgttttaaaatattcttttctggacttgacttggtttctcaatatcgaagcttttttctccgcaatttctaaaacgcttataccaaaccctagatttttggttccgatgggtttcagaaaaaatcccttgtggtgaaaacatatttcacatttcactttgttgtgttcttgccaatgaacacacaaagaataaacaaatatttattgatcggtcggtggacaaatgcaaataataataaaaacgaatgaatgagggaagagtccaaaaaggaggggaatggtctccttataaacacaatgagaaggggggaaaaggcgtggagaacaaagtacaaatatgaaaataattaaaaaggtcaaaacgccaatttaacatttccaacacctcccttctcaagcttctaactccttcagcggccggaaggcgagaagcgaatcaccggcttcggcttacgctgcgatcgtcgaagagccattgtcggcgggtcatttgcggcttgttgatcagtccgttgatcgaccggatcagcaatttgatgcgccaaattttgagcttgtccgttgactggtggaattggctgctgatcgggaccaggattgtgtttcgaattctcttcgaaaacacaatttcgacgaagttggttcgaatgtcggtggacaattcgaccaagaactgttacatggactcggtatgtaggcgaattcctgactcgctctacaattgtaccatggagccaataagttttttggttcctgtagttcaaaaggaggactggttcggcggggaaaaacactttttctttgacaccatgccgtccatcgaattgttttgccatgttgttcgagtagtccttccttcttttgttaagctgaattttgtcaatgttctctgaattgtttttgtgctcttgcgggaggactaatgccaatttagttcggagttttcgtccgaagaataattgatcgggagaataaccatcaatggcattatttggcgtcgtcctgtaagcgagcagcacctttccagtccaatttttatcgtccgttgaacactttttcatcgctcttttgaaagtgtcgacgaatcgttcgacttggccgtttgactgcgggtgaaacggcggtgaaaaggtgtgcttgatgccgaattctttacaaaaagcggcaaattcagcagacttgaattgtgtgccattatctgacactatttcctcaggaatgccaaggcgatggattatggaacgaagtgtgaaaactgtggacttggccgtaattgaagacatttgatagacttccggccatttggaaaaggcgtccaccagaataaaataaacatatccatcttggcagggtccagcaaagtcgatgtgtacgcgttgaaatgctttgtcggtgactgtccatggggccaatggtgccttaatcggacatttctgtgcaccttggcattcatcacattgccgtacaactctctcaatttccgaatcgattcctggccaatatacatactggcgtgccaaggccttcattcgcacaattcccggatgtgcaaaatgcaatgcctttaaaattcggccacgcagttggcttggaacgataacacgacttttgtagagaaggcagcccccaatttccaaaatttcatttcttttcggatgaaatggtgcaatttcgggttccctgcacttcgttggccaaccagaaataacaaaattaacaattttctggagtgtctcatctttggttgttgattccgcaatttcttgtgccgtgactggaagatgatcggtttgcgactgtaaaatggtgttaatataacagtccgtttcgacgcaaatgttggcaatcaacacatcttcctcaggctttggataattggctattagccttgagaggacatctgcttgtccaaatgatgctgtattcgtgtatttgatgtcgaaatcataatttgccatgatcaacgcccaccgttgtaatcggctagcggaataaatcggaattccctttttggaaccgaaaatggcaagcaaaggcttgtgatcagtaaataaggtgaatttcctgccgaatagcattcggtggaatttctgtactgcaaacactagagccaatgcttctttttcaatctggctgtaattttgctgggaatttgacaaaacacatgatgcgtgttcgatcactttctcggatttgtcaggaaatacgtggccaatcgttgcgccaataccgtttttggatgcgtcagcggccacgattattggaagagccggattataatgagttaacagcagatcagaagtcatgatcttcttcgccttttncaaagccttctgttgctcttcgctccattnncantnntcgtctttcttaggagctgatcaagcggtgtgcgtatttcacgcatttctttcacgaatcgcccataataattaagcgct

SEQ ID NO: 23155 - DNA, 1348 bp, Heterodera glycines
tccccggcccgcgacttttgattaaaagggttcaactctccccgaggcataagacatctgctgctttcttttcgtttactctttttctttgtccaatactctttttttatatctcttatttctttgttttcattttcctattgtctcttcctctttttccccaagtttatttgtctgactgctgctgctttttttgcggagggaaagaaaaagacggtgccaagagagtaaagagtgtttcagccaatggcagattcgtccatttgttgtcctactgcgtggcttttgcaactatccgagtaaatgcgtaaaaggactagtaccaaaaaaaagtagttacgaaaatctcaaaatatttatgtaaaaatttgaagaaaaaggcggagagcattggtccaattaaggcccacttttaccgtaaattgtctttcacaatagtttaaaataactcaggtaaaatgccggggattgggctcagctcacggccttgcattttacgaaattttaataaattagcgccaaaaattgacttctaccaattttaaatcattaacagaatttgaacaaaaagtcaaagatcaatctactaacaccgaataccgtatttgctctttttatatgccatggtatattatttttcaaccttctcagaagggggtatataattggagactggcagactaatggagactgggagattatttttcggttgatttatttagtggaaaattttttgaatatgttgaacatgtcgccaaaaaatgtcatctcgtcaaaaaaaaaaattttttctattgaattttttgttaaagaacttctgaaaatgaccccaaaatggcaaaaatatgtaattttcttgcttccggtatgcataaaaaattggaatttttaatgaaaagttaagaaaatatggaatcgttttggtctttaaaaaaaaaaattgtgcgccagcactaagttgaaggggtgacccccctttagcccctggccaggaaggggtctcaaaaagttagattcgggcgggtgtgctttagcgaaatgttagctcaggcgctattgtatattattgtagagctcacctagtcacatttaaaaaaaaattttggacccctagctcaaagttaagtaggtcatttgtccgaaaaactggtcaaaaatggaatttttccgaatttttttagagttgcatctttttttttgcgcccgtagcggcttttaagttgccgtgggtaatgggcgaggtggtttttggttagagcattttgaggcggttcttttaaaaaatttgagtccctagcccaaagttgagttggtcatttgtctaaaaatttggtcaaaaagtcggctt

SEQ ID NO: 23156 - DNA, 1620 bp, Heterodera glycines
  unsure (1)..(1620): unsure at all n locations
tcagtttttcaccgagtcaaaacgtatattattaaaaagcaaattataattaattattcgcacttattaattaaaaacatttaagcctacaaagaaaaagagtataaatccaataaattttcgcattttgtacatgtaaaaaagaaatgataattatttacaaaattcttcattttgtgctccgtttgctttattcgtccttttctttcggtttcttttcttttggctccaaaagttcgtcctctttctcaaattccgacgccattttgacgtaataacacttaatttcacaaataataattattatttaaccaaaaaacattttaaatatcaacctaaatnacatatatttcccacttaaatttttacaaaaatctactcaatttttaaacaaaaaatctccaaatcctttataaattaaattttaatcccaaaatttaattaccctttctcaaataatattacttctaaattatcccataatttatcccaaaaatttccttttcaacccctattatttcacctttgaattgcaaaaatattgaaaaacaataataaaaaaacagcaaactaattactcactatttcgcagttttctaaataaatttttgaaaatccaaaaaaataataattttttaaattttttttattgtactaccgaatgaccatccgacagagacaatacgtcactgctgctgctcgtgcccggactatgcagcgacaaatcagccattttttgttccattttgtcccttagtcgtcagttttggaaccaagtggaaacttaatttattttcctaaaataacacttttctcaaaatgtcttccttgttattggattaaataagaatctaccatttgttgtcattgcgataatctccaaatattaaattgtataaaaattcttatgattttttacaaaaaaaaatatgttagaaaagcgtgaaaaagcacaaaatgtcataaaagacctaattagcttaaaatgttttatggtttttttgatatctttttttaatatataaaaaaatggtttttagggctacatttaatccggaatatgcaaaaatatggaaataaaagtctcaacttttcttcgcaaatacaaaaataaaatggtttatctactaattagagaaaggaaaattaagtgaaaaaacgtattaacacaaaaatcgtagccctatcaattgataattaactacttaattaccttgtacaaattatgaactaataaccctgcacagttttgctaggcgtttcgtaaatgcgccatttttagctattttttcgacaaaatatggcataactttgcataaaagaattaccaaaagtatttcaagttatgtccgaaatagtacttacatgggctgtcgaacaataccaagaatgtaaaacttaattgtttttaagcaaagttatgccatgttatgtcgaaaaaatgctaaaatggcggattttacgaaacgacccagcactactcccataattaattaattagcaaaaatactgtaatgtaaattgtaagtaattagtagggctcggaattatacatatgtacataaaatcgcaaaatatgcgcatgaaatatgcaccaaaattgcaaaatatgcacataaa

SEQ ID NO: 23157 - DNA, 2213 bp, Heterodera glycines
ctttttggagaataattatctaattaccaccggtacattcatcttcacgatattccaaccgttttcggcataccaccaaaattcgtcatttttaatcgccaaatcggtggtggcggtgcattccgcctatttacgcggcgtcacggaagcggcgcaaaagccagcgacgacgacaataacagctgcagcagcagtgccggacaaatttggccacggcaaccgccttcggcaacaaggcaattcgctggtgccggcaacgggccatcgccggcggcgctgtgccgccgcctgcgccatgcaaagcagcataccaaaggctattccggctgctgttgctcatcggactgctgttccttaccggtggtgaccacggcgccggcattccaggcgctgaagcggtacaaaagcaccattagtgggattgacactcaccctgtggggatatccggagggaggataggctcaaaaaaggcatttgacgggatcgatatccaagtgggatatgctcaaattctaggattcaagggcatttggcttggtcgatctcctggaggataggctcacaaatctgggattcaagaacattggggttggaggcgtcactaaatttcaacatctgtatttcttcggttgtgcagcagcaggtggtgttcaccgaggagtccgaggcgggcaaaaaccatttgcgtggcatccaccgcatcggcagtgacggggctgacgatgaccaatcactgctgttggagcatcgccatcttcggcacattgctgccacaccgggcagaggaggcggaggacgtcggcggcatggtcagcagaagcacagcagtgcacaggtgtggcatgcatatgcgatcggctatgatattgtatgcgctatggtcttgtatgcagtagattgcctctatgtgccagaaaaaaattttggagtgtggaattcgaagaattttttcgaccaaaaattccacaaatttttttttttcaaattttcgtcgccggtgagaagaagcagaaaattgtagccatttttggcaaaaaaaaataatcctgtttttgcaatttttggggtcaagtttgaggtctgggtgccattaggcgccgcccggaaaatttttggaaattttcattatcgcggggaattacggtaaaatggttccaagaatttgggccagggttagaacgacgataccaagatttttgtaccaagtctcaaactcgggaaggattttacaaaacaaaaatctcacgaaaccacaatccatccatccatccatcaacaggatgatgctgaagttatagccagtgaagtggatcagcagcagcagggaaggccggctaatcggcgtcagccaatgattgtacacggcggtggtcagccgaggccgacaaactccgcgcgacgtgtgccggtaaggaaaaatgctaattagggcatcttagggcgtccaatttttgcgccaaatcggcgcaaccaaattatttgctaaaatgaaaggttgcgctgttgccgacacgcgaggcgcccagtccggctcgcgccggcgatctgcaacgcatgacgtcagcggaagcggaagtactcgcccgacgcctgcttgcacaagcggaacggctcgcggcggaaaggcggcgcgccagtcggctaaggttggcgtgctaaatttgattttttttaaattggcattttttggcattttgttgtttttattttaacccccctcaggcatgcttcttccacaaccgttgcttcttcacctccacccacaactacgaccacaacaacgccgcttgtcacttcccagccgtctaccgttgacccgtcccaacggcgcatggagcggtggcaggcgcggtggcgcaaaattggcccactgatcggacacaattcgaccgaaggcacggcgccggtgccgttgcgccggcttcgactggtgcaacggcgcaaaatttttggcgcgccggtaagatcgcgtctggggatgatgttggcccaaatggcactgagcgcgccaaaatagctcacgaaaatggagaaccccttcgcagcgaagggggccggtgtaaaagaggtgggggaggggggtcgccgacgaagggagaaaagtatttttaattaatttcattaaaaattccaaaatgttcgttggcggggtctatcggcatcgccaaccccttaaaatcctttttctcttaaaaaaattggcttaaaatct

SEQ ID NO: 23158 - DNA, 1175 bp, Heterodera glycines
  unsure (1)..(1175): unsure at all n locations
tatgagaaatatcacaaaagtgatcatganaattgtaaattggagattattgggacttatcagctcggtcctccgcaaacactgattcagtttatatttagaggataaggagttgaaatggtggaattccaaaaaggtgaccaagaaaattgtaatcgaagattattggcgattatcagctcggtcattccgcaaacactgattcagtttatatttcgcgatgaatgagctgtaattttgcgaattagacaaaaatgatcataaagtaacaaatgagagaatttcacattctgctaattaggctttaaatataaactgtttaagtgttgcagacggatcaggttgataagcgccaataacctcagatttactattttcgcgaccccactttttgaattctgacattttcagctcattacgctctaaatataaacagcatcagtgttccggaaggatcgatttgaaatcgccaataacccccaaattacaatttcctactgtaaacttatacagattacatttggatataagaaattgaaatattgagaatatcacaaaagtgatcatgaaaattgtaaattggagattattgggacttatcagctcggtcctccgcaaacactgattcagtttatatttagaggataaggagttgaaatggtggaattccaaaaaggtgaccaagaaaattgtaatcgaagattattggcgattatcagctcggtcattccgcaaacactgattcagtttatatttcgcgaagaatgagctgtaattttgcgaattagacaaaaatgatcataaagtaacaaatgagagaatttcacattctgctaattaggctttaaatataaactgtttaagtgttgcagacggatcaggttgataagcgccaataacctcagatttactattttcgcgaccccactttttgaattctgacattttcagctcattacgctctaaatataaacagcatcagtgttccggaaggatcgatttgaaatcgccaataacccccaaattacaatttcctactgtaaacttatacagattacatttggatataagaaattgaaatattgagaatatcacaaaagtgatcatgaaaattgtaaattggagattattgggacttatcagctcggtcctccgcaaacactgattcagtttat

SEQ ID NO: 23159 - DNA, 2450 bp, Heterodera glycines
  unsure (1)..(2450): unsure at all n locations
tactcgaattgcaacaaaaaagtcgtaaaatcggattccaatttgaaagttgaccctctganaatttttgttttgtttcagcttgcacttttggaaaatgcaaatttcaacaaagaaattgagaggacttccgagtttctcttcactgactacggagaatcggccaatttcattgacaatcgcttcgaatggcactgccgtcaattgtcctttctcattttgttggagggcccaactttgatggatcgaattgtgaacagagttttggaggataggacagaaagtgtgatgctcaatttcgtcaaagtgagtgtccatttttacatttatttgtcttaaaattgcgataattctgtggagggtgagcccattttcaaaaaaggttacctgacatttgcggaccgacaagtgcggaatgtccaccacctttttcagtttgtgaagtgcactcccgggttattgaactgtgctccgcccgtggaactgctcaaacgattgcgtgaagcgattgaccgtgaagggcaaaatttgttgcttgttcgattgaagtttgggcttacatcgcaatgtgacaacattaagcggattgaggacattggtcagttgattgggatagttttggaatggttttgtattttaattttggtcctttcgaaaattctaattttattggcatatttttgacgaaattagggttaggtgttgtcagtgtgtcaaatcggttttcaaattaggacaccgtccgattttgttttcgtttgttggagaattgctctttttccaggtcagtccagctttggcattgtgcatgattgtgggccgttgttcgacacttctgaaaaaaattctatcgagatagcgccagtgcaaccctcaagagacaaactgtcaacacagcccaacagggacaaattatcaatgcaaccaaaccgggacagattgccaacgcaactcaacaacgacaaattgtcagcacagcccaaccaggacgaattgccaactcagcccaacaaagacaacctgtcaactcacaatttgctcaacagagacaaattgttggcacaggcgctttacgaaataggggaaaggatgcaagacgaaatgcaacaaggcagcgaaaagctgcttaacaaaattggacaacattttaaacaaattgacaccaaattgttttttatggaatcgaaggtcggttttctttcaacaatgctttagtttcggcctaattgcattttccctggccaatagtcaactcattttgataaccaaattcttaatcatctcccacatttgctttagcttgagcatttgagtcggaatcagtggcaaaagcgacaaaacccaagcagcagcaacagcagaggcgaagtcagcagaggcggaggaggactggccaacttttttgaacggaaaacgccattccgaaacaatttttacgatgattacgatcaatttctgatggacgagcatcaatttcgttttgagcttttgtgaataaaaacatttcccggttcattcctttgcgagtaaatcaatacacttttcacacaactcaacagttagctttttggaaatatatgcgtcttaaaaatggatctaagtagagaaaattcaattttttttttattttataataaattatgtacattgtgctcgcaaacattccgatttttattatatttttgaaaaagaaaatattataaaaatttttaggtaatttgccagaaattgggaagattacgagcactgttttagaattatgattaaaaagcacataaatgagtgtcagaagagagattcagttttctttgctgttgctctcatccgccgattgccaatgaatgaattcacaaaatttgcacgaatttccttccgtttgggttcgcctgctctttgaaatgtacgaaaaactgtgttaaaatgggagggaattgctcaagttaaattagtaaatatttatttgctttgtaaattgaatttttaattatttaataattcgggaccgaatttttaagcaccaaatttctaaaaaacgataatttgtttggacttttggtaaaaaatcaaaattattgcaaaattgtttgttgattgtgatcagttagaactatcgaattggttttggtttaaaaaacgacccgaccagaaaaagccttaaaatccgttcccgactaaaacatttattaataaccaaaatatttaaaattaatattcaaaaagtctcgcaaattccttcgcattttccttggccaacagttgngcttcggtgtttggccacaaacacttccaatttcgcaaattcgcccaacagaacgggccaatgggccaaccgttcgtctgcgctttcgcccagcgcaaaattctccaaagtcgccacccgaagagcatccnacattcactgcacaagtctgcttntccttttgctgtgattggacaaaaatggtcacaaa

SEQ ID NO: 23160 - DNA, 2214 bp, Heterodera glycines
  unsure (1)..(2214): unsure at all n locations
tgcattgaccctcaaaacttacatataatctgtgccccccaatcacctaatccgaccgtcacaatgaggttaaatcctaaatgaaatgaatggatgaaggaccacttttcttcccaattcataaacctaagaaaaaaaattataaattttttttatttaaaaaatttcaaaaaatttttacataaaagatccgatggagcaataaacgcatatgcacataacataggcacctaaaaattttcaaaaaaaattttttttttgacattatgcgatcataccaatgggaaaccaaaggttggtaggctcgtcgatttcttaaaattttttgaaattaaaaaaaaattattagacttacggtccatgccctcgagcatgtctaatgccaccgcgcccattgaagtagttgctgattgaatggatttccgacgatatttcccaccaattttgtgaatacaaaaaaattcatagatcaccttctgcaatataaaaaacataaattaatttaaaaaaaatttttttaacagtaaaataataattaaacaatatttttattttaataaaatggatttattgataggaaataaatatttttggccttaaaaaatgttcaaaagtttccttttgctaaaagtattttaaccaatatttataaaaaatttaaattaaaaataataaatcattttactttaactaattttttactttatttcaaaaaattatttttaattatttttagttagaaattagtgcctgcctttgtcctttgtctgatgcgccgccaattatttctttaaccacaaaattgggtcggacaaaaatttgccaatgtccgcagcagtgatgaacatcagtggaatgccaacaagcgcaaaaatcacagagaaaattttgccaaggtccgtgttaacagaaacttcggaatagcctaaaggcaagaaaatctttcaaaaaataaaaattaattttgtcataaaaattaaattattaataccaaagaaaaaaaaattaaaaaaataataattcatgaaataatttttaaagtgtttaagaaagattgaattgtgctgattatgagtcaacatagagaaaagtctcaatggagcaaaccttaaaaaaagtatcaatgataattagggactccatttttaggcaaatgcctaaaatttttgcgcacttaatacgcacagattagcacgaaaaacgcgttttccgcttggtttggggtgtctacgatggcttttataatgccaatttttgtgcctatttcgccatttttggcgcctttttcaggattttcggaaaaatccttaacaaaaatgtaataaatatgaaaattacacccctaagaattgaaaaatttttcacaaaaattaatctccaaaagtaatttgtttttttttttgataaaaattttggtttaaaaattgtcttattcgaaaaaactgttaaaaaaattgaaatataagcaaaattatgttttttgattaagcttttacgcgatgcgatttttacctaaaaagcgttaataaaaattttatttgcctattttaaaattaaaaaaaaacactaaataatagaaaaattaattgaaaattattctacaatttgaagcaaatgataatttaaatttaaatattttatgacggggatggaaagaaattatttaatttaatacgaagttataaaaaacagccaatcgatccttttttatcattaggcaacaccaaaatgaagtggcggtcaaattggtgaaaccaattaatgttaattagggtaataagaaccatttattagtgtacattgctgtgttagtcttcgtctaacacaaattgacgacgatatttaattagctccatttaattttaattaaaaataattttaacgagaagaacaccttaatttaaaatttttcatttttttggcttttaaaaaattcagttaaaaattatggaaaaaagtgccaacaatttttcgaaaatattgtggacacaaaatgagcatcgtttccaacaaatttgtgctctcccatttattcgtgaacaaaaagatgggacacttgctgaggaacgctatcgccactacataatacaagtanaattcatttcagtttttttaatggaaaaaataatatatgccaattaatgatttaattagaattattaaatttgattgatttttttaaataattaaaaacaattctcaagaaaatttgtc

SEQ ID NO: 23161 - DNA, 1104 bp, Heterodera glycines
tggccaaattcctgacattagacctattcctcaccccttaatggttattcattataagcaattccgaccacgtagcggaaacactgcaaacacatttgaaagttacttccccgagttttatgtggcgcaaccattttggcgataccgttgatgttttttataatttttggtctcatgtcactgattttggacaataaatgagaattaaaaaaaaatgaattttcgacttttgttcgaatttgggtccggggttcgaaattggttgcaatggaggtcagattcgtgatcagcgacctcgaaaacccccaaaaacatgtttcaatgaagaaaaaaaatttgaatttttttttccaaaatggggggggacaaactacactattaccgaaaaatctgatgcagaatttgtgcaaaatatttttcagggggtgggcttcctgaacaatagtaataagtagggcatccaaaaatatgcacataaaatcgtaaaatatgcgcataaaatatgcaccaaaaatcgtgaaatatgcacataaaaagtgaaaaatatacacataaaattttccaattgagggtgtaatttctcaaaatttcttcaagtttgttaaatttaagcataaaaatcccgaaaatagctaaaaatagtatgaatgattattttagaaccaaaaaagtaatttatttattttgaagaaaattgagcaaaaaatggagaattttctattttctgactatttttggcataaagtttcatttttaaaaagttacttttttatcagaaaatatacccaaaaatctgatatttttgaaaaattttcggtcattagagcccaaatggccgctttaatagagggggccgttttaatagaggatttattgaaaaaatgccgaaatatgcacataaaatatgcacgaaatgccaaaatatgcacaaatatgcaaatatgcacataaatcgcgaaatatgcacaaatatgcaaaatatgcatatagaaatccattctagaagcttcaaatcaagctaaaaacatgtttttcgtgcgtttcaggcctcccacagtccaggaaaaaaatatgcatgtgcatatttttggatgccctagtaat

SEQ ID NO: 23162 - DNA, 1337 bp, Heterodera glycines
agcaggggtgggcgaagctcggcttagtactcgaagccgaagccgaaggcgaagcccaatttttattcgaagccgaagtccgaagctcgaagcccaaaaaacccgaagttttcgaagccgaagccgaagttttttcaaaatttttttttaattccaaaaaattttttcatcacaaaatttcggttaaatatcaaatagaccaaccaacaacccctttcgataaataaatataatgatttttttaacaatgtattttctaaatttttataattcttagaatactcacagtttttgagtcaatttaaaaaataaagggaattttggaactccggcggtgccgataggcgccgacgggaaaaatttgaaattttagtgacagatttagttcaaaaatgaaaagattttgcgattttaattgttatatttatattaaatttccgtcgaacaaagaataattttgaaaaattagaagaaaagaaagtacttggatgggaactgatcaaaagaaacataatgaaaagagcaaagagcactaccactcgaccatgcgtgtgaacaaaaaaataaaaacaaaaaattaataaatatatattaatttaagtttatcaaaagcccatcactaagggtgcattttcacattgaaaactcaatctttaggggtgtatttttcccgaaacttcgggtaaaatagccgaagccgaagcacgaagttcgaagctcaaaaaacccgaagttttcgaagttttcgaagccgaagtttcgcccagccctgatcccaactgaaaatcagcggtgccaataggcgcagcgggaagtattttcaaaattgatgctatttttaagagagattttcactaaaaaaagcaaaaaaaaaacaaacaaccatcattgaccccatgaaaagcatcaaaatgatgttaagcgcagagtttggagccctgcttatgctgctgcttttgtccttcggtgccccagagatgtccttattagtgggaacagggtttggcgtagcacaagtacgtccttgaatttaaggactttcatgttccaaaggctggtaagcttttacagggacgtcattgacaagcaaatgagagttattaaagtgtaggaggattttcaaagaacaaaataaaatgatttttggcacccaagtgaaattgacggattagtaaaaaaaagaaaaattattgcgaaaccaaaatccaagggaagcttttcaaggattctaatctccttagaatgaaatactaattgacacggaccgcgcttgtcaacggtggtgaaaatgtgtctttttgacgctaaatgaagcgctgctgctatttgttgatgga

SEQ ID NO: 23163 - DNA, 1265 bp, Heterodera glycines
aaattcccccattaaacactccatccccgtcctggcctctgcccattctccgttttgggcacacttttgcttagccaaacaaaaaagagcaatgcggcattattcatagatgggcttgtgatggaaatggatgggaagtgaagggttggcacaatacaaaggccaaaactgaaggatttatttttataagtgtgtcatgccattctgaattcttttctttttttatgaattgtgccattctgtttttgggtgacgtaaatggatgatggatggactaaaaatgagtgagtgccatttgctcttatgagaatgaagatgcgtctccggcttaaatattttggcaaatttcgaccgtaggcctttgggtaaggaaataattttgagaaatttaaatgttattggaaatgaaatcaaataattctccaattactggtttaaataaataaggatacgattcttttgtaaatatgaaaaaatttgtttgtcaaaaagttatccatcaatcattttttgactaattaacttttcacttaatataatttttgttccaaaatatcatggttaaggaatgggctaaaaacccccgggaccgggactcccgtttttttcggaactcccggtcccggtggtttgtccaaaaaagccgggaccggaactcccggcaaaatcccggcggtatcccggtcccgtccgggctctattaattctatcatcatctttttgttttccttattgtcaaaatcgttaactaatctacaggtcgcttcatcgtttcgcagatattttttaagcgaggctttcagcaatcccacgagttgggtcaattccataaggcctcaggcagttttgttggtgctcttcctcttttttaatggtgataatgaaccttataaaaatatttttattacagtatcccatttatactttgaaaatgctgggtggggcgaagttaaaacgttttctgaatatgttccaacggcaaacgactcaacctttatctttgtgattaggttgcaagaattattgttaaattagtcattattgaaaaataaacataaaataacaattctgttatcttaaataaattgttgaaatattttcggggtcatttaattttgcgccgcaaatgtcattttgactgggcgccgcatctgtcggcgccgcaagtgtcgcgccgcaaatgtcggcgccgcaaatgtcctcgccgcaagtgtctgcgccgcaagtgtcgctttgactgggcgccgcaaaggtctgcgccgcaa

SEQ ID NO: 23164 - DNA, 1312 bp, Heterodera glycines
caaagaaggaagtaattaggcgtcattatgcagtaaaaaagcgttaatgaattatttattcattttgcacggttagtgtaattaaataatttggcgttcaaggttaaaaaatattctctctctctctaatgatgagcgttttgtctaattaatatttttgaaatgaaaaatctaaaaatttatttatccacataaagtaataaattataagaaaacgcattggactttgatttcgataatgcttatcccgttaatattggtggctggccatagggaagttgaccttgaccatatggaaatgggccatggcataatccgcatgattggctgcatacttgggctactgactttaaaatacaaattcttttttaaattaattattttttcattattcgaaaaaatgaaaaataaaaacctaaaaattattcatactacaaagaaaacaagtaaacagattaatttattaaagtttaatgaaatttaagaatttttggcaaaagtcatgaccaattccataaaataagaattttcaatattaaaaagacacaatttataatattggttgtttaagaaaccaaccggaacattgcaatgtgtgacaaaattgaggcaagactcttccaaatcaaagcaaggcggcacttaaaataaacaagctatttgtaataataaaaggatcagtctgcctccaccaccgccaaaaattgagccgatttgtccatgatgccaagcgggaagagggaagccagaagctaaaaaaaagaaaattaattgggtaaagtttaaatgcagccaaaccatatccgaatggcaaatccatttcttggcctaaaaaaaatttatgggaaaatataaattataaattcattaaattaattttgcaaaaaataaactcataataatcacttacaacaaatcccatttatacagcgctcatatgggtcgatacaaacgtgaagggttgcgcatgctacaaaatgccaaaaaattaaaaaaacatattaaaattttgaagcttaaacgaacccccatccgcaaagagaccgggaggacagttgccttggttattaaaattctgtttaattgatttagttttatttaataataaaccgtaggactgtcccgggccgacacccggcaaaaaaggcgaaggcatttgcaaggcaatggtaaacagagaaaaaaggtaaaaaagcagtgaattcgaatgcatttttagttgaataatttaatacaatttctgatgaaaatttttataattttaaaaatataaatattttatggtggtcaaattcaaaagtcacttatcctt

SEQ ID NO: 23165 - DNA, 1337 bp, Heterodera glycines
atgcatttaaaattatttaaattaaaaaagataaatataacaaccgaaaccttcaatctgttgccgatattccatgttgaacaggagaacatcgagcaaagactgatgctgacgatggcaagtcaactttggcccaattggtgtgtaaaggcactcgtgggtctgcccaagcggcacaatacagtccggctccgcggcacaaagcaatgccatggaattgaatttgtgaatttattttggaaacattgaccgaaataaattaaaatattttccgaaaattttgtcaaattgcttaagggacgaagccgagaaattggatgtgatggctcatcgaaatgccaaattttggcattttcagttttctctaatattttcgaaattcgagtcgtgtcagtgccaagaaatggagcaatttttttgatttgtcaaacgatgtagaatttatttggaatatttaatcatgccatttcatcagttgccgagtttgctcagttttgtgaattatgacgagattggcctcgaactgtggtgggtcgtcgtttcctgtccattcatatgttttgttgggcccaaaattggcgaccattggcaaatatttgtacatccctggaagttttatttgttttcattttattttttattgaaatatttgccaggatgagtcgcaatgtttttgccatgtccgctgtcttaaattcaataaatttggtaaatttcacctgaaaatttgctccttcccacactcacagcctaacaactggactgggccaatttgtcctgtttgaatttgtcttaaaattgacgacaaattgtcattgtcaaaagaaattgacgtgtccacccaaacaacggtgtcatattccgaaaatacatgcttcaaattgataataaatttggcattttttaaatttaaattaccgccatggcaaaaaccttccacgcgtaactgttcagttggcgcacccgaccagaaaccatctgagaaaaatcgaaaacgcgccattccaaattgcacatcgaattcaactcagttacctgcaaattataaatttaaaatgtgcaaataaatacggttttaatgaaacgcggaatgaaattaaacgtaaattattaatttactatttttgccaataatatttaaagcatagtaatttcaaattcaatactttaattttttaatgagaaataattaattaaatcgaattaattataattattaattgcttaacccattcgttgtttgttgtcacatttcccaaatcgtacgcaattattttttgtctgcaaccaaatttttctttgatgtttgcgattagcacccgaagtgatgggaaaag

SEQ ID NO: 23166 - DNA, 1048 bp, Heterodera glycines
aagaggctctgcgggaacggattagcatcggggttacgagatagaaaaatgtcctaaaaagagatagccatttttctgagaattaattcacaatttccgcagctcttgcggtaatggaaaaaattttgaagaggctctgcggaacggattagcatcggggttacgagatagaaaattgtcctaaaaagagatagccatttttctgagaattaattcacaatttccgcaactcttgcggtaatggaaaaaattttgaagaggctctgcggaacggattagcatcggggttacgagatagaaaattgtcctaaaaagagatagccatttttctgagaattaattcacaatttccgcagctcttgcggtaatggaaaaaattttgaagaggctctgcggaacggattagcatcggggttacgagatagaaaattgtcctaaaaagagatagccatttttctgagaattaattcacaatttccgcaactcttgcggtaatggaaaaaattttgaagaggctctgcggaacggattagcatcggggttacgagatagaaaattgtcctaaaaagagatagccatttttctgagaattaattcacaatttccgcaactcttgcggtaatggaaaaaattttgaagaggctctgcggaacggattagcatcggggttacgagatagaaaattgtcctaaaaagagatagccatttttctgagaattaattcacaatttccgcaactcttgcggtaatggaaaaaattttgaagaggctctgcggaacggattagcatcggggttacgagatagaaaattgtcctaaaaagagatagccatttttctgagaattaattcacaatttccgcagctcttgcggtaatggaaaaaattttgaagaggctctgcggaacggattagcatcggggttacgagatagaaaaattgtcctaaaaagagatagccatttttctgagaattaattcacaatttccgcaactcttgcggtaaggaaaaaattttgaagagctctgcggaacggataagcatcgggg

SEQ ID NO: 23167 - DNA, 1233 bp, Heterodera glycines
ttgtttatgtaaaaatatttgatcaaagagaagaaaaatctattaaacttaatattttacataaaaataatttgtccaatcaaagtttatcgcattttgtaattgattttgtgccaacaattttaatgcccactcaatttccctttgggttttcaaataatgccgacaaaacaaaaaaaaatgccatttttaatcttccggtttttggccaacattttttgaaaaaaaacattggaaaattgagttaaaaagagtaaaaactaattttacagcagtaagatccgagttggttttctcatttattatcgtcattttacaattatatttttttataattctcaaaatttccacattattctttaagaaaatatttctgaaaaataatcttgtttctccaacgaattaatatttatttacatataatttcctaaatttacaaaatccacagctaattaatgcacaataatcaaaaggtaccaaatcttttcagtgatgcattttcattgggtgtgtgagccggccaatccaggcatagaaatcacactttccgagttgggcacattttgaacatggacaccttaagagattaaatggatttgattattctttcttaattgactttacccttgggaccgtttatgggcactttgccaatgctaatgccaaactctgcacatttcgagtcaatctcagtgactttctgaccaaactgcccactcaatgtctgccattcgctgttgttgctggcatgggaagaagcggaggcggcaatggcgaacatggcacggacgaagccgaggctaagggcacactcatctaaaagggggaagagatatttaaaatgatttaaaaataaataaataattattaggcaattgtccattaattggttattaccagcagaatgagtggcaagggatgcttcgatgtcggccaaaagagttcgatcgccgcctttcgagcagccgatcagttggcctttcaacgcgtccgcaacattttgggcatccgaacaaagcgatgacttggaaatggaattggcaaaagtgccaacgtaattggacataagtgaaaccactttttgactgccgggacagcacggatctgtcggaaaacaacaaattagtaaattaaaataataaattaaaaataatacgcggtgccgaaaagcaacattggcacatcaaacagacaattgcgacgatggcgagcacagagacggacggggaagaa

SEQ ID NO: 23168 - DNA, 1809 bp, Heterodera glycines
catatagacttctcagaaccgtttgaatttgtttcttctgaatatggaccgggtgaggtaacagaaattttaggtgatggaaattgtggttggagaagcatctctcttgccttaactggcactgtgtcaaatcactccgagataagaaaggatgtaattgaatatttggaagaaactgtttaccaacattctttttctaatcatcacgataatgaatggtggtgtaagtctgctattttagtttttaacatgtagccaacattttagtgctttttgatagtattgaaaatataagaaaacgcagagagaatgctattgctcctgcaataggcgcccatgaaattgaaaaatggatgaataatttggatctagcagcagtcaccaaaatgtttcgaataaatataattgtgtgtgaacgtatacaagaacgaattttccgttggcaagtgtactcaccagatttagaaacatcggttagaaatatttccaatatgcaaattcatataatttttagctttcgaacctccaacataaggaatcgactgcatcaatatttttatactttcatgacggtcattatgaactaataagaaaactacaaaagataaattaattatttttttattttttttcttattataattagaatttccctttgaaagttgcaaagaaatattgtggcacttattgtggcacttcattttttgaatcatgctttatagcaccagtaatatggttttgcaactttaaaaaaggtttaataaagtattttaaatttattatacattttttaataatatagtcgatgattgctgttattaccatgatttatgctatataaacaaatctataaaacgatacgattgcgacaaaaacttttgcaaatgtttgtatgaaagtgctgaatgttcattaaaagtctgtatttattttgtattttaaatagtatattttttagacgttgttatgcttgacagttcatgtttttggtgaacactttaaagaataagaaacttttaaaaatacagagatttatattaatttattataaatgttgtataacaataactattttttatatttattgtctttaattcacttcgggtggcggtttttaggaaacgcccacttggcggtttttaggaaacgcccatggtggcggtttttaggaaacgccctggcggatttaggaaacgcccatggtggcggtttttaggaaacgcccacttggcggtttttaggaaacgcccatggtggcggtttttaggaaacgccctggcggatttaggaaacgcccatggtggcggtttttaggaaacgcccatgtggcggtttttaggaaacgccctggcggatttaggaaacgcccatggtggcggtttttaggaaacgcccatgtggcggtttttaggaaacgccctggcggatttaggaaacgcccatggtggcggtttttaggaaacgcccacttggcggtttttaggaaacgcccatggtggcggtttttaggaaacgccctggcggatttaggaaacgcccatggtggcggtttttaggaaacgcccatgtggcggtttttaggaaacgccctggcggatttaggaaacgcccatggtggcggtttttaggaaacgcccatgtggcggtttttaggaaacgccctggcggatttaggaaacgcccatggtggcggtttttaggaaacgactcagcacgatttgaaattagttttaacaaactataacgccaattattgattaatgtgagaagtttcttgtttttatgttggcaattgaagtggaaaattct

SEQ ID NO: 23169 - DNA, 2652 bp, Heterodera glycines
aatttttcgagttaaaaccggttcaaaacccggttttttggcatttccgcaactggagacctactttttcgttcatagctcgtcaagacgaatcgattggtatataattgtgccattttttccgggggtttgactatagtacacccaaggaaacaattggtctagtagctaaaaatcgaaaaagtgcgagattaaatactttttgcgaacgagttgagagttagccaaccgattgagtacccaaaaatcatgtcccaattggtgcctaattataccccgggcctgattctttggagttatatctcgccagatttaattgatgaattctggcattccactccccatttgttgcccttctctctcttctccctcacccgatatctctctttgctcttctctacctatctcttctctctctcctctctctctctctcacatcgtctcttgtctctctcaggttctcttcacttctctacctctcaaatttctcttctctacgtcttttttctgtctctttatctactctctcttccttatctctctcattgctttatcgtctcccattctctctctcacattttccttgtactgcttcgcctcgtcgcccaaattgccctcgaactttgtccaccgctctttgcttcccttccacaaatcgttctccagcagatcggccagcatcggcgtcttctgcttcactgctgcccacagctcttccgccgagcccaatttgtccaccgagtccatcaattcgacgattttgtcccattctttggccaaaacattgcccaattttttgccaatcaaaaaccaactatgtggcaacaactcttaaatttatttttgactaatcattttagcaaatgccttttcggcacctttgacatttgccggaagcatgttccacatattctccggtgtcatcatatttttgatgacttcgttgattttgcccgtgtcaattttgcccagcatatcctgcagcattttcgggtccaaattggccgccatttctttgattttgtcgaatcccttctttccatcttttaaagagggaaaaattggtattaattggctttccatggctaaaaattaattcgggaatcggatacgaactcgaaaaatattggaatttgggatcggctagcaattctactggccaatttggatttcagattacccgcagctccgcccccggctttgcccagcatttcctgcactcccgaaagcattccgtccaagtccaaccccccccaaaaggtcgcttaagtcgccgccgccaccgctgccctttttcttttggtcagcaaaagtgccatcgacgagcaacaaaaagcaaaggacgaaagaaagcggggagaaaaaagtgggaaaggaacgaaccatcgaaatgagaaaatgctaaaataaaagagaaaaatgaatggatttggattgattgccatttttggtgagtgccaatggaatgaatcgaatgaatggaaaagcgagaaaatggaggaaaagcggcgcttattttacgtggctttttcttttttcttttttttgcgtttgccaaatttcttttgtcagcgcattaaattaaaacattacaaaagccaatagaagaagtgaatgggcgaaataaataatgaaaagagaaagatttctttttggaaatgggccaagggacatggccaaaaaatgaaaagaaataaagaaaaagcaaacgaatgaaggaatggcacaatgactgatgaaagaagtgcccctgggaaaagtaccgtaacagcaacagcaccatcgtctacggtagtaacagctatttgactactgtatgtattccttaaaattggctattttcatttggagaaatgaaaaaaatatattttattaaattgcattaattttaaatcaaaaaattcacatgtaatgcacaacatcgaagcttaacactggcataataccgtaaagcgtgaaaatgtaagggtaaatttagggtacggtaagtgtgccattttctccatcaaatgccacaattttgaggggagttggagcagcatttgtccagcggagtgttgcgcccgttgctctcattgtgctgctctttggtggtctttcgtcgttttgttgttgccacattgcaattaataatgatgccattgtcagtcccctcattaacggcttcaccatcctcattattcactccattagcgacttcaccctcattagtcccttcgcctctttcatttgcccgctcttccgttaaagcggctcttattcgattgagccctaaattttgaattttccaaatcatattttgaatgttatgaatgcgcgccttcgtccagcgtttgtgggctgacgctggtgaaaacgatgcggaaccatccgggcgtgggcattcggcacgcgtcgcccgcggtgattatcactttgttgcgcatcagtcgctcaaagaggcgccgttcgccgtcaaaagtgggctcatcgagaaactgaaaagcgcaatttaagcaatggcaaattacaggataattagtcggtttaaattcggaaaaaagcttattttttaatataaaaccatacattaaaaaggggggtcggccgccgataatttttttttttgctttttcaaaatgtttttttttcgacgcactttttccaaaaaat

SEQ ID NO: 23170 - DNA, 1150 bp, Heterodera glycines
aataattttatttatttataatttaatttaattaatattgaaaatttataaacatagaattgttttgatttggtgaattggtgctactatattcaaatttctttgttgttacagtataatttttatttaaaattttcatataattaatcctctcgttatgtttcatctgtttttttgtggctggcgacgtatgtttaataataatcttattttttaaacattattttacattttcttattctgcctaattagtctaatgtcactttgcaacatatcaattgaataagcgagcattttataatagaataaaaaattttaagttaattcgtatataaaattaaaaaaaggttattaaaaaaccagaattttaatagttataccctggaattccacaaattataaataattaaaataataattccttagaatataagaaataaaaattttttattatcattattcattattacctatatctatgtggacagtataaaaataataattcttccgctttaattttgaatattttatgaaagtgcataattaaataaaataaaaaacccactttttacactgcttgaatcaaaaataaaaaaataaaataaataaattatcgcaaaaccaaaactgtcaaaaaaactttttatgccaatatcgaaatggaattctcatacaaactaagcaacgaagcataaacacatgtgattataattatgagccaataggatttttgtcagagtataacacctaaaatttacgcccatttttatgattagaaaatttaaaaagttaattttattaaattaatataataaattatttatcattactttatgtcagaaattattaaatatttttgaataatgaaatgaatgagaaaaaatttaattacggtaaaatattttttgtggaaaatatcaatttaagcaaatgttttttattcttgaatttagagtagttgaaatcatgtgaattaatccagttcccaagtttttttttaaattttattagcgtaaaaataattgaatttttttccgctgaccatttttctcatttaccccatatgcacttttttgcgcgcttttttccaaaaaacttagagtggggggggggggggggtctcaaaataagacatagtcatttttcttgg

SEQ ID NO: 23171 - DNA, 858 bp, Heterodera glycines
  unsure (1)..(858): unsure at all n locations
gcattagcgctattccattttgcgttccgcgtttctgncncctggtnnttntgtacnnncnaaggcgcctgcattccgcgcccatagggcccctcgggtcttttgtgacccgtagcgcctcgcctttccgcgccttgcattccgcaccgtttggcctcccgggttttttgtaacccggggcgcctccattccgctccattccgcgccatacggcccctcgggtctcttttttggcccgtggcgcctcgccttccgcaccacagcccctcaggaaagaatggtcatgcgcttaggcagcgagcctatctcgcactcattggcggcgttgtgccgagctcacaaggagggcagtgagcctaatctgcgcaaaattggagaaagcgcattggagaagcgcattggagcagcgcaaattgttgaagcgcaattggagatgcacaaattgaagaagcgcaaattgaggaggcgcagaccgaggctgaatggaaaattgtcagaggaagcgcaaattgaggaagctcaaaccgaggcgaaagggaagagcaaactgtctgagcaggaacaaaaagacagcgcgcaaattgaggcgaaattgaggaacgcaaatcaattgcaggcgcaaactgagtctgagcgagggcgcagactgagattgaacacaagcgcaaacagaacgatggcgcaaactgagacgaccacaggcgcaatactggagaaccactaagtggcgcccgtagctcagttggacagagcacttcatgctttgaggagatcgtgggttcgagtcccaccgggtgaaatctttgtgttctacactacgagcctggctgaggccatcatgaagtcaaaggccaaggg

SEQ ID NO: 23172 - DNA, 2485 bp, Heterodera glycines
  unsure (1)..(2485): unsure at all n locations
agcacaaggatgtgccaattccagcaaatccccttgagttgcttcctgcttgaagcatggagagggtgggcgggggaggaggagaatggcatatttgatgtgccattcttctcgcttaagcgccgcggggcgacatgccaaaattggatggcaaatttttttttttctcgcggtactgagtcatcaattttcttcgcgctgaattggcttgggctcaatttggatattctaaatttgctgcatgaatgagaatatttcccaaggctgtttaaatgccatttaaaggctccatttatttttgctttgaatgcctgaggcaaaacaaaataaaattcctaaggcttgtgttagagttagtctcgagatcgaaatccgaaatttgtccgatttcttggctcgagaggaacagtttaaagaactgctaattatttccgctaatatacctcattaatggagcgcattcaaaaataaaaataaaatgcctgagggcatttaggcaaattaatgatttttgtggtgcaacgcatggagaaatatttaaacataaatatttttttgtgttaaaaattcaaaaatatttgtaaataaatatgcgaataaaccctttaaaaatgtgctaaatcttttaaatatttattgaaaatacaaaaataacaatttttgtgtgccgataaattaattaaaagcgcgaatattgtctgagaaaaaaaacgatgtgggtttctcatttattatcacttactaattaccctcaccatccaattctctgcttaattgtcaccaccaacgtgccaatcaatggtcggttgttgtttactaacctaatcactaatcaccactcaccatccaattctctgcctaattgtcatccatataacgagggtggagcgggggaggggcaattattttggaaaatgacgtgattaacaggcccggcgggggcggggaggggaggggcagagaacaagaatggggcccctatttgctgaaagaatgtgacgcgggggtgtgagaaggagggggaggagggccaatttagtcccaaaatggaaggaaaagataacagagaaaaagggcccctcgggggacaaatgcctcccgccgccggcccctttttcaatgtgtcctcatttgtcagcagagggaaagcgggggagtgtaagaggccccaattcctactcccctcacccattcctcacgactcttgggcctatctctacgccgtttctcccccccccccccnccctcgtcctcatattattggacagacaatctcggcgccaccacgtgctgctctagtgctgtgtttgtgtgtcgagactctcgacccaaccaggtttgggtctcgaatttacggggagattcttgacccaacatttggttcaggctcgaaccttgaggataagtttcggattccaagtttttggcacatgagtgatctcgctgacatattctggcatcaactttcaagaatctcgggtgacaaaatttgtcggtctcgaatctcgggggaccaataatggtcgagagtctgacaattcactgccgaaatagttggtccccttccctacaatgtatttgccatccaacgacgaaatgccctctatttacatggaaggagaggaattttggtcccccctcccgccgtcggggactctgctgggcccaattctctcaccaccaccccctcattgtcattgtcagcccaccctcttccatcgtccccgccagagataagaaaatactcgcatccatccccacccctccgcccccaaaaggaagacagaatatatattgttgtatgcattgagataggacggcccccgaggggtctcggccaggggtgtgacttgtctcagaaaagacgagagcgagagtttggcgagaggcgagagtccccaaaaagacgagagcgagagtttggcgagaggcgagagtccccaaaaacacgagagttggcgagaggcgagaggacgagaggcgagagtttttcaattttttctgtagccttatttttaatttaaaaaacttcaaaatcgtatattaaattaggggtacgggcctgggtatttgggcaaataccgggtcagggtattgccgggtacagaaagccgggtcagagtcctagtttttaaaccgagtccaagtcatgaaaaatccaaacaaaaatctttaaaattttttcatgaaaattaaaaaatattttcatgaaatatatttattttagaaacaaactttattatttgtccattttttccaccttttttttgcggtgcgttttttaaaacttcggggacagttggggtcgggcggtgccggtaggcgccgccgaaaaaatttttgaaaattgtcttcggatttgtttacagattttattcaaaaatgaccaaaacttgtttttttaattttttgtttttaagtcgctttttttggtgccgctggtttcccccaaaaaaaaattttttggaacatttgggtggggggg

SEQ ID NO: 23173 - DNA, 1016 bp, Heterodera glycines
ggtaatagaaatctctttggaaacaatgacagtggctgtcatcagttgttatgctctaaaaatgattttcgggccgtttgagtatatgtgaggtatggacggtccaaaaaaatggctatctctttttttggcaatctggtaatagaaatctctttggaaacaatgacagtggctgtcatcagttgttatgctctaaaaatgattttcgggccgtttgagtatatgtgaggtatggacggtccaaaaaaatggctatctctttttttggcaatctggtaatagaaatctctttggaaacaatgacagtggctgtcatcagttgttatgctctaaaaatgattttcgggccgtttgagtatatgtgaggtatggacggtccaaaaaaatggctatctctttttttggcaatctggtaatagaaatctctttggaaacaatgacagtggctgtcatcagttgttatgctctaaaaatgattttcgggccgtttgagtatatgtgaggtatggacggtccaaaaaaatggctatctctttttttggcaatctggtaatagaaatctctttggaaacaatgacagtggctgtcatcagttgttatgctctaaaaatgattttcgggccgtttgagtatatgtgaggtatggacggtccaaaaaaatggctatctctttttttggcaatctggtaatagaaatctctttggaaacaatgacagtggctgtcatcagttgttatgctctaaaaatgattttcgggccgtttgagtatatgtgaggtatggacggtccaaaaaaatggctatctctttttttggcaatctggtaatagaaatctctttggaaacaatgacagtggctgtcatcagttgttatgctctaaaaatgattttcgggccgtttgagtatatgtgaggtatggacggtccaaaaaaatggctatctctttttttggcatctggtatagaaatctctttggaaacatgacagtggctgtcatcagttgtatgctctaaaa

SEQ ID NO: 23174 - DNA, 2539 bp, Heterodera glycines
ctcaaggtgttcaagtcgtccgtgcttgaggtgagacttgttcctaaagtggcttgtttctagtgacgaacgccccgtcaaatatacgttttttaaaattgttttcgacgttctgttcgaagttcgaactcgggttcaggtcaacatacaaaaataatttattgttctcttaaaatggctccttatttgctaatgttctgtttttattgcccttcatattcagtccgatgtgcaagagctgtgctctcgcattgtctatttgcatttgtgtttggacaccgtccgtgccccacccctcgtccgtgcgttggtcaaacttttggtcgtggcggagacggatcgaccggacgggggcaatctgctcgaagtgttgctgtccaaaatgaacaccaccgatcgggtgattatagccgtacttaaaacagatttatggcagggtattgggcaaaatattgttgacttttttgtattttttttaagttatgccgtctcactttgtctctgctgcgcactttgctctccctgcactgtgaggatttgctgtggtgcgcggtgttccgccatttgatgccgttcattccgctcggcagaccccgccggtccaaccaaagccgtcgcttcgacattaacgtgtcgttggacgccgccgctttctttctcaaaagtgtcccggaatgtacattacgtattgccgaggttggcatgttggtaaaaatgttgctaccgtttaccacccattctcccagctgtactccgaagaacagttcaagacgtacatgcacgaggcgggcgatgcgatccgcgactgtgcgttgggttgcgccgggtggcggttcaattacgacggtgtgtcaccgaacatgacaatgttgagcatcaacaacaacaacccgagtgatgagctgcagtccgcccgacaagtgagtggcgttaatggacttttccttcattgtcagaattatttttggcatttgtttttgtctttatccaaaatttttgccagccttttactcgcatgtgctcggcccgttcctcatttgcatccacaggttggaatcgctatttccagaaccgttcctcgcacggcactctgtcggccgagggcgccggtgcggcggaggcaattcaaagtttgaacgaacttggcaaagacgacgaggagcgggacgaattgggcaacaacaacggcaacagacagatgatggacggtggaggcggcggtggcttatcccaggaggaggacctcaacgaatttaagtcggtcgtttcgcatttaatttacttttaaaaccattcatttaatgtgctctttttcagtctttactattcaatggccgaggatggtgttcgtttggactacttccaattcgcctacgagggcgtgtccgagtcggacgagccggactcggtgacttgttcaaggcgtaattcccaagaaagcgaagaggaaaaaggttggaatggacgagttatggacacagtttaaataacaaattaatatttctcgggtttattattagaattttggtctctagagaatttgttattgaatttattttgaccctttcttaccatagaaaatgcgaaggcaaatcgcaaaaatggtggctcacaatcagttgccgttccgttacctctgtcttcgtcgccgcccacaatttcggctcgttctcacataatggacgcaatcgtcgccactgagtggagcaaaacggacggagtcagtcacttgggttcaagcgttcttcctcccgtaaaattaatttcgaaattccttttaatgggaaattttttaaaacgaaattccatgcgctttacttttgggtctaccgtcagttccgtattcttttcctcaaccttatttttaagccatttcagcaattcattcttgctttgtttagagccgtgatcagttcattgaaatgcttaacgcattgcctttgccgtccaaccgagaacacgttgagaaagccgctgctgctgggcccggtcgttggagcccggtgccgaagagagcgcgcactgttgaggagaacatggcactgatcgaatctcgatggcaatatttggaggtatttaaaactgccgactaaaaaagggggcgggggtcaaccgaggataatgaattatgaggaaatctgaattttgaattcacaggaattgcgattggaaagagaggaaacagccaaaagggagggagaaaagggcgaagaagacggggacaatctcttccgattggacttaagcgaagtcgcggcaacagacgaaaatgggaacagcgaagaacaacaacgacagatggcggaagaacggatggacgacgaggagaacggcgtcagcggggacaatgacaaaaacgcaaataatactgacaacaataacaacaatgaggacggatttccgatggaatgcgtcgatggaatgggtaagggtcaggttataggcgtaaaatacaagaatttagaaaatttcgtaattttaaaacttatttgtgcgagtcggattcttaaaccgaaggaggtgtatatcactcttttaa

SEQ ID NO: 23175 - DNA, 1931 bp, Heterodera glycines
aagagtttcccatgcgatagacagtcacaggggaaactggacgcccagctcatccaaaacctgttcaaccatggcgttgtctcctcgtgcacgggcacttggtttggtctccttgctctccggcactcctccaatgacaatgctcctctgtctctccaggtcatgcggtgtgagcacgtcaattgagctaatttgtgtgagctgtgtagagcaaaccaggagttgcgctttgacagcggagagaagcaccattgagggcgtcgttgtcaatagtcgaaagtgcggagagggagtccaactgtttaagaacattcttaacattgtcagcgacggtgttgattaaatttgagtcgacaattttttggggagaagatgggtggccggcgtcaatacgggaccgcttgcgagaattaaagacggaaatattaaaaatcatttttgaagacagataaagctaaaatttaagaatttttagtcaaaggcttcaaatcacgctaaaaacattttttcgtacgcttcaggcctcccacagtccaggaaaaaatatggatttccatataatttgacgccctatcgatcatattcccattttactccgtgaatgacatctgaatccttctgtttactcatattgttgtatagatcaacatcaatgccttagcaatattagcacctcagattacccctaaaaataattttccttaaactaaaaaaagttttcgggaccaataatctcctccataaccgatttttgttcctttagatcagattttaaaattctcactatctgttaaaatattgaagaaaatgctaccgtttggttcccaattcatcggaggacagccaacagcaccaaatttgttgtttattacttcgactacaacaacgcgttcgttcaaattggttggtctttctaaatcccaattttagcagctgctgcgaatatcattgtgtcgaatgtgctttcggttccttctctgaattttccgcagttgccaagtggccctcaacccccgccacagcccatgctgatagcaccgaatattttaaatgaaattaaagctgagtcgtccgccggtgtgagtaacggaacttcagtttggtcccaacacaccgcagatgatggaagaagttactattacaataaggcaacaaaagtgtcttcctggaccaagccggacgatttaaagaccaaggaagaggtcatttgatgggaggaaattcataaggatactttggattgtttagaaagagctttctgtatggaaggagtacaaaacaccggaaggaaagccttattattacaacacccaaacaaaggtcacaacatggtcaaagcccgaagcgctgaacaaagttaagtccattctctttttttgctctggagcacaaaacctattttaagggttcttatcatgaaatcatcaatttgatcagaatatggttaataagttcaaacaaattcctttgtgcgaatgttctaataagcacatcaacttttagcttagagatccaaacatctactccattatggaatgctttatctgaccaagaattaatcaattgttgatttgttcgatctttagtgcttttttgcaaaaataaacctttataaaatcatattcttaatgattgtcatagatgtaatcccagaacattcaatttaagtgtcgttaaaatttagctcggttatagtcattttattcctttcagaacgatattatcttttttcagaaacaaaaacaaagatagaagaaagcgatgcagcgaacgaatcaaagcccgatttggttcatctttcatcgaattccgaaattgaaaaggcaatggaagcgactttaaagaacttaagttgtgaagaaaagcgacgaacccctccaagcgaaagaaattacacaaaaaaaggagaggaggacgattctgaatacaat

SEQ ID NO: 23176 - DNA, 1321 bp, Heterodera glycines
  unsure (1)..(1321): unsure at all n locations
ctgacgcatctgttgacgccttacagacncacacatacaaacacaaccgagcgcacgttgtccatgaccgtcgtgaacgctgattcccgccttgatacaacgatcgcaaatcacctcagcgacgatgagcaacggaacatgcttttgggccacctggttgttgttgttgttgagctgaagtggccgatcttgtgatgtctcggcatcaaagaagcaaaaacggagtggttgttcgtcgtcatcttcatcggtgtcattctcatcatcatcttcagaagcaacgtcgatgttgatgctgttgttgttgactcgcgcagcgcgagatggtccagggccaagtggctgtatgaagcatggctgatcattcgtgtgcggtccggcacaaagacgacagtcatgcgctccctcatcggcttggccaagtggtggacactggtgaagcccaagataggcaacacggccacagtctcggcaaaatcgtcgccactgacaaagcgtacgacgctgtcgcaaaccacggccgtccaatgggtcaggtgcctggttgacaaggtggtagttgaagcagtcgtcgcaggggaagacgaagccacactcgttacaacgacgggcactgctttcaccgtttggcaactttttttttgaaaaaataattacatgattgacaacaaattaatacttacttgttccgacttgcacgggtatccggcaccaaagcggagacagaggcgacacgcaactttgcaccccgaggcatggtaacgcgcatccgcccgtcgctcacagtcaatgcagtagccggggactttgaacagctgctcaatgcgcccaatatagttgtaatgcgcgcgctccaacaaaaggcagagattgaagcgggcggcaattcttcaatatatcattgactaatccactaaaaataattaacatacccatcgcctttgaacactatccggtactcctgctctttctcgaacaccacgagccgaatttgccccactccatgctgattgtttagccattgttgaagttgtcgtacgtcatcaagcgtgtacgtgtgtttgttgagggcgacgccggcattggtcagtagatcagcagcatccgcgccgtgttggtcttgacgaatcgcgtacgcagaaagtgctgcacggccaccgccaccggccattctcatctctcggtctctcagacccagaagcacggcacgcgccaggcaaagcctgtcgtcagggttgatgacacggatcagcgactagtcgctcaatcgctgccgccagtgtcgcagcgttgttctgctcaggtggtcgaagacggatga

SEQ ID NO: 23177 - DNA, 1866 bp, Heterodera glycines
  unsure (1)..(1866): unsure at all n locations
gaagttcagacagcaacataaagcgagatttggcagtcacagatcacttttttccacatacatttccgattatttgtggcgtaggcaatttggaggaccgcacattttttttaatttgtggacccaaatcgcggaattgtatccaataagcacataaagctcctttatttgttatttaaagcaattgtgacaataaaaaagcaaaaaaaactgaaaaatgcgaaaaaaaaagcggatacaaagtccactagtagcatttttcagttttttttacttttttattgaatcgacgtggcagaagttcaagcagcaacataaagcgagatttggcagtcacagatcacttttttccacatacatttccgattttttgtggcgtaggcaatttggaggaccggacattttttttaatttgtggacccaaatcgcggaattgtatccaataagcacataaagctccttatttgttatttaaagcaattgtgacaataaaaaagcaaaaaaaactgaaaaatgcgaaaaaaaaaaagcggatacaaagtccactagtaccagaagccaacggcgagcaattaattttttgaaatgctttttctttctttttctttaaataatgattcttaattgcttcaacgtttttttttgttggtttttggtttattttatagaccaatttgaaaggataaatgccgataaaaggaaaagcattgaaccgaaaatttaacacagctcactcggcataataatagagccataaatctttaaaatgaacagactgtgatgtcatatgtgccattttcaaccaatttaattatatttaattgtcaattgtcaatttttctcttaaatttaattcttttaaaaaattctattcacttaataatagagccataaattcttgaaaatgcttcttgctacatatgatgtcatctgtgccatttttgaaccaatttaattgtatgtaattggcaatgccaatttaaaaaaaaataaaattagctccttttaaaaaatgctaatgtaaaatttttttaattcatttatcaaagaaaattgcttataattcaaattaagtaactatactttagcttacacttttacttaaaatttattagcttcgtaattgttgtccataattggcaaatgttcatttttgtatggtctgaaagccaacaaaaattggcatttatgttaatttttacgcaaaaaataaaatttatttgaaaaattcctttccaatttttttttaaaacctcaaaattcattcaactcttaattgtttttaattttcaaaatttggccttcatattttaaacagcagcagtcttagtttttttttcattcgacacacaaaaaagaacccccgaggggttcgttaatttgccaatttaaaacaaattttcttcatcattcacattcagttttggcctgacgcccagccgccaaccaccatatttgttaaggaggggacggggggctgtcatgttcagcattttgtgtgtcattttcgggcccggaaacgcaatttggccaaaatgagtgtccccgtagaggggggggggggaccatttttatgtgcatacaatgataaatgaattgttggcatggaatgtgaatgtgtgccgcgccccgtgccgtgtgtacaacacacaacgaccacttttctggttgaggacgatgatattccatggcacatttcccagcgctggcaccttcccctccggggacgactgaaattggcacattccgtcctgcgcaaattatcattattanaaatggcacacccccatcattcagccctccgttttggacagaaagtgcattttgccaaacagtatttttttcaaatttgggttggaagtcaaa

SEQ ID NO: 23178 - DNA, 2205 bp, Heterodera glycines
  unsure (1)..(2205): unsure at all n locations
agacaagatggtagagttttaaattccgtctanaatttataattaaattaaaaaataatttttaagattcacaatttttntaaactagagttgcacgagaccggactagtatttgtctcaaaaaaacagactgattttctttaattaaaatagcaaaagataaaagtttatttagcaaagaacccaaatttaaaaaccccaagaaacnaatagaaggaagaacatttaaatacatccctaaagattgaaaatttttagaaatttgtggaaaacacgaattatcggatcatctatgcatgtattaaaatgatttttttccttcttaacaaaaattttatgggtttactcattttttttcaaaaaatcaaaacactttttagaaatttttttcatattttcatatttttatccacgtttcagttttttgtccatatttcatccatattttggattttttttgtccatataaatccggtcattaattatgacaagggatttaatttgtaggctctaaaaactgccaaaataggtaggctctaggctgtaaagcccctaagataggcactaaaaaccttatttttaggtgcgtaaaataacaaaatttattcaaaaaagtaaaaaaaaattggccaaatcagtattaagctaaataattttaaatcaaaaattcttgtgaagaaaataaataaataaatttttgagaaatatttcatttatagggctgtattttttgcattttaaaaaataattttgggcaaaatgacaaaataggaaaaaataggttcttttaaaaattctttaatcttttaggctctaaaaataaaaccctagaaaataggcactattaactcgaaaagtagcttaaaaacaacagaaaaaaaaactttttttttttgtgcatttcaggtcaccgggagctaaagatcatccataaatgacaagtaatacaaggcataggaaagaaaaatacaaaaataaaaataaaaaacgatattgaagaaattataatattttacctggttcgtaattaaattaaaatcatcttcaccaatcaaatatttatttggaaaaaacaataattaattatgaattgataatttagaatttgttggtgcacattatcattatgaacataaagttatattagaatacaaattatagaaaataataatgagaaaattttagataaatcaaataaaatgcttattttaaactaaatgtactataattgaaaaaaaccgctgccaaaaaagcaaccagtgcgtgagaataattaatacaagtaaattaataataaattgtgacatgttttaacattccaaatgtaaaatcataccattaaaaatataatatgttccttgcttttaaaatcttattaaaatacaagcaagttttataagtgaattaaaaaagacatattatgcatgcgtatactcattaaatataaaagtataattatgagattaacaaaagcataattaaaatgttaaattaattattaaaataaatgaattacattgttaaataaaataataaattttcaagtataatttaataaattttataatagataaataatgaaaatgtagcaaaacgatggaaaaaaaataccgagtttcttgcactttttacgttcaaaaggaattttaaaagatacttaaataaaatcaattttatatgaattttaaaatattgcttcctgattctcaacaaacccaagcaaatgtaattcaaagtcgagaagtgctttgttcaagaatttatactatttaccttacaaaataaataacaaaatttcaattaatgttcctcataaatatcaaaaaaatatttcatatattcgggcaaaattgtaaaaaaataactatttattagatacccataagagaaaaaaataatcattagaccctttgctagctaataaatattgacatttaaaaatgaaaaaaataaatttattttaagataaacgaaaataatgataaaaatcattaaaacaatttttacatggattatattcaattaattaactacgccgtgataatagaaaatttaaattttatattaaaaatataaaaaaaatagtgcaaatacaaatcagtaataaaataacaaaattgtttaaaaagttaataaattaaagatttgttattatttaaaaataataatttctgaaaacaaattttttatcataataaaatttaa

SEQ ID NO: 23179 - DNA, 2353 bp, Heterodera glycines
  unsure (1)..(2353): unsure at all n locations
attgacggcaaccagcagagattggcatttgaattggcaggcgtttagaagaaaaatggctgggaggataaatggatggcttttaggtgatcaacaagggcgaccagtcgttgcttaattacgtgtgcagcaaagtcgacccggacgattacttcgaagtcagcgtgtccaacccgtccgttccgttgcccattccgttgctgctcggcctgcttcggatgctttcgacaaaattggactcggaaactgtccttcgcttccgttacattgaaaatgtgctgctgtctctgaacagtaaacactcactgctgaccatcgacgagttccaaaagatggtattggacgaacagcaattccgatggacgattgaacagctttacaaatctatcaatggtatttgctaaaaatatgattagccagagaaagaacagttttttaagcctttgacaacggtgaaatgaattcggcactgaagaggcagctgaggatcagcaaccaactgattatgaacttgctcaggacatcttgatcacagcgattcatgagacaaatgtgtcggcagaattttttgaatcaatttgtcatctcatggttcgaatcgaaaaatgctgattgtgaggtaatggtcggttttactgatccaaaaaataggagtttttgaccaattctgcgaccagttcgggcattttcttgggtcctgatcacgattatgatattcattctatcaatttcgtatcctaaaatacaaatttcggatacttttttattatttcatgtaaaagcagtcaatgtttttgtttcttcaattatacaaaaggcaatcaatatttcgttttttccttttcttatttggtgaggaattgctcaaaaccccattttgtttatattttgtaggatcattaaaactgaccattagcaagaattattgccattacagcaccattttatttttcgatgcgaaccattaaaattataaccattaattttactgaattttcttcgatagtttgcaggttgacagtttggacggccggttgttccatatttttgcttctttttttttttgcacattgctcatacaatgttcaacttttcattattatatattttttttttttgttatccattaagagaaacggcaatccaaaattttcttttctatcattttgaataaattaaaaactgaccgaaaaataaagtaataaaaacccattcattattcgttcagtgccttaattatgaaacagtgcaaattttactgtttgttgaacttcaaaaaattttgcatttcagtttaattcaaaatctgttccatctttccatctctctctgaaaagcatatttatgcacaaaataattaaaaacacagacaaaagaaaggcgtagaaagataataaatgagtgagcaatcggaagtagagaattacgatggaatgttttgccttgggtttgtcttagggccaatttaagcctctgattttgtgggtgtgaaaatgccaaagttaggcaacaaaattccccgagtccgtcctcctttccgtttcggcatttgtgtcacaaaggcctttgccttgtccattggcatcgcgaatgctttcccattttgacaaattgctcctataagtgtccatccgacggcaccactccctttgagccgatcggaactgttccacacttttgggacgggcgcagtcagctgagaaaaggggggggggggtaagggggtcagacggaaaagttaattgactaattaattgggggagggatcagacggaagttaatttcggctaattattcgctgattggtgccttaccgccgtccactctcagtgagtaaatggccaatggcacttttccatttgcactttcttccgtcgcgcattcgtaagtgccgtccatcgtttcgcttaagtaaaacaattggaattgaggcgtttgttgcctttttcacgttgcgtttatcagcaccaatccgccgctcatcgaatgcacaaaatgtggcatttcttcatcggatggaactaaagacaatttaaaaaacaattaatcaattcaattgagcatttggaaagtgtcaattagtcaatttattgatcaattataaaatgattaatgctctctccctttgtctatgtgtctctcccccctctctttctctctctctctttccctcaccgacaaatcctttcatttgctcacttttccgtccgttgtgtttccattgtgccatttgtccttcgctcggacatttcaaatggacagaatcgccgggaaagacagtcactgccacagttttcgtatattttgcgcaccgttcggtcacttcngtcggccgggggaagggaaagtcgct

SEQ ID NO: 23180 - DNA, 1724 bp, Heterodera glycines
tttttaaattttcccaacaaatttttttaaaagctttcgtttttaagggacattttccatcagcgtcactatagaagcggctttaccgcctcatttcccattcatttgccttacaattgccacgatgacttccactgttccacaaattgtgctccgtctgttgctctttgctgtcctcattttgaactgcttcgactgttgccatgggtaagctttcggatttggaagcattttgcctcacttttttgcttatttctcggtcaattattttcccatttttcagcagagttcattctaagtccagcacagttccaacgactacgaagtccagcacagttccaacgactacgacgaagtctcctccagctccaaaaaaaggaagtattctcgacaaactcccaatttgggccaccattgtcatcgccgttttaattgggtgagtttgtctgctgcttttttgccgtgccattttcctccgtcttcaatttgttccccatgttcagcatggtcatcgcaattggcattgtttgctgcgcgtggtggtgctgccttcgtcagcgatatgttcgccgttctgcaactgatgggccctcctcgtcactgagcgacaccgaaaagtcaaagggcggcggatattcgtcgaagccgagcggattgatgtccaagctgcctttatggaagtcgtcgtcctctacgaccaaaaccaaaatgccggacagtctcaaatcggacatacaaccatcaagggcatcatcatcaaaaacgaaagacaagtcttcgtcaacaatcccggacagcaaatataccatgctgacgcagaagcattgaacggaacggcgcggacggacggacgatgatggcattgttattgatgatatcggatggatttcatatttaattgatgtgtaattatgcataattattgtattgtttttgcctgccattttcgatgctcacacattcatttccttgtgttactctgttgtgtatggtattataattattgtgtgttgtgctgaatgctattattacctattaatggtgttgatgaaactgtgtataaattgccttgaatgcaggggtggagcgcgcacagaaaaatgccgcggatcgcgcattcaatttgccgcgaccgcggatcgcgcaaaaaaaaatgccgcgaatcgcggtcgcgctccagccctgcttgaatgaagaagctcagtgatgatttaattactgttttcgttaattgatggttgttgcaacttgaaaaatatgtttcagtacgtttttgctccaaattcggttttctaaaaaccattacaaatccggggattatccaattttcgtagattaactgtttcaagatttgttccgtttcctcaaattgcgtttgcccaaaattttttcgtattttttgtcgattttcggtaccataaatgttaaatgtaaatgtcgctaatgaattgctgcgtcgaccaatgaacagaacattaatctgcgaaaatatttgctgcgtcgtcattgtaacttgtcccaattaaaattgttgaaatgagcggcggagtcagttactattgggtcataaaaacgatagttttaccatttctggcaatttttaaaatttaaaatttgtttaaatgaattatttatttatttcggcactttgaaaatgaatttttttttctcaccaacacaatttgcattgttagcagtcccattgggatttcattctgtggtct

SEQ ID NO: 23181 - DNA, 1730 bp, Heterodera glycines
aggaagtgctcaagctgtccaggagccctttgggccttctcgatgatgccctgtgcagttgatcgcggatggtggcatcgtacttctccagaatttgtggagaatgtcggagcttggttagcaccgatgacagcctgctgtgggccattttgaaattggaagagaggtccggattggactccttccacggccatttgacagagtaccttccgtctgtctcttgacggattgatttgttaaacagctccatagctgtttggtcgtcatcctgggcaggatcatcctggattcccagtgattcgaggttgaagaaatgctcaacctcattgatggttggcatttgttccacatttgtgctgtggatggccatcatcgaaagggccttttgacttgagtttggcggtccaatagtggactcgccatttaccagcgggctaaatgctgtgttgatcacaaacagcccgggagacacttctctcttcccttggaagaattgccagaagtgtcttgcgctgaggagtatcattggctcctcctttgtgaagcacattgcttcacaagcttcgtgatgattcgtgacggattcatcggcgctccattcgaccatgctgaagtgagtggagattttctccgtccgattgagtagaatttcctcccattttccgtccgccctttggagaaggacggagtaaatgggtgaatggaagagtaacggctcccgttttcctccaaacccgtggacctccatctcttcggaggtgagtttgtgcgggcggagcttatcgataagcggatccgctccgtacgttgtttggcttcccgggtcaaagagcactgcaactttgattatattccggctgtcgcgacttgacttagccagcagccgtcgcgtcatcagatacgcgtgcggctttttgcacttgggaaccttgttggctctccctttgctggtgtccacggtggacatccccatggattgaacgatctccccctctcttggtggagggtttgactgatcgttctgttgaaatccagccgtgatcaggtgggtttggctttccacctgccgctgagggaactttcgccctcctggctctcttcccgacttgggggaggaagcggaacgattcccatttgaccgtgaatgggactcctccctcttgaagcatatgaggaagtggtgtttgttgccacagtttcggcaccggtatggtgaggtgcactcctcagtgttgtgaccttgcacaaggcagttgaggcagcgctgctgttctttcagccgttttcgacgagctcccggtgttgggaatgccgggcactcgctcgggagatgatcagttcccgagcagaacgagcaggaccgaccccattttcttgctggggttttggccctttccggatttttgttaatagcggagaacgccctatattctggctgaggcgttcctccgcgattaaatggccttggtggttggctctgtcggttgttggagtgacggtggtcacccctttgattccaggcacccctctgttgaggtggggaattgaaggcggatgaacgtggtcgttcatcgcctcggaggacatgtgcacatctctgcacttcctcctttacttccactattgcttgaagtgcctttctgatgtcaaggcacgaaaatgtctttcctgaggaaagctctttctccgtcggcgtgggtgaggatggagaaaggaagcttcgacttgat

SEQ ID NO: 23182 - DNA, 1189 bp, Heterodera glycines
cagttggccaccgcccccccccccccccccccgaaatgaaaaattcaaaaattttacggtaaaaattggcaatttaaaaaaatttaaatcaattttcgtaacaaaatgcataaaatttgaaaaagccgaggggacacccccatttgaccgtagttttttgaaattttgatccaaaaaaatagacactttttgccgaaaaacggctacaaattcctgttttttttttctccgcgttgaaatttctaatacaatactggtgaaatattttttggccaaaagagaaaaaaaaagctcttcggttacccctcaccggacaaatatttttctggttacgggcctgtggctttgatcaccaccaccacaccacacacattttattatgatgattgaaattatgtgttgtttgttgttgtattggaagttttaggtcgaataaaaaagaaataaaaataattttgtgtgttgtagaggtcggcattttccacacacacgtgcgtggcaccgaccgtcacgggcaaaaaatccgtgtgtccaaataaacagtggaaaattcattcttcaccaaattcatatttattgcttgccccaaaccgattgaaatgtactgaaatggccgttcgtaaatttccgactttttgttcgaattcatgtccggcgttagaaatgagtcgaatggatgtgttattcgtggtcagcaatatattttttttgccccaggaagagaaattttcaaacaaaaaatttgtttcgaaatattttttgagagttggccattcaatcgctgcagcatttatattttttgaacacctagttttgtcagaattttacttgtcaattcggcagcatcattttttttttatcaattacatttacctttatttacatataatggcgtaatccatgaaaatttgtaaaccaaaatttaaaacaaataatattgcttttttattaaaaaataatcgaaaaatacaaaaaagtgcataaagcaaaaattaattaatgtttataattctttgttatcctcaatccaatcagtttcttcttccttttttacacttttcaactttctttccactctaaaaattgtaaatttattaaaattaaattgttttttaaattttaataaaaatgccattacatccaattcatatgctgaacaagcagtccttttgttaacatggcttctcat

SEQ ID NO: 23183 - DNA, 2783 bp, Heterodera glycines
ccgataaataaattaagtgatattggacaataaaattaattatttaaaaataaataaattaggatgggaaaaaaacttttccaaaagtaggtcatgttctttaactgaacataaagataaagaaataatggtccgacgaaaaattttaaaataaaaataataaaataagacgaaaaaattaaacgtaaagataaattaaaaaattgaaattttcaagtgatggtgttccgtaccactcgccatattatatatatatttgtttcgcttttattttttttcgctcattttcacattagccaaatttcaattaatttaatttttttttctttctcattttaattccttttgtccacaatgcaaaaataaaataaattaataaataaaaaaataataataaatataaaatatatttcacatcatttcttctaattaccatatatactgcattcccaaatccaatttttgagtactgtaaaatccattttcaaccttttttaaatataactttcactcgcatttccatatttaatttgttgacgcaaaatacatttcccatcattttttttctcattttcactccgcatttccaaatttaattattgacaaccgtaaaaatccattttccacagttttctaatataccaatttttccagtttccaacgaatttttcctctcttcgccatatttaattcggaaatactcaaactataaccagcaaattttcaattagcaaagtactaattaattaattaaaaaactaaaaatcaattcaacaaattatttatttaacaaataagtgtaatttaataaaaaaattaacaaataatcggcaaatgcttactaaagaccactaacaatagtggcctcatcaaacacagaaatgcgcttacggtcagtgagacggcggtgacactggtcacagtgaccaacagttttaaccggcacaggacggttacagcgaccaacaagcaggacggacaaaacaaaaagcacaaggacaaggacaaagttcaacacaacagaggtgtggaaggcccacgctggccaaatcggatcgtcagtacagtgcggcatgtcatcggcacacagaatgggctcctcccactcttccaagccaaaacagcgccgactgcaattgtggcccgaacagctgacgcgccacagttcgagcttctcgatttctgttaaatcgcttaataacacatgctaatctctttccccctcgtctctcttctctcatttttcccttttctctttctctctctttctcttacactatttcccaatgtatcgtaccgtacattcgctattccatttgaagtgacagccgccccatttttgagcccaaatattgcgaaaatttccccattgtttccccaaataaaccccctgacggaaagggcccattcctaagggtggaaaaaacaaaagcgctcattaattaacaaagggaaacattttgggggagtaattaaatcacattttttgtcccgggacataagcgaaacacaagacaaggatccgaagattgaagtaagcaaaagggtcattaattggggtgcttaatccatcagaggaggaaaaacgaatttgacaaaagaaactgaggaaaaactgaggaaaatcgtaacatttgaggaaaagagaaataaagattaattgaggagaaagacaaaaggcaattaaaggagtcgggaagaaactaaaaacggcaaattggcgctaattggctgacggatcatctgactgagaacacaatcgacaatttggcactaattgttgtctgatcaattgacacatcatttgactcggcaaaaattttcgccaacaattcattcctcgccatttgctattttttaaattaactgcggatcacccactaccacttcattacattctcatcaccaaaactacaaatttcttaattcattaactgatcatcgacaattatattcttttattcgaattcactttaattcgacaaaatttcttcgagcactgaagaagacgacccaacacgggagcgaacggagcgtgagaaaagacattttgaactcaatcagaaaagggaacttcatcggatggaagtggagaccctaaaaaagagggtctcgactttagagcgggaattggattcgatggggacagcgcgcacctcagctggcttgccacatccggggacttttgacggaacagcggactttcacaattatttaaaatcttttaatcttgtggcgacggcacatggatgtacacctgttcgatgtgcgcaaattctaccattatatttgcgcgggtccgctcgggctatttacgatggattgctacaagacgataaatcgaattggaagacattagtcgacgcactcgccaccaatttaaagaaggtttcatccagccttgttgcgcggcagatgctggcaaaacggaagcaacacgtcggcgaaagcttagacgaatttgcccaagagatcaggactctagtatcaaaagcgtacccggatacgtcgcttgaaatgaatttcgatgcgttagtacttggagacatggaggaagacgtgaaaagggaacatgacgagcgactaaaaagattcagatcgggaattgccaaggattttttccgctcgaacatgacggcatcaatcaaagaaaaaattctcttcatggatgaacctcagtcatttgaagaagcgatcacacaggccaaaagggttcaacaaatgcagggagcgttggcagaagatctctggaaacaaacacaaggaaccaaagccgaagttgc

SEQ ID NO: 23184 - DNA, 1016 bp, Heterodera glycines
ttcaatcactgggactcaacccaccagcatttcaatcactgggactcaattcatccaacatttcaatcactggtactcaacccaacagcattccaatcactgggactaaacccaccagcattccaatcactgggactcaacccaccagcatttcaatcactgggactcaatccaccaacatttcaatcaccgggactcaacccatgggactcaacccacaagcatttcaatcactccagaattcaatctcaccaattcttcgaaacccaataaccggaaatgaatgataaaaccgacagcggctcgaccgcttagcggcctcgcactcttcttttggcattttcttatggcataacagttcttccttgtttcttgacattttcttacgacacaacatttttcttctatacaaatttttcaaccaaaatctcattcattcatttaaaaacataagcaaaacaatacctttcatatcaaaatcaaatcactttaaacacaaacaaaaaataaagaaaaagaaacatttttaagactgttttttacacaaactgacaaaagaaaaactgtaaaacaaaaacatttcatttttcacagcatttatacaacacaacacaatgttaatattataggattttcttactgaataaactaaggagtgtcctctttcttttattaaatattttataaaataaaagatgggatataaataaggaaggggtgcgagacaaattcactattgtctctcccttccatttcttttctcttatttcttttacttttccacttactctctcttttttcccactccctccctctcccagcgcatccagcagactgctgctgcacagcagcagggacacacgcgtttcggcgccgcgcgtttcggcgccgcgcgtttcggcgccagcccagtttttggactataacttttttctttgtcaacgaaatcaaacattgttggtatcattcgaaagctgtaaatgtcctatattagcctacaaaatttgaaaaattat

SEQ ID NO: 23185 - DNA, 1047 bp, Heterodera glycines
  unsure (1)..(1047): unsure at all n locations
tagcttcaaaatatatatttatgcatattgaaaatactttttttcatatcattgaatttgttaagcgataatgttactgatttagaaatgaaagtaaatatcattatgctacaaatgaattttcatagaaaaataaaaaaaccaaaaataaattgatttataattgaagaaaagcgatttaaaatttttattcaagtcttctaaaataatttaataagtgaggtgataaataattattaaatgtaagaaatatttagaaaaatattaatttctgctaaatatatataaaaaataaactttttttaagaatctttaatttaaattaaaattaaaatttttaaataaaaacctttttttaattggaaccaaataaagaaacaaagaatattatacatacttggatttttctaaataagtatatttattttatcaaaaatttttaatttaaacctcgagacttcttagcctgcgtcaataaattagttatattatgttgtatgttttttaataattaaactatttaaagaagcagagatgccatcatcgacaaattttgataaaacgttgaacagacaaaaataaaacgaagaaaattgatttcattattaccttaaatctttaaaagcaaaatacttcatttatttgtttcaacaaaaatagaaaataataatcatttgataacttaagttattattttgtcaagcataattacccttaactgatcaggctcaagaaggcgccgccccgaccgccagtacttcaactgccactgcgtatacacgataattccatattacaccataaatactttcaaaaatatgtatatgtatatgaatttatttatgcatagtgaaactaattttatccatatctctgaattcgttaaccaataatgttagctgatttagaaataaaaataaacattattatgcttaataaattttaagaaaattaaaaaaccaaaaataaattaattttanattaaagaaaagtgtttaaaatttttattctaattattctanataatttaataatgttaatgatacg

SEQ ID NO: 23186 - DNA, 891 bp, Heterodera glycines
  unsure (1)..(891): unsure at all n locations
gaaaaatccattttaaacaccaattttttgtgattttaaaatttttgagaacctcacnttagagaaatttatttcaatatttttgttattttatgtccctattttttgtgatataattaccgtaaacatatgggaagagataaaaaaaatgatttctgcaaaattatttgtcggttaaatatagcacattatttgttacataatgcaaaaaattccatggtcaatagagagagtttcagaaaatagacaattttttaaagttcattttcggggaggagtcgtagagcaatcattcaaatgcgattatgtagcaaatttagtgttcttaatgataatcgcattcgagttgtcgaaaaagtttttcccaaccttcttggatgtgattaagcacctataatttgttacatttgttaaagcaatttggttaattttgaaaaaaaaacataaaaatatctttcttctaccttttcagttttagtgcacttacacatgaattttacagaactctgtcaatatttggagttctttgattagattcttgtacttgtaaattttttaaaattaaaacattgcaattggatatacaatcaaataatataaaaaacaaatccacatgtgatataagacagtgaaatcaaatgaaattaaaataattagcaataaaatattttggaagtatatttggaaaagaataaattttaaaatgtttaactaaaaaatgattactaaataaatgaattaacgaaaacgaatagataaagagtagaagcaaattatgccagactaattaactgctaaattaaataaataaaaaaggctcccggaaaatgcatcagttgacgcattttccataagcgaaattaaataaaatatgatatgtgaaatatagag

SEQ ID NO: 23187 - DNA, 1312 bp, Heterodera glycines
cgggaccgggaccgggccgggaattcccggtcatccgaggtcccggttcccggtcccgggttttgaaaagctcaggccccggtcccggtagggcaaccgggaaccgggaaaaacaagcactggtaagaatgggggtctgagtgaaaaattagtgaaggaaattggagtcaaagggaaaaatttagaaataataattaaatatattcataaagtagcaagaccaactgtgccaatggcctaatggctagtctccttcactttcccttcttctttcccctggttcaatccctctacagaaatgaaaatattttgaaatttctttttatatatactcatggctttcctatcgacaaaatatgattcttaatttttttttaattgtattttatcatttttaaagaaaatccgtacaaattgagcctagtaatcccaaaaccagccttttttgttgaaaatctgttaacaaatctcactcaaattttcaaaatttcccccggcggaggcaatcggagaaaattcttaataaaaatcggatattttcctgaagaaaagcaatttaaatgaaaaattatagcttttattaaattattactaattattaacgggaaacttattaaaatttctaatattcaatctgtctctcttgctttctctcactctctctcatctctctctaaaagggagtcccaggttcaatcccacctgagttatatatttaattaagcaatatttcacatttttctcaacgaataaagaaaaaataattaagtcatattattctaaatttttttaagtaaatttaaaaaacaaaacaaaatttgatcacccaataacatcaatgacagcgtcatcttcattttcaccatccgaatgctccaaaaaattgtcgttttctttttggtcttacagcctctaaaatgtttaaaattcaaatcaaattcaactcgtcaatggccagcggtggcggggtcgtctctccggtgtccattgacgcagttggtgttgtcgaaaacggcaccaaatcgccgattggtgtgacagatgtcgatggcagcgaaaagccaaattccaaaatttcgtcgtccatctcgggcgtccgcactggtcctggagttggtggcggcgactccatcgcttcttcggccgatgcagcagatgttaacggccctgcttcgtcctgcggtgacatttcggcattgggattcagctgtggagcggctgaaattttaaaaaatgatcttgaattaaaattagtgaaaaaactcacttttgttggcccatcgggcttttgtcgccttgttaattcctgaaa

SEQ ID NO: 23188 - DNA, 2562 bp, Heterodera glycines
tcgaaacgcccaaagcgacgaagagccgggtcaatgcaattgggacgatttgttgcaccaatgacaatgacattcgagcgctgcttcagtccatccatcaaagtgagcaattgcgaaacaatgcgacgttcaacttcgccgtgtgtctaaaaaattaattcgtgtcatcgatcaagaaaaccctcttaatcagggaggctgcagtctaactataaacattgcaaagaaaatgggaaaaccttttctcttttcggggcaattgcgtcaatttcatcgatgaaaagaatggcaggcgaattcttctcgcactcggaaaatgctttgcgcaaattcgactccgactcaccagccaatttactcattatttcaggtcctaaattacattgccattatttacaaaaaaaaatctcataaccattgagcaggaaaaagaatgcgccagtttcattcgcgacagcacgggccacaagtgtttttccagtgcctggcggaccgaacaaaagcattcctcggggaggtttaatgccgatggatttgaaaagcatcgggtggcggagcgggagttcaaccatctctttgatctgcgccaactgcttgcgcatcccgccaatgtcatcatagccgacgtcgttcagattgttctcctcgtcctcacgtttgatcggttccccctcacaatgaatgatcgttgttgggaccacaatgcaagcaggcgccggatcagtttcaatcacttaaaggagcaaaaattgtagtttaaaagggaaacagcatgagtaaaaccaaatattctcaagtttaaacaatgattctctaactttttaaagtctgatccgtcaacacagttagttaagtataccctaattttttcttgttttaaaaaaatctccatagtggatgtgatctttttatgtttgaccaggtcccggggttttattagattaacataaagtcaaaaaacgtatcttaaactcaacagttcgcattgctgcgttgacagtgaacgtgtcgcctttgtaaaccggacggtaggcctccaaaaagtagggcttaagaaacacctcgaacaagtttcttaagcaaaaagatagggaatatcatgtcttacaaggcttacccggtcagcccctcaacggtgtcatcaatcggaagcacgtgaatgcgcagtccatttggcgtatttgaagcggacgacacactgacgacatcgcccagtttgacgcggagattctgacgcacaactcgattcatcaagattttctcgggaggacaagtgtcactggctgaagagattaattaatttcacgtagaaaatgaggccggataacctatgacaatgctagttgtctcacgacgtttttgcctttgagaaggatcgaatcgccgcgaaacaatcccaggtcatccattttagtctaaaggccataattagactaaataacgaataagtttcaaacctgtgccattagaacgctgctgttatcgtctttgggcgattggtccacaatgagtctgttcggcttcggcattttcttgagaatcctaaaacgtcatcaattttcaactccttagcatttttaaaatattacgcagttgccaactcctcatttcgtttcgttttctcatctttttgagttggaacagaagccattttgagagtctcagaaatatcgctaaaaaggtaaaaatttagcttattgggggaagaaagtcaaaacgaaaaaacggctctatgaaatttaagtgagcgtccaagtctcgggaattaataaatacaaaaatttatggcttaagaaactgttaaaatgatagtaagcaaaaaaagatataattcagcttatataaacacaaaatcatctgcaaaggcacgacattgtgtaaattcaattgtcatcatttcttttcgacgatgtgaaaaaaacgctaacgctaagtgttttgacgtaattaataacagaacgccaaataaagaaattcaatataaatttaaaaaaaaaatttaaaaattgtgttcgattacagtagttaatttcatagtaaatttcaatatctaattgtttatggataagaaaaagaaaatgaattttattttcatttttccaattaaaagtggaaaaagtacaacgaaaaataaacgcatttaaatgataaaaaattgcactgacaagaaaaggcatcacagaaaagttttttaattgatcataaatggacagaatatcatatgcatagactggcgtttataaaataaatagacgatgagcgaaactcgaggtcggaaaactccgttcttatttatgcccaagagtttcgccacccatcgacgacccgaattggtattacaaaacacagtaggaattgtgagtgactgatcatttacagtaagaattgtgatttatgagtgagtgactgtgatcatcattgaccaatgcaaaatgtttatttatcccttcgctcttttggcattagatttgattcttgtcgtttgtgtcgatgggctgtggtgtcgtcatgttgaaaatatgcagtgcattggacgaatagaagaaatatttgctgggcatt

SEQ ID NO: 23189 - DNA, 848 bp, Heterodera glycines
aatcatcgggactcaactctccagcattcaatcactgggactcaactctccagcattcaatcactgggactcaactcaccaacattacaatcaacgggactcaactctccagcatttcaatcactgggactcaacccaccaacattccaatcaaagggactcaacccaccaacattccaatcaacgggactcaaccctccagcatttcaatcactgggactcaactctccagcattcaatcactgggactcaactctccagcattcaatcactgggactcaacccaccaacattccaatcaacgggactcaactctccagcatttcaatcactggactcaacccaccaacattccaatcaaagggactcaacccaccaacattccaatcaacgggactcaaccctccagcatttcaatcactgggactcaactctccagcattcaatcactgggactcaactctccagcattcaatcactgggactcaacccaccaacattccaatcaacgggactcaactctccagcattcaatcactgggactcaactctccagcattcaatcactgggactcaactctccagcattcaatcactgggactcaacccaccaacattccaatcaacgggactcaactctccagcattcaatcactgggactcaacccaccaacattccaatcaacgggactcaattctcctgcatttcaatcactggggctcaaccctccagcattcaatcactgggactcaacctcagcaaatttctttagcatttttaactttttgtgtgccttgggatgttgaacagttggggagggctcggccgcttcgcggcccggtacggg

SEQ ID NO: 23190 - DNA, 1859 bp, Heterodera glycines
tttaattttatttattttttatttatgtattttgttaattttttttattaaacaatttttccttttccatcgatttgaattttcattaaagtaaacgcaaaattatttgttcaattatgtattaggtgtttacaataaatttccgtttgcttttagcaaaagaaagaatttgataatgatgcattccagccaaaattcagcctctaattcctaccagccgcagcagaacggcaacaacattcaccaaatctccgaggggacgacggccacggcactgcccgaggcgatggcacacagtcagcagcagcaaatgatggcaccaaatgtggcagtgatccaaaacggaggcggcatcaaagggggcgaagaagtgcgaaaggagtcgacggaggaggacgagtcggacgacgaggagatggacgacgaggacgtggacgacgacgacgacgatgaggaggaagaagaggaggaggaggaagagagtgggagcggagaggaggcgaaccatcgtcggcacggcacggagagcggcgacacggcgacgaccacgccggcaggggccagcacggaggttccgctggcggcgcacatggcgacggacgtggcacagacgcaggcggcgccaggcaacgcggcagcagcggcaccgccgacggggactgaactgctggccatccgagcgaatctgcagattctgaaccatcaggtggtgatggcacgatgggatgaataccaaggagtggcatggcacaaaaaaagcgtacaaatggggaagtcggggctcattcaactgagtatcataagctacgcatcaaagcaatcaaaatggaattcacttcgggattcttccatgtgttccaatttatgtcatccttggctagcagtctgatatttcgtcgcggggaaaaattcaaaaaaaattcaaacccaggcttaattctttagaattttgtaatttctctgaagagtgcaaatattaatgaaatactaaatttaaacgaactataaaatttttcccgattatttgagttttttgggatttgtaagaattaggctgacgtgaaaacttaaattgaatttttttttcccggcgacgttttgtcttggaaacttttttggattgaatcgcatgaattgtgacagtttaatactgtgcgatgtttgatcaggagatgtgtccactctttgtccagcactaatcactctcattgcccccccccccccgtcagatggctcttctgatgcgtgcgcttaacgtcgcgccgtgcgcctgtgccgagtgccaagacgcgcagcgtgtgcagcactgtgtggcactgcccgtgtccaatggcattgcctcgcagcatttgcaacacgccgctagacttggcaacatgcacagcggcagtgccgcgtcgtccttcgcgacgcccggcactcagcaacagcagagtctgttctccgccggcggtgccgacatgagcggaagcggcgcggaatcggcaccgcggggccgacgctctaaatactgcacgccggaggagaaaaaggtgtggccgaacggatgaggctcgcccgggggggcttttgcccgtctgtgccattctcggtcgagttcaaattttggcaattttcttggaatttttgaacagatggaacataagtggaccgagcgtgtatgagaagcacctgcatctctttcatttaacataatgagcgacaaatgacagatgggtttctccattagcggtagtaaaaattagaaattacctctactgtgtccattaaaattatggacaaacgaatcgatgaattctactgtaattacagcatgctatgttcagagtcagcggtgtgacgcttattcactatgccac

SEQ ID NO: 23191 - DNA, 1234 bp, Heterodera glycines
  unsure (1)..(1234): unsure at all n locations
ctatacanttttgggcgctaaacacatcccgaagacctttaagagagagaatttatggatacattcactgaacaatctttggtggagtcatgctgagtcagttcgatttggcaattaaagtgaagagtcggctgaacggaggaagagggggaaaatagcataagaggaagagagagaggagaaaggaaaagagaaagtggaaaaggaaaagcgtaggaagagaaagaagaaataaggggggaaaggaaaagcgtaggaagagaaaaaagaaaaagggggggaaaggaaaagcgtaggaagagaaagaagaaaaacaggggggaaaggaaaagcgtaggaagagaaagaagaaaaaggggggggggaaggaaaagcgtaggaagagaaagaagaaaaaaaggagggggtgtattatggggaggaaaaagctcgggggacagacaaactttgtcggcaaatttgaacacagacgcactctgtccggcactcaaatcgcccaaataatctgaaacacaatgaaacatataaaatcggaaaaacaattgtgccaattcatctccaatcacccaaatctctgatcagcagtccgtccaccgcacacccgcgtttgtccaacacttccaccgcttctccgccttgtccatcggacaccgtacacgaatggaccctcatacagtaagtcggtgtttcgggctgacaactccaccggtggtacaccttttggacattcaacaagtgctgctgctgcaactaacgcccaactgtgcttacagtatccccaattttgacaaatcgaattggctgtccgttggcgtttatccaaaggatgtcgtatctgcaaattgagacggctccttctcccaaaatgccaaagtgcacctgcaacttggcattgtgtgctggccttgaatgcttgccgaagtgctcagttggccgacctccaattgttgggccacccttttgtgactttcgctgtaaaagcaattcaaacggaaggcgcggtccaatttggtgatcagaagctgaacccagcaattgttcagtccattttggacaataaatgcccacggggtgaaaagagaccacaacaacggccgccacacttacgccgctgacctcgcgactccgtctcagcccacaccgttcgaattggacgccgaatttaatggctgtcgttgtgccattgccaagagaaggcactgaaattgaaaaacaaaaaaacaatggaagggat

SEQ ID NO: 23192 - DNA, 1019 bp, Heterodera glycines
  unsure (1)..(1019): unsure at all n locations
agcaggttcctctcatttcttcctctcatntcttcctctccttccttcccttctcttccctttcctcccttttccggcctttccccgccgctttccctcattcgcttttccttctccctctcctcgtcttccttcgttctttgattatttatattagcaaagccaaatttatgcactcaatgctcacaacttcgcccgaaagaatctcaataaaaatgaatcggagagggcacagaaaaagggaaaaagagacaaataattacagagagagagagaaaagacaaaaagggaaaagaatgatgagtgaattagcagaagaaaggcaccgactaactgaacataaaaggcattagcagaagaggaaaagggagggatcagctgagaaaagccaaaaaatcgcgaattaattaattaatttattggttaattaacagaaatacaaaaaaataaaaaaagcaaaaatccaaatgaatctgattgatcacagaaagtcgtcgtgttcctccccgatcagtgccattgtcgtcgtgtgttgccaaatgtactctctcccgcctttgcctttgttcattggcactagcattttgcccccggcactgtccccgctttttggcgaattccccgccgccattccccgcgcagccccttcgccctgtgtccctttcggatttgtccgttctttcaaaggttcgctggcaatttggccattttctgcggttgtttttgcacttttaaatgactgttgttgagctccaaaatgggccgagttggaggcggccgattcgttaattgctgtggtcaaagcggtggcctcaaaatgactgaaacggaagaataaaggcaattactaattaattagttaattagccacccattaagacgcgcatttgccaacgaagcgcacaaagggaagtgatggagaagacaacggacgggcgacagagagagaaaggcacggcaatactcggaggaggccatgcagaagatgaagaagttcagacagtggttcaacacctcgg

SEQ ID NO: 23193 - DNA, 1919 bp, Heterodera glycines
  unsure (1)..(1919): unsure at all n locations
ttaatggactttttcgtttatgcnccgcccaaaaaaatcatgatcccgaaaaagaagacacactttgncagcttctgtctttttaaattgcactgaataaccccaaaccccaacgtattttaagttaaattacctcgcttccttctgtggcagagccataccacaaaagaaattgccaaaatgacgacgacgacggcgccgacgacaatcccaatcaatatccctgtttgggttgctgttggtgttgccgtcgtcgttgttgttgtttccgccgtcgtttctgtgccgcaattgggctcacagccctttgccgctgcgttgttgccgatgttaacgtagtcggtatagcggtcggcaaccgccgttgttgcaaaaagtgccaaaaaaagctaaaattttaatcatattatggatgcagaggtgtgtctcccccttaaaaaaaggtagcgaaacttacaatgctgccgagaatcggcgcaggaagaagggaacatacaacaatcagaacttccacacaattgaccaaaagcctttttgctaaaatataatccattaaaataataggcaccacatttgctaagaatattgcataaattttcatggccatcggcaccgcggacccaattggacgattagtttttttggaaaatagacaaaagtgatttttttggcaaaagagacgttctttttcgccccatcgctgaaaatttaaaaaataccaatagcaaaaaaaaagctccggtgcctcctcgaaatttttttttgatgaaaatctgctaaaaatggctcaaaatcgtaaaatttgtcatttactctccgccctggctacgggccagtgatttgtgtatgttttgcgtgtaattttttaattggtggggtagattttttttctaattcggccaggtgcccagctaattgtaagccgttccatttcaacccaaggacctccaaaaaaaacatgtccagcaaatttctagccaagtgttctatgattataaatgcatgtaaagtgtgccaaaaaaattattgccaaggaaaatgacaaaaacaaaaaaaatgcacttacggaggctaaacgacacgcgcttttcccgatgcttctgctgttgttgtttgtccttgtcatttccaattggaattctgaaaatttaaaataatcgtaaaagaatttttgaatccaaaaaatggaaagggagtggtggtgcatttgtagatcattttttgcattattaaaacgaacacaaaccattgaattaaaaaaaacgagaattcgatcgccgcccaaaaaaaaaaatattttttagtaagagttttaaaaaaatctcgaaaagtttaattgtaagatttaaaaattccatgaaaatttttttggcgtacctccagtacagtgtgccgccctttgacagaatggccgagaaaagcgtgcagcaaaacatgcgttccaccggctccggcacgtccatcaacggctcaaaaaatgtgtcggccaattcatgaccacaggaagtgtccataaatgagccaacctgacaagagggatggtgagagtgttaaaacaaataagcaaatttattagcgtatttagtaaatacagaaagaatattgtttcccgtcctcataggccctgaaattttagggggaagcctcaaaaaacggaaattttgaactgaagtaactcatgtggccgggttggttaaattcccgtttttctcatcggggaacatgggttcgaagcagcctgactgcagaaaatttttacgcatttatattttacagccataaattggtctctattggaaacaaaactttatttaattntttttcttttgtatttcaactgacttggcccgactgtgtgagcacaacggcacgcaaagcacatgtttcaatgtccccaaatttttgtgttttcttaaaaa

SEQ ID NO: 23194 - DNA, 1857 bp, Heterodera glycines
  unsure (1)..(1857): unsure at all n locations
tctagagtcctcttcccggaaaagccttcaagcgccaattgcctccttctaaggacgacggnattttcgaggagggtttcatcgaagaacgccgcaagggactggaacagtttctgaacaaagttgccgggtcagtaccattgaaatgctcttaaaagcaataactttctttttagacatccgttggctcaaaatgaaaaatcgcttcatatctttttgcaaatgaacgagcttgacaagtgtgttttactggttttattagtcagcctttttccattcgacagaaattacgtcccgggacgcattcgtacggcctgaccaactgacaaactctgcgaatttgccgtttgcccattctcgaccgattaatgtcatcggtttttccttcgtctttttttgttggctcccgccctcatattattattttattgacttatctccaacgtcactttctgaacattacttacgtcccccctttgccaagttaaagaaagacatcaatataattataatattatcgaatcctatacttcatttatacggaatatgaacagtgattgtaagcataaaccatatctggtgtacacagaatattttatttgaataaaacaaaggcaataaaagccattctacaattttcgaagaatcctaggggattgaaagaaattttctctaaagaattattaagcgcaaccatcagaaagaacacaaaataccaatgtggtacgaattcgaattcttttatatattgtcgttaattaataaattacaaattctgaaaggttcaaattgtgctcggaacattcttatcagcttctttcttgattttttccgcgtccaacttgcgcaagtgttgaagcgctctctttgctgctgtgcatttggcgatgcgatagcccctgcccattcccgtgaattgcaaattgtcattgaccgttacctggaaatttaaagctttgtgcccagaccattatagagaacagcccgttttaaacagtttttgtccttaccgtcactcgaactttgcccgtctccaatttcctttccaattttctgaaatgaaaggacaattaattgtaaattgctatgtgcgcttacgcaaatttggctttgcaatttttgcgctcgaagagttccctgacgggcgactggggcgggttggtacagcacttttctattacttcgtgcatcagtccgtaaaagaccctccacacaatgtccaagtccatgccacagtccaagtaaacggcgcccgcgactgattcaaaaatgtcacccattgcctttggaacttcgacgtcttcctcatgcccttcatcaatctcatcctctgtgaccataaatatctgaatgtgaaataaattgtgaattttttgtttgtttaatatctaatgaaaatgggaagacctcatcatcaaaatttgcacagtgcagaaaatccttctgcttgcagaaattgacaaatttctcgatcatttggaaaagtggcggacaaaacataataaaatgcttgataataacaaattagatgagttataaaccaattcaaaagaacacactttgtgaaagttgtacttaacagcaagcgacgcaaaaatggtattgttgacaagtgccgaccgaaggtccgtcaatacgcccggggaatactgcttacgatgttcaaacagaaagcgagttatcatataatcaagaatggcatctccgagaaattccaatctccggaaagcgacagcgtacggtgaattgtgtcagctttggaaaatgccattgccgacctggtaacagccggtcacacgattgttgaagtaggaagcgtgggtgaatgcctggaccaataggccttaatggagcaaa

SEQ ID NO: 23195 - DNA, 2425 bp, Heterodera glycines
  unsure (1)..(2425): unsure at all n locations
aaaatttttagccaattattcccatccattttcagttacatcgaccaaaatgtcatcgcttttctccgccgttttcgtcctcttttcgccgcttgtccaattaatttngttcatcaaagagaacagtgaccgcattttgatgtccattttccgcaacatttggccaatgatcgcgaaaaacatttgtggcatgcatttgtttccgaacattttccgccgtttgcgacaattggccccgtcttttctcaacgactgtccatcgcttcgctttttctctttgtacggcactgatgacttccccgattttccgtgcgatgacagtgccgcggcatcggatggacaagcggtggccaaatggtttttcacgccacttcaaaacaatgtgccaaaggtgtttgagtgctggatgccgaagtataatgtggattggcggctgaaaatgtcagccttccaaacggtgcttccatttatcatttccgtttttgctaatcaaaattttccatgttttagccatttgcatcggcttcatctcccgtcaatttcattgtcgtcatttggtttcactggtctcatgccgttgtgccatttgcgctgaccaacgaattgacgggggaacaattggcattcaaaaagactgacaattggcgtcgttttctgttggttcgttgtccaattgcgcgagacgcggacaaatgggcgaaatgggaaaaggaggcgattgattggcagattcgtgatcagtggaatcaaattggcattaaaattaatgatgaggacgaaatcggtgatgggtaagtgaatgtgaaggcttaatcaacaattcaaaatgattgcgtttctatttttaggcttctcgacgaaactcccggctcaagtgatcagcagcagaagtgaacgaatgaattgttgtgaagtgattggccaatttgaattatgcgattattgacgtgctcattaaatgtcccttttgttgagatgataaatttatttgtaattgtattcagtagggtgaaattcattgatttcctgtaacagtatacataactgtatgatttttcggataccatagtcaacccggcaaaaaaatcgacattgtcccacaagttacgaaagcagagcaaatttggtcattacctaaattgaacattctctgataaatttgaaaaatttgctggttttggtccgtgctcaaattgattttgctctcccccgcaggggagacgcgcgccgttcccgcaggcaagttgggccccagcggctttttggactataactttttttttcattgtcaacaaaatctaacaaatcttgatatcatcgagagctcttcagatgctctaatagcctgcaaaattcaattttgtcaaatttgaacaaatttatggccaaaaaagttggaaaatttggctttttcaattcttctggtcataactttttttaaccttaatgaaagttttcaaaattttgcaggctaatagaggacacttagggctttcaactgataccatgaatgttggatttggttgacaaagaaaaaagttataattacgaagtatcgccgatttttcaataacattttccttggcccaatccgtccgtctgttccgtttcccacccctccgcgacggtcatttgcatcttttcactttttcttccactctctcatttttctgtattctctctactcctttgcatcttttccctttttcttccactctctcatttttctgtattctctctactcctttgcatcttttccctttttcttccactctctcatttttctgtattctctctactcctttgcatcttttccctttttcttccactctctcatttttctgtattctctctactcctttgcatcttttccctttttcttccactctctcatttttctgtattctctctactcctttgcatcttttccctttttcttccactctctcatttttctgtattctctctactcctttgcatcttttccctttttcttccactctctcgtttttctgtattctctctactcctttgcatcttttccctttttcttccactctctcatttttctgtattctctctacttctttgcatcttttccctttttcttccactctctcatttttctgtattctctctactcctttgcatcttttccctttttcttccactctctcatttttctgtattctctctactcctttgcatcttttccctttttcttccactctctcatttttctgtattctctctactcctttgcatcttttccctntttcttccactctctcattttctgtattctctctactcctttgcatctttcactctctctcattttctgtattctctctgcactttgcattgctgatgtatccatccataaactatttccttgttctttcgcttccgccctctcattttc

SEQ ID NO: 23196 - DNA, 2417 bp, Heterodera glycines
gcaaaaggttaactaactgatcaaacattgattgtgatcggagcaataattttaattaggttttacaatttatttttgctttcttttcgagtttttggccttctccgattaaatatttgaacttttccaatgctttttcagctggtgtgcttttggtggccgacagttcaaatgccttttcgtcagtcgaaaactgatgatggaatgtttgcggggtgccggactgattttagaaaggtcggcacaattcgaaatgaaaggggaaaaccccggaacaaaacagagaccaattggacaacgaattgttttatgaattggacggaatgtacattttggtagcgaggaaaatggccgagtgaaaggaatggaaaaggattttaaaatttgttaatacatttatttttgattgtttcacaattgttgaaacttttcaacagttaatttggcagtttttgaaaaatacaattattttttggcacttatatagggttggagtcgaaaaaaaccagagcaggggaaaaacaaaagtggtgtacccctttggtttgcaaaaaataaaatcggattattcatttgttaaaagagacactttcaaaataaacatcagtgcggcagaaatagcaccagacacgggaagagtgaccagctgaaattattttaaattaataataacatgtaaactttctccgccaaattaaattacccaggatttggcaatggagccaaaatgacgccaatcgatgccttcgcccgagttaatagtgccgacagcgacgacgctgccaaccaaacaatgggtggtggagacgggcaaccccaattcggaagcgagcacaacggtgaaagcggcaccaaattcgatagtgaaaccactgaaaaatgtggtggatgaaggaacataatgaacaggtgtatgatttgcctgcacggattgatttgagacagcttttggccaaccatttcgatcacttaaaagggaaatgcaaatttaacgctcggccattcatttgctcatccgccgttgacccacctcggtgcccaagaatccaaaggcccaaacaaatggaaaacacgccgaaaaggagcagccacggggaagtgtcctccttctctttcacggtgccgttgatcccacacgaaagcattgcgaccaggcgagaaatggagttgctcacgtcattgcgcccgtgggcaaatgcggcgaagcaagcggtgaacacctgaaaaggtggtcaaacggggcatcgcaaacgcagaaaaagatagcctgaattgtgctaaacattcgcaaagtgtctttgttctcttttcggtccttgcgcggaaaaaaccacgagatcaatccacgaggagctgaaaaacccgaggggttccgtctttttttggatttctctcacttagtcgaaacgactgaagccgttcacttgatgagagattgctccattcattgctttcgtcgtcgttctgttcgtcgttttgttcgttgattttttcctctctgcctcctaaaaaccgtttttatttttcaattggacaaatatgctaatttgctggttactataaatccagcgcaaaatccgcggacgcaatatgaaatgagaaatcagtgcagcaacgactccaaatccaatggaaagcataatcagcacccaaacactaattctgtctttgattacttcaaaatctgaaatttagtggcaataattattgaaaataacagagcattacgctcaagtttttgcgacccatttttgacgatggcaaaagtgttaaaagcgatgcaaaagaaatagaagaaaggcaaagcgcgaagaccacacttcaccgggtttctctgaaagttgaatgttattcgagttttcttaacgaaataaccaactcttcgcagaacggcaaagtcgacaatcatataaagagtggcagagacgaaaccggacaaagcgggggacagaaccttttgttaagaatcaatttacgagagacaaattgaccgataattacccacgaaagagcaatttcaaggattttccaccaggaaatgcctttgataccgttcaacaccaaagtgaagccgagggtggcgccgacaatgctatgagtggaagagacgggcagacggagaagagtagcggtcaccagccaaacacttccgcctgtgctaggaaagtattttgtcattgtgcgcttttcactttcaaaactgcgcttacccccgagaatggccaattgtccgagaaaaaattggtccggatgtttaatgtagaggtctatgttcaccactttcttactcattgtcgctgtcacattggaacctgaacaatcatttctgtaatcaataataaattatttctgaatcaccaaccaacaagcatagcgccgaatgtttccataattgtggccaaaagaacgcatttcgt

SEQ ID NO: 23197 - DNA, 2352 bp, Heterodera glycines
ggtctttcaacagatttttcaagaaaaaatcttttttttcctcgaattctctaagaaaatttttataagaaaacatttattccaggctgtttatgtctcgacagtgtttcggcggctgtgttttagggtggaacgattttaggttccggcagaagaggggggggcggggggggaatttcgaaattgcaagaattttgccaagaaatattgtttaaaatttattccgtcagctttcgctgtcacctcttccgttatagcactctcttcttcgtcttcggcaattggtgccaattcgaattcgttgcgtggttttggaagagtctcgaattgtttttgcaattcctttctgttcatgcgcccttcgctcgggttgatgttcaattggtcgcggaagggcgtcccggcaacggtcgaagaatgggcgggggttgcggcggagtccaaactgcgctgagagcccggagtttctaatcaaaaacgctgttgagaatttttgacgaaaatgcaagtgcctacggtcttcgatgtttttcggtgtcgccgcgacggatgacaaaacggtgtttggcgtggcgattggctgacgcgtggttccgggggcgctaaagtccaaagtgtgcagcggcgtgttcagaccgcccttcagcggagtctccacattggtcagtgccagcaaatcgtccgcagccttgcaattagccaatatttgccaaatcccttttgatgtgcttttacccgtgccactgagtcaattgcgcccgcgggtgttctttgggtgcgcgcagaaatggcactgacacgcgaagattcgttgtaatcgtgcaaaagggtgctgaagaaaggcataaagaggaaatggccactgaaaggataacacaacctggtcggattgtcatctaccaattctctgacggagtccgaggcgtgtccaattttgattatgtcgtccaattctttgtcagatatttgaggctccggcaacagcaatttgctccgcttcttctcgtgcttttcggagaaaattgactgtggtgcatcttcttgtcttaatgggtttttcaactaacagaaaaataaaaaattttcaggaaaaattgacaatccttaaaaatctaaacaaaattttttcttaaactacattaaaattaaaaaaaaattcccggcagcgcttatcggcaccgccagacccccacattttactttttttttaaattttgaccccaaaatagaaaaaatagtctttttttgcggaaaacgactacaaatttttatttttgctctccggagctgaaatttggcccgaagaataaaaaaaagtccggattctcacctctgaattttttttttctggctacgggcttgaagccttggcttttcttcacggaactttcccctacccaatgaccgtttggctttttgtttgtattaatgctatccccgtcaagcagtactttctcttgcgcagtttgtccttgtctttgcgacggtcgtctctctcctgccagtctctccgtctgtcctccaccatcgtccgctggcgtttgtcgaatttgtcttcgcccgggtcgtggaatcccgcgggcacttccttctcaaaaggcacttccgcgttgtaatccaacaggcgatgccttcgcattttgtacgcaaatcccgagcctatcattatccctgcagcgcgcaactcgcgtctcttctgcagtgacgccaatcgacgcgcttcgcccaattgtttctcgcgtgctttgcgctttgccttctttccctgtgtgttggcgagacgagcgcgagcttcggaaagcatttccaactcttaaagacaaagccaaatcacataaattaggagacgataagacaaccgtcttcgtccatgtcaattgggtcgggacgggccggcttcgtctcgggagtcgggtccacgtctcccggcttcagctttttggcttctttcatggtatcagcctcgtcaatgccttcggcacgtcgttgagcctcgtccaaaagatgctcatatcttaatatttagtatttcaaaagctgttcataaatgaatggtaatggcataattaatttgttttgaaaggccttttttttacctttccaaacattgcgccgccgtccgaccgacaattggcgcgatggttcgccattgcgttggcataatctttgccaaatgaagtagtttctcgtcctcttcacgtgaccattccgtcttcttaattcgcgggtccaaccattcgtaccatcgtgctttgcactgtttagccgattttctgtgaagcaatgaagcgatccgactccattggtttttgccatatttcataatagcagctttaagaatttcatcctaaa

SEQ ID NO: 23198 - DNA, 1409 bp, Heterodera glycines
  unsure (1)..(1409): unsure at all n locations
atttggatttatgaaggaattgtgtcctggataagtgatgacaattgagcgaacagattaatggaagaagcgcgtctcattcaacgccaaatgcatccagaaaaagaaataaatttatgaaaggattacggaaaaaatatgaaaaggaaatgaatgggggggggggggggtaaattataataaacctgccatttcggcaattaaatttgccagtcattttttaattgctgctgagaccattactgtattctgatgtaaaataactatactagaacgcaatatctcttacaaggtataaaaacgtctagaagtaatccgattttttccttgactttatatgtaatttaaattttttcgtcattttttgtctctttttttcagttgatgtcaccgtttgctgggaccagagcgtttgggcccccgtttttgggcccccgcgtttgggccccaacccaaaaatagaaaagtgtgtttttttaaaagcctgagggatccctcgccacttggcataagctaggtttaattaacattcgctcattttttacaattttacttattccaaatcctattattttagttaaccaatttgatgtacattctgatttggacattttttagaaatggctaacccaattgcaaccaaaaaacaaaaagtaaaattgtcttacgaaggccacctttacaccttcgctaaaatgagttctgatgggatgacaaaattttggagatcgagttcaaaaaatcaatttcacattattttggagtttctccggggaatttctcgcaactatcgaatgaacccgtgattttttgttttattgtccaaattaccttatgaacccgtgaatttctgttaatttttacattttttattgttaaaattattgttgaatttatttttaaaatgtttattttacatttttatgctgaaatttaaaaagttgtttttactgtgatttttcatttttctgtacttggggcccaaacgaccctggggcccaaaaacgagggcccaaaaacgggggcccaaacgcgggggcccaaaaactggggcccaaacgcccccgactctccctccgcccctctcccaaaaaagtcaccgtccgtttcgatttcggcactttttgacgccgccaaatggaactgacaatgagtgaaaggcacaaaaaggcaaatgaccagcagcagaggagcactcattttccttattatgcttttattcactttatttttaattatttaaaaattactanattaaaatatgttaaagtatttctaatanatgaaaatattggtaatttcagcagaatgaaaatgcatcgacaaatgaacggatggataaacggcggcggcgattttcactttctaataattttaggatgattcacaaaaagtgacggggcgtttcg

SEQ ID NO: 23199 - DNA, 1932 bp, Heterodera glycines
  unsure (1)..(1932): unsure at all n locations
agcctgaagcatgtcgacntgagcaacagctattacgttatcaacaccaaatacattgtgtccggtgccgggtcgcgcatggaaaatgcaaaaagtgacaaccacgctcgattcccggaggcatatgagaaatatgtgaaattcaagtaattatttgctgtattgttaaaaattggaggggaatcggaagacaattaattaatgacgtctgaaaaaaggatccggttaaaacgcgaaaagcgtggcatgataatgccagaagggcgggtgggacttggcagctgattaatggtagaattgctcacgtacattggctgaatgcatgggttcgattcccacccgaggccaaacattttgccaattgtttcgttattgtaacatgtaacatcattcattagaacatttaaaattacataaatactaataggttaaactagattaaaaatgcgaaaactcagatatccaaataacgttggaaaacgaccagagatcgcaggtgaaacaagtaaggcacgcgacggagccgcactcgacggaggtgcatttgttggtgttgaaattgacgcagaaaaaatggtcggcaaattgaacttttatgcggccggaatattatacaaagaaaaagatgaaaacgtgcaaccaattgagaaagtgccagatgaaaaagtgccaattgggaaatggcacaaattcgaagggcaagaaattgaactgatgccaagagaaattgatatgacaggtgaataacgaaaatattaatttattatttaattcagtatataatttaaaataaattaaattaaatataattaaattttgccatttgaaagatgaaaatgacaacatttgcattgaatttttggcattcgctgatgctgatgaaatgaaagacgatgcgcactttaaaatggacgatacagaacgaattcaagcaaaattgggcaaatatatttgcaaaaacatgaaagaaaatgaaaaaaacaagcaaaagaatcccaaaaagctaaattacaaatttaattggacaacggtggacgatgttcaattttatgcggaagaagcaatgggcgcaatgcgggagaaatttggaattaattacaaggaattagcggtaattatccacatatcctaaacacattaatgataaaattcgattgaaactatgaacaattaaaagaccgaaaaaatgtattgttttataaatggtaaaaaatatttttaaataaactttttaggattcttttctatcggatgacttaactgacctgggtatcaaagggaaaagctcaaacaaaatttatcgtacagaagacgaaaagtttttgttaaagcaaattccacaaccctatcaaatggaaacaatggaaagaacgttgaaagattatctgaagcatatgatgcaaatgggcgacaaatcatttatcaacaaaatcttttttgtgtttcgagtagaaattgaggtaataaaatttcaaatttaatcaaatgttgtaattttgattgcttcctttttatattttaacaaattttcgattccttttttattcttgaagttttttgattttataaattaagagtgggaaatcacttccttaaaatcttttaaaaaaatttttatatataaattctttcccagaacactcaaacactctttctgctgatggaaaatgtgttcaaaaatgccaaggatttgccacttttgaactttgatgtgaagggcgtcttctcccgtcagcccaaattggtcgaagttgtccctaaacagcgtttaaacgacgtcgtgctcaaatggtacaattattttggtggcgaaccgccccttgtgccggaagaagtgatgccaatgtttccagagggtattttgttagacaaagaaacgcatcgaaacatcgtagaacggctgaaacgcgactttgaggtgatggcattttt

SEQ ID NO: 23200 - DNA, 1754 bp, Heterodera glycines
  unsure (1)..(1754): unsure at all n locations
gttcaccttggagacctgctgcggatatctgtacgatcaggcaggagattcaaatagcttccctcgcattttcaagggccgtgtggagcgcacgagacaccacaggaaccgcggtgctttacgggcgcaacatccctatctcaggctgagccacttccaggcacgcacaccctaaaccagaaaagagaactctggctcggactccacacgacgtctgcgagttcatttgcgttaccgcgcaaaacagctcttgcgaaccgtcatttccctagcctggcgtgggaatgttaacccacttccctttcggcaaccggatggaccaactgcgcaagcacagaaaagtcgtcatccgtagtgtgttacggcgttagccggtgccttaggatcggctgacccacattcaactgctgttcacgtggaacccttctccacttcagtcttcaaggatctcacttgaatatttgctactaccaccaagatctgcactggtggaagctcccgccgggcccacgcccaaagccttcaacgcaaccaccacgaccctcctacacgtcatggccagactacgcgacaagcacgtgtacaagccaatgacggtggagtataggtggcccgctccagcgccatccattttcagggctagttgattcggcaggtgagttgttacacactccttagcggattccgacttccatggccaccgtcctgctgtctatatcaaccaacaccttttatggggtctaatgagcgggcactttggcaccttaactccacgtttggttcatcccacatcgccagttctgcttaccaaaaatggcccactgggagctcaaacattcaacgcctgggttcagagtcaagcaaccctggcttcatacccatttagagtttgagaataggttaaggacatttcgtccccaagtcctctaatcattcgctttaccgagtataactgcttaacgagctccagctatcctgggggaaacttcggagggaaccagctactagatggttcgattagtctttcgcccctatacccaagtcagacgatcgatttgcacgtcagaatcgcttcggacttccaccagagtttcctctggcttcatcctgctcaggaatagttcaccatctttcgggtctcagcgcatacgctctgtctccgccccatcgcatgcgatcgagacgggactatgttgcgccccaacaccgcagtgccagggatcacacatcagctccgtaagaagccttcactttcattgcgcctttgggttttgaacacccaatgacttgcgcatacgctaaactccttggtccgtgtttcaagacgggtcgaacagatgaccggcttttacaccgagaacgcacaactgagagcccgagctggaccgaactggttgctggtacgtgtcgcacgcgaccgccaccgacccccagctcgagtcaacacggacccgaaaccattgcacaattcacccagagtaaacagcactcccccgatccgggtaccagaccccgaaaggctggcctcaagaccgagctcacgcagctactccgagcatctcagcgcactccgcctgcaaatgccccattcgccactgaacagaaggacagcaaaccccagtctggaggctagcaggccaacgtacagcaacaaacgggtgaatgcagaccagatacgccaggctctgtccgtttccacctcatncggtttcacgtcctctttaactctctctttcaagtgcttttgcactttc

SEQ ID NO: 23201 - DNA, 1012 bp, Heterodera glycines
ttgtgaattaattctcagaaaaatggctatctctttccccgacaatattctatctcgtaaccccgatgctaatccgttcctcagagcctcttcaaaattttttccattaccgcaagagttgcggaaattgtgaattaattctcagaaaaatggctatctctttttaggacaattttctatctcgtaaccccgatgctaatccgttccgcagagcctcttcaaaattttttccattaccgcaagagctgcggaaattgtgaattaattctcagaaaaatggctatctctttttaggacaattttctatctcgtaaccccgatgctaatccgttccgcagagcctcttcaaaattttttccattaccgcaagagctgcggaaattgtgaattaattctcagaaaaatggctatctctttttaggacaattttctatctcgtaaccccgatgctaatccgttccgcagagcctcttcaaaattttttccattaccgcaagagctgcggaaattgtgaattaattctcagaaaaatggctatctctttttaggacaattttctatctcgtaaccccgatgctaatccgttccgcagagcctcttcaaaattttttccattaccgcaagagctgcggaaattgtgaattaattctcagaaaaatggctatctctttttaggacaattttctatctcgtaaccccgatgctaatccgttccgcagagactcttcaaaattttttccattaccgcaagagctgcggaaattgtgaattaattctcagaaaaatggctatctctttttaggacaattttctatctcgtaaccccgatgctaatccgttccgcagagactcttcaaaattttttccattaccgcaagagctgcggaaattgtgaattaattctcagaaaatggctatctctttttaggacaatattctatctcgtaaccccgatgctaatccgtccgcagagcctcttcaaaattttttccttaccgcaagaggtgcggaa

SEQ ID NO: 23202 - DNA, 1923 bp, Heterodera glycines
tttcgtgtcagtgtctttcggccatttccccgctcgacaatcgaccgcccacggggacaaattggccatcgttgagccaaccggcggagtaattcgtggactcggaggacgactaacgaacatcgggtaaacgaagagttgcctcggaatatgcatttcttaatcgacaattttcattccctttttattactttgatttcgcatttttaattggcttttctttttttaattaatctttttcaggtttcggtctccgtttacactgtcaatgcgctgtccggcgactgttgcgctccgtcgttggattggacgtgcccaattccattgtcgcccttctcccgcctctgttggctgaattttacagcctgtggaaagtgaaatataaaatttaaaaaatatcaatcttttattccttttcagtttggcaacaatggacgaaggtaacaaacaaaccaaccagtccttgtttttctgttcatgtggtcttaagaatgcactgtccgtctccatttacccggccctaatggtggcgtcggcctttggcttccggtgatttttggcactgaactgctccgtgagcccgaggctgactttctgtggcccattgctctgacggaagtgccacagtcccaatttcgacatatttattgccgtagctcaaaattccctaccttcggcaccaaatctgtaccggaaactgttccatggacgatgcctttgctaaatatggtggaaattgagccggatatttaattttctctcgatttattattttaatatttttaaggattccgaacgtggcaaattggagaatgaactgatgctaaacgaaatccaacaacttgtggttaggcattcagcagacgacaatggcactttggcgttgaacgctgtacagtcgcgtcaaattgcacaacttacccaagattacatgtccaacctgcttaaattgttttccgtttcgtgccaagtccgtggggaagggcacataaaatcccgagaaatttgataatactttaagttgaaccgtgagggacgggccaccgaaattgctcgtcggaccacaaattccaagttgatacaagcgatgtgcaactacgcgtccaaagcacgccgacccgggctcagtgaaaaggtaattaagaaatattaaaaatttgtgtttacattcaaaaaataaatcttttcgttgattgcgatcagattgcttcaattggacgcgaacatttacaagcggttgaggcggaacagcagcgaaaaaagcagcaacagcagagcgcaaatttaaattatggcaattccatgttataccatcggagagtgcaaaatggaggtggaacaataatgctgatcaaattttaaaattttacatttagctaaggatgggactgaaaggaccgtcgctgatacggtggccccaaatgtgaacaaaatgttggtaccgaagcgaaaagtcactgctgacgaattgttggattctttacgggcagaagacgggtgagtgatgaagagcaattaatctcacaattagcccttaaaaatcattcattccgatatttagagccaaaaagcataaacaaaatgccaaaatgtgtccccctccgccgtcggtgccatcatctttgtcctcctcatctgccactctttcttccgcgctttgggaccgatgaaaatgatgagaatgcaattgttgtcattgacgaataacacctctaccactgcgcgaatcgcgaagatgccgagcgatcaacgagcgagcagtcgatctgatcggctgcgagcaacacgaaccatgaacgagctccacgaatgttggtgccgttgtccgattcgatgttgttggatgcgtcaccgctgaacaacccgttcgaaaaaggtgcaccgtggattatgttacgaaccctgacgtggttttcctggagt

SEQ ID NO: 23203 - DNA, 1156 bp, Heterodera glycines
ggtacttttctgttttgtgacacccctgaaattttcaaataaaaagtcatttctagggtaatttggggcgctgatcacgaatatggcatttatttttcaaaattccgaatcccgaacccgaattcgaacataaatttgaaattcataaattacaaggaaaacatatttttatgggttttcgaggtcgctgaatacgtactgggcctatgcctaagctgaagcctaagcctaagcttaagcctaagctgaagcctaagcctaggcctaagcaagctgaagcctaagcctatgctgaagcctaagcttaagcctaagcctaagctgaagcctaagcctaggcttaggcaagctgaagcctaagcctaagctgaagcctaagcctaagctgaagcctaagcctagatacatgccaccaaattagcgcaaattttattacgcatttctcggcagtttggccaatattttgatgattttgtgtttgctgaaaaaaaaactccgatttctcgagttaaggttatttaattggtcaaaatggatgtcataaccgttttcagcgacctcgaaacgccataaaaatatgttttccttgtaatttatgaatttcgaattttggttcgaattcgggttcgggattcggaattatgaaaaataaatgtcatattcgtgatcagcgccacaaattaccctagaaatgactttttatttcaaatgtcttttgagtgctctttatagtgcggtcaattaagtcccagctgagtttggcactccaattccggcatttttttcggcttgaaaaagggcaagcgcgcccctaattctcttttttcaacccatttcgaacatttttacatcgattctgaacatttttaagcatttttgagtttgggggactatgattcaatattttccatgggctttgcgaataattggtccatttcatagttaattttgtaaacgatcaatttggaattttctcataattttcataaagttggctttttttctttttttgatgggatgcttattaaatacgcaaaagagttaaggaaaacaaagtaaatccgctatttgaaggcccctctctggtagaaggcccccaaggcccccctaaaacacggtttttaatggaaaacgatcaattttattaggaaagaaa

SEQ ID NO: 23204 - DNA, 994 bp, Heterodera glycines
ttttcttagacccgagctgcgcgccaaccatggtggtgggggcggaggcggaggtgacattgcggaggcggccaccgagcagcggaccattgccgtgccatgccaacgctttgtgcgcagtcggcaggcggacatcttcacgcgtcgctccacgcgcgtgtaccgccccgtctacaccaaggggcgcgtcctgcgaccaccaacagcgggaggcgagacagctgcggcggaggaagaagctgaagcggtcacgcctgcgcctctgtccatccgcacgcgaccgtttggctggtgttcggcagaggcgcagcaaatggagacagatgatgatgatggtgatgaggaggaggatgaggaggcggccgcgctcagcgatgacgacggtggtgagagcgatgggctggagcagccggtgcgcaagcgggccagggccgagccagtgcaagaaattcacaatggcgtgaaagcggtgcggagcatattcggtgcacgcaccgttgcgtgccaatgccaagaattggtcgcgggtaaagcgctgttgttgttcttgttgctgtcgtggagatgagaccgcctgagcgccacacgatttgaaaagagaaaatgtgctggtactattttgcacaaaatatttcattttgaaataataaccttgcttaaaatcaacaagaaattagaattttatctcaatgtgattgacgcatcaaaaatgagagaaaaaaatttgtatgcatgtcaattttcactcatcatctgcgcagcccgcgctttcctctttattgtcctccgtctcgttggggtccgtgggcgatgccaccatgacgtgcacctgcacacactctagcggataataggacatatgtgcgccaccaccgcgctcaaccagcgccggcaggtttgggtggtgcaaacggacaccgtgttggcatagaagtactgacgcacctaggcaaaaaaaacaacagaatgcggggcggcccttctttaaacaaaa

SEQ ID NO: 23205 - DNA, 1320 bp, Heterodera glycines
ttttttccccctccccttttcccccagggggtaattattttgtaaaatttttttttttcccccaaaaacttttcaaacccccattttttcgcaccgtgaaatgttatttttattgaaattttgaaccgttttgagtagattagactagaaaaaaatgaaaaatttgaaaatcatttttcccactcccctctcccaggggtattattttgtaaagtctttttttcccccaataaacttgtcataccccttttttcgcaccgtgaatgttatttttattgaattctgaaccggtttgagtagattagactagaaaaaattgaaaattttgaaatcatgtttcccactcccttctcccaggggtattattttgtaaagtctttttttccccaataaacttgtcaaaccccatttttcgcaccgtgaatgttatttttattgaattctgaaccgttttgagtagattagactagaaaaaattgaaaattttgaaatcatgtttcccactcccttctcccaggggtattattttgtaaagtctttttttccccaataaacttttcaaaccccatttttcgcaccgtgaatgttatttttattgaattctgaaccgttttgagtagattagactagaaaaaattgaaaattttgaaatcatgtttcccactcccttctcccaggggtattattttgtaaagtctttttttccccaataaacttttcaaaccccatttttcgcaccgtgaatgttatttttattgaattctgaaccgttttgagtagattagactagaaaaaattgaaaattttgaaatcatgtttcccactcccttctcccaggggtattattttgtaaagtctttttttccccaataaacttttcaaaccccatttttcgcaccgtgaatgttatttttattgaattctgaaccgttttgagtagattagactagaaaaaattgaaaattttgaaatcatgtttcccactcccttctcccaggggtattattttgtaaagtctttttttccccaataaacttttcaaaccccatttttcccaccgtgaatggttatttttattgaatttctgaaccggtttgagtaaattaaaaaaaaaaaaaattgaaaattttgaaatcatgttttcccctcccctttccccagggggattattttggaaaggcttttttttccccaaaaaatttggcaaacccccttttttccccccgggaaggttttttttttttgaaattctgaaaccgctttttgaaaaataaaaaataaaaaaaaaattaaaaatttttaaaattttggtttcccccc

SEQ ID NO: 23206 - DNA, 1242 bp, Heterodera glycines
tgttttttatgaaacccaagaaaactcctaccccctgctggcctgttttttctgaaaatccaagaaaactcctagcccctggctggacctttttttttgaaaatagaaagaaaactcctagcccctggctggtttttttttttctgaaaatccaaaaaaactcctagccctggctgggctgttttttctgaaaatcgcaagaaaactcctagccctggatgggcctattttttctgaaaatccaataaaactcctagccctggctggacctgttttttctgaaaatcgaagaaaactcctagccctggctggacctatttttttttctgaaaatccaataaaactcctagccctggctggactgttttttctgaaaatccaagaaaactcctagccctggctggactattttttttcgaaaatccaagaaaactcctagccctggctggacctgttttttctgaaaatccaagaaaactcctagccctggctggacctattttttctgaaaatccaagaaaactcctagccctggctggacctgttttttctgaaaatcgaagaaaactcctagccctggctgggcctattttttctgaaaatccaataaaactcctagccctggctggacctgttttttctgaatatccaagaaaactcctagccctggctggacctatttttttttctgaaaatccaataaaactcctagccctggctggacctgttttttctgaaaacccaagaaaactcctggccctggctggcctgttttttctgaaatccaagaaaactcctagccctggcttgactgttttttctgaaaacccaagaaaactcctagccctggctggactgttttttctgaaaatccaagaaaactcctagccctggctggacctgttttttctgaaaatcgaagaaaactcctagccctggctgggcctattttttctgaaaatccaataaaactcctagccctggctggacctgttttttctgaaaatcgaagaaaactcctagccctggctgggcctattttttctgaaaatccaataaaactcctagccctggctggacctgttttttctgaaaatcgaagaaaactcctagccctggctggacctgttttttctgaaaatacaagaaaactcctacccatggctggacctgttttttctgaatatacaaaaaaactcctagccctgggtggacctgttttttctgaaataccaaaaaaac

SEQ ID NO: 23207 - DNA, 2065 bp, Heterodera glycines
  unsure (1)..(2065): unsure at all n locations
atacaaacncatttgaaatgggggattatgggaagattaatccctaagaagtcgtgatgcatatttcccaaattcatctcactatcgcgattttttgtttattttcatttacagggaatatttcctgccaaaaaaaaactacctctttattcatttctttcttaccttcacaaagaatcattgtcatccaaaaactcttgaggtttatgcccgtttctccccctttcactttaccctccctcactccctttatccctgcttcccatcctttctcttccttacagtctctccccttttatccgcctcctctcaccagtgatgttcgagagtctcggtctcgagtctcgactcgagaaaagtctcggtttttttttggtctcggtctcgagtctcgggttttcagtctcggtctcggtctttgagactttcgagactcgagaccgagacttttttacacccctaatgataggctttttgtaagttagaaataaatatacttttggtatatttttgcttcattttgtttactcgtgggtgtggtccggtgggttgttctcttggttatgttcttcattttagcgttggatcagttccctccaagtaatttttttttcttctaatttttcaaaattattcctttttcgataggaattcaatcaaaattttaacatttaaaatcataaaatattgtcatttttggactaaatctattaacaaagtgcactaaaatttcaaattttccccagcggcgcctatcggcaccgccggccccccttgttccccaaaagttttttggaataagcgtgttttgaataaagttgtaaaaatgagcttttttgactcaaaatgaggcttttttgcataccaaatgaggcttttgaaacttttaatctgggagccctgtttttagcattttaattttgattcataatttttcagttgaataaatgcaattatttcaaacgtaatagtaatttttcataatttttaagaaataagaaaattttaaaaaaaagtaattcccctccaagtagttgtttttcttctaatttttcaaaattattcatttttcggtgggaattcaatcataattttaacaattaaattcgtaaaatattttcattttttggactaaatcagttaacaaattgcacttaaattttaatgaatttttgttttgtgcgtttttgaaatgataaatattgtaacaaattgaatcaaatttaaaaaaaaccaaaaattagttaagaatagagtcaaaaaaatatttttaacgatttttaagcgaataggaaaattttttgaaaaaagtctcgagtctcgggttttttgggtctcggtctcggggttttcggtctcggtctcggggtcgagtctcgggaaatttttggtctcgaactgcactataatcttctaatattaattgctgcccatttttgaacccactttccaatatatcacaatggctttcattggatacggcgctcttacggccgcgctgagtggcatcattttgtacgcaaatttgcccacccgtctgaccattggcgccattgtgccgaccgttgaatttttggccgagacccaactgaaaaagttggaacccggccaagctgtggctggaccacaaattaaggtcattagcgactaattgaatacaaaatttattatcaattactatacaagaaaacaatgttatcaacttgtaaatgcacattgttcaggctagcgatctgttcaatgccggccatcctctgcttgtgatggctgtccgtcgacctggtgcctttttttgaatattccatttcgatttttctaaattgaattctttctatttggaaagaaaattcttaaatgtttacatttttttgcccagagccttgttaagaaatgccagagggattctgatttttttttctgataaaaaatataataaatttcagggttttgatcagtatttggataaaagtcaggaaattaaaaatggatattaaaaattctggctatcgatctaaaaaatcaaataattccttactcacaattttttggataattttttgttaga

SEQ ID NO: 23208 - DNA, 2025 bp, Heterodera glycines
ctatctgtaaatgccaatgctgcagaaaatggcaaaactttgcacccaatttcggcattttccgtttttcgggaataactcgctgggggttaagcggagcgggttggcgccgcttaagcatttgtgtagtttttaaagctgcatccgatggcgttttcagattttgaaaattttcaaaatttttcgagctaggccccctcgaaaatttttcgtttttgaattttattattttttgccgatttttcccaggaaaacggagaccactttcaagcaaccgtttttcgagctctatcgattggtggcatttttgaaaaaatttcaaaattttccggaaatagaaaaattttttggcctgaccgggacatttcagtcccgggcctataactcgtcaggggttgattttagcgaaaaatcgtccaagagcttttttgtagagaatttcgagctctatctaatgtgctttatccggtatttttatctttaatataaaaaaagatataaaataaaaatgaatttataaatgcaaaaccaaaggggggaccccatggatttgcatttcatgagaaacttttttgctcctaaaattgccaaaaaatacttttctggggtagtttgaggtgctgaacacgaatatgcactttatattgcgttttggattttttggagggaggtaaaaaaattttgaaaaatcgtcaattttttggatttgggaatttaagtgattctttgaaaattcataactcgcctcagaatggtccaattcagctcatttaaagcataaaaaatagcaaaaaatcgggagaattttatgagatttatttgaaatttatacctcaaaaacaaaaaaagttattccagaaattctggaaattttcgatttttcagaaaaaaatttatatctcggttctgaaaagtcattagggaaaagtaaaatactacaaaaatccgcaattttttgctctattaaataaattttaattcatatttttatcacttttttaagaattgttataaaaataaaagtgattttggcattcggaaccaaaggggtgagcataggatttttgagtggaaaaattttttcatccaaaatcctcaaaaaacatgtctttaggggttatttgggccgctgatcacgaatacgtgatcagattttacttttgacatcgtcaagacctcagaatccccgtgtgattggggattctgaggcatcattttgagggggggggcgaagttcggatccgggcggtgtaacattatttttctgtgcatttttacgttattttcaatgattttaattaatttaaaatattttgttgagttaataaataaaaaattatatttaatttttttttgataaataaattttataagtttaaattaattatttttttaattgatagaatttcatgtatttttttaattaaatttgttaaaaaatattttcattttaatttaatgaatcactgttgcacctcttctaatcactgctgtacccctaaaaaacgggcgcgaagcgcccgtctggcccaaacaaatttaaaaaacgatcaaacgggcgcgaagcgcccgtctggccccaactaaatttgaaaaacgggcgtgaagcgcccgtctggccccaactaaatttaaaaaacgggcgcgaagcgcccgtctggccccaactaaatttgaaaaacgggcgtgaagcgcccgtctggccccaattaaatttaaaaaacgggcgcgaagcgcccgtctggccccaattaaatttaaaaaacgggcgcgaagcgcccgtctggccccaattaaatttaaaaaacgggcgcgaagcgcccgtctggccacaacaaaatttgaaaaacgggcgcgaagcgcccgtctggcccaaacaaatttaaaaaacgggcgcgaagcgcccgtctggcccaaacaaatttaaaaaacggtcgcgaagcgcccgcccaagcccaacaaaatttaaaaaacggacctcttctgatcactgttgtacctcttctatttcctgttgtacctctt

SEQ ID NO: 23209 - DNA, 3296 bp, Heterodera glycines
tcctcctcctcttcatcttcgtcgtcgttgtcgtcatccaagcatccatgccgctccagcgggtcactgatcgtcaagaactccgtgcgaaaagcgaccaacgcctcaattagtatgcgcgtgtcattggtgcagtaggctgcgagctgttcacataggtcgaactgttgatggcggtgttccgcgtaccactggtcgaatctgcgctgtcggtcgggcgtcattccaccgtataagtagtcagcttttggcggtagcgactgcagaatgagcccataattcgtctcaacattcgccaaatgagggaagaactccttatcctgcacattgagtccaaacgctccgggcagagcgccgagtggcaccggcataaggttccagctgtctcttacgatgatttccgggtttttttcgcccctcgcaattttcatttcgtataatttgttaccacggcggatcatctgtggacaaaacccgttgaggaagaactgccgaaacagcataatgttgtcaaagcgacccccgaaatgggcgaagagcattgtgggatagcgcggatcgaattcgctgagcagccattgagcaaaggccgccattggacacggagtgatgaattgggcatcggtttgtgtgcgttcatagacgcggtgggagaatgtgacggtgcgctgccgaccgcaaatgccacatggcgcttgtagggaatttcgccataaaatttcgtttatgcacttggtgcagacgacatagcatgagatgaagttgacggaatgaagtctgcggtcgccctcaattcgtgtgttctgtgttgtttcgcagtcaaaggcgatcagtctgtactttttggggcggcgcgccttcaactgctgtatgaagcagccccgctccggcttatggtaacatttgcaggtgtagcagaatttctcaccgcaaacgtgtccgctgcgtccttttcgtcggttttgtttgacattccacacaactccgcactgtttgcattttttgaattgtcggcacacattgctcgacaaatgatgactgaagcagtcttggcttatgaaatccttgccgcatgctgtgcattctctgtaataattgtcgttgttgtcatccgctcggcacggtcgccccactcctatgcgaccactttatgcactttgctttacattgtagcgtgtgatcattagcattatcataggggcattcgcacgaaaagcagtagtagtcacgtccaaacaccgctttgcccaccccacatcgaattccgtcaaaatggccgttgtgatggtagagtgggatttcgatgttgtaattgtccggcccatattgaaattttggccgataggtgcctgtagtgccaaaaatgaacaccttaaatcgctggtttgatgtggcgtatttccgattccaatagtccacgacaatcggcacatatacaaccgcgtcatactctctcaaatcggtgcgaatgtttgcgctgctcatcagtccaaacacgtcttccagtcgtcgcccattctgccgattaatatctgaaggtttgtcggctcatctctttgctgtggtattttctgcttgcctccaaagcgtaaaaaagacaataggaatcatcactgttgttgattcgcagaagtgcactctctttgatgatatgttgcactgaattcgttgtccttttcccactgccacgcacctgttgccgctgaggtagctgcgcaacatcaagcgttgtgatggtcacagtgaacggcgagccccacagagagccctcccgcgattttgactgtgccacctcaaggaagcggttcataattgagtcggcgcggaaatgcggcgtatgggaatccatatgctcggatttagcagatctgaagagattgtagcgcccaattgatccggtgtgatcccgttctgctgtgactcgtccagggcggttgacatgcagtgagcgaacaatgcgcgcagcattgactcggggttggcgggcagattttcaatgataaaagtcgactttacactctgcactttgaacttttggctgtactgtttgtcggcgctcagagtgcgaatgcagtttttttgaaatttcggctctccctccacatcatcatttctttttcttctctttgtgggcgcttcgttgccgcccaactcgccgcaataattgtgatcttccaacgacattattattatttattaatattttaatttattttttacgaaaaaagtgagccttttccgcgtgagctcgctgtatatatgcgcagcaccaacagcgcgcaacgtgcgccgtggtataataaattaatcaatcattccctatgccctttcccaaagggtggtaaaattggcacgcacacacaaatacggattaatcattttattcaaaatgcacaaagaatacatgtcggggctttcactagcgtctaacatacgcagaaatgcgtcaaatgggtgacataaggacatgtgatagatgaacacgatacagtgaattgcacatgtggtagtcagcggggactggtacgggtgcttatttgtaacaaaaccttttggaaatttatccataaatgatgtctttacaataggaggaattgtttttgcgagactatcaaagtaaatgaccgcttcctccgtctttgaaggggcataaatcgcgcaccaatgggatccttgtttgtaatgtgggtcgttgttcacgactagcgccgctgggtaccgtagcgtgtccggcgctgggagctggtcacttgggaaacagccccggaaaactcgtgcggtttcccgactttgccttaaaatagtcgaaatctgcgcgctgtccatactcctttttcttctttaaccaacagatagaacaaagctgatgaagtaccagactgacaaacaccattaaatagagtgcaaaaagtgcccaacagatggcttgctgataaaagttttcttccccgggacgatccttgcacatttgatgaatcaatgttgggaggagtgttgcgactggcaactgctcatccacaaccaattttgcagtttttggtataggagtggtgattttgctgctgttgttgttgttgtttttggtggtggtggtcgtgttcctgctgatattggtgttggcggtggtggtggtgacaatttttagtggtttgccactcacgttgcctttccccatacgagtagatgatgccaaacgaggcacaccaatcttctgtggatagacagttgtggtggtggtgatggcagtgttggtggtgctggaagcccctcgggatttggttttgttgtttgcatta

SEQ ID NO: 23210 - DNA, 1911 bp, Heterodera glycines
tttaaaaaaattcaaactttcaatttttgcaaatattgctgatgcattgcttggtactgtaactacaatatgagtaaaggaaattgaattcttcctatttacatgcgtaagatcaatatctttgaatcacattcggttagagtcagttcaacgaagttgtagacaagagcatgaaatcaggcaaattattgaagaacataataggcggtcaataataatgaccagatcaaaatagacactgagaacattttcaactaaccttaatactagcttattaacaatttagccatggatatttttgatatttgttcacaatttcaaaccaatgagcatacaactttaacagcaaattgcccctatctgtggctatgattatcacattgccttttattaccccgtgaataactgaattgattcgatttcctttactcatattgtagttacagtaccaagcaatgcatcagcaatatttgcaaaaattgaaaatttgaattttttcaaatgttcgaatccgggttcggggttcgaaattaagtcaaaagaaggtcaaattcgtgctcagcgcaccaaataacccctaaaaaagtgttttttgaatttttattccttttttttttttgtgggaccaataatcttcatgattgccatttattaggctataaatttcggctttccagaatttaaaattatgaaagttttagtcgaaaacggtacaaatcgttttttagtttaaacatcatcaccatttctgatttccttcagttagcaactgcacagcttcgtgcaaaaacccagctgttggaagagcaaatgagtgaggaggacagagaaaaggttttgaaaaattaaaactattttaaaatgattttcgaaggaacgaaaagcgcggcaggaccaattggaagccatcttcaaaatgatggagtctcagaaggagaagtttggcatcaatgagaaggaggaattggtggagcagatgaaaatgtactcagtgtgaaagagaggaccaaccaaaagaaataatggagatcgaagagcaaccaaataaaaacatagcaagacgactgacaataaatatttttgctctcaagtcctatcttcaaaattcgatcaaagacacgaacaaaaaatgtggtcggatataagttataacaaaacgaaacacaaattcagaaaaatataaaagaaactcaacgaaaaatctctcagaaaataacgaaaaatctaacaataaaagaaaagtaagttgttttcaaaagtagttaatggaattgatatcaaaacaatgggttttggtaacagaaaaagaaagtgaaaaaccagaataaatttgaaaacccagtcccgacgataaataaaaatgagttagagatcgtcaataaataaggctgaacaacaaaacaatgaaagtccggagccgaataaaccctactcaaatcaccactcatcgttggcgtcttcagaaggcaatggagcagaattgttctggatggctgggtcctttgcttctccattcggggttccgtcgtcttgaacgcgggttccaagcggcaccgaattagcaccggttgcagccacattatcagtcggaacagttacagcagttggcaaagaattggtgtcaggaacagtttccgacggaacgcgaacagcgatcggcaccgaatttgcaccgctggctgcttccgactcgtcaagtggcattttcccctcagccaccagcttaagccaatccggcacttcttggtcttgtttttggagtccctgtgggtgcgaaacatttaaggcaccaaccaataaaagttacttcaacgagttctttcgccagctcaacatcttccgcgagatcaaaaaacgatgtagatgctacgtctttgatccgacccagtgcgcctaaccacacaaaggaat

SEQ ID NO: 23211 - DNA, 1088 bp, Heterodera glycines
ttaggccggagaaataaaaattaccagctatttgccccaccgagggcaagcacagcgagtcgcttaaatgcacaccctttgacacgtaaaatattccaaaaaaaaagagatagtgattttttctggattaggccggagaaataaaaattaccagctatttgaaatgcagtgggcaagcacagcgagtcgcttaaatgcacaccctttgacacgtaaaatattccaaaaaaagagatagtgattttttctggattaggccggagaaataaaaattaccagctatttgaaatgcagtgggcaagcacagcgagtcgcttaaatgcacaccctttgacacgtaaaatattccaaaaaaagagatagtgattttttctggattaggccggagaaataaaaattaccagctatttgaaatgcagtgggcaagcacagcgagtcgcttaaatgcacaccctttgacacgtaaaatattccaaaaaaagagatagtgattttttctggattaggccggagaaataaaaattaccagctatttgaaatgcagtgggcaagcacagcgagtcgcttaaatgcacaccctttgacacgtaaaatattccaaaaaaagagatagtgattttttctggattaggccggagaaataaaaattaccagctatttgaaatgcagtgggcaagcacagcgagtcgcttaaatgcacaccctttgacacgtaaaatattccaaaaaaagagatagtgattttttctggattaggccggagaaataaaaattaccagctatttgaaatgcagtgggcaagcacagcgagtcgcttaaatgcacaccctttgacacgtaaaatattccaaaaaaagagatagtgattttttctggattaggccggagaaataaaaattaccagctatttgaaatgcagtgggcaagcacagcgagtcgcttaaatgcacaccctttgacacgtaaaatattccaaaaaaagagatagtgattttttctggattaggccggagaaataaaaattaccagctatatgaaatgcagtgggcgagcacagcgagtcgcttaaatgcacaccctttgacacg

SEQ ID NO: 23212 - DNA, 1395 bp, Heterodera glycines
tagggttgagcggtaccggtactggccggtaattaccggtttttttggtaccggtaccggtaccgccggtaaaaatttgcactggtaagaatgggggtctggtcgagaaaagagtaggaaattggtgaagaaggagaaatttttgagaaaaaattaaattttatttcatttagtcatgggattacacacatgcgcatgtggtgtagtggttaaactttctacctttcataatttttcgcctgggttcaattccccacttggatagaatattcttcatattttctttaccattattttaattaaaattttaattttaaaaaatattccaatttttttctttcatgttaagcatcctaaaaacccaaaacttaatcaattggtcatttttttacaaattctgttaacaaatcgcattaaaaattacaaaatttttcccggcggcgcctatcggcaccgccggccctccttgtcccccaaaagtcttggaaaaaacgtgccgcgtaaaaagcggtgttgaaagcaaaaaaaggtcattgatttacatcagggcgcgtatcgaaaatttttcaaaatcagaacatcaagcccaaaaaatcagattctggggtcgaaaatcaggacattttgcaaaattgcttcaaatcagttatttttacaatttttcgatcaaaaatgtatcaaatattatatttttcgtctcccattatcgattttaacaattttggggagaaaattagcaaatcatcaattttagcgcattcggaaagatttttattaaaaaaataaccaaattttgtcataaatcttatattttattgataaaatagtgacattatgccataaaatttcaaaattgtaagtttatttaagaaatcaggacaaagttgggtcactccctccaaatcaggaaaaatctgacaaatcaggacattttaattttatcagatttggacccttcaaatcaggacaaatctgataaatcaggacagatacgcgccctgatttacattaatttacatggccggagaccccttcgcaaaattggaaaattggctgctgaccccttgttttgcaataatctgaattttgaggtctatatctgaattttagtgttctatgtcctgaatttgaaaaaaaaaacttggtcaacctgaatatacatatacttctgaacaattctaatgctaaaaaacaggcactcgcgcgaaaactgaataaaaattttgtatttggaaaattttgtccaaaaatttttatgttctaaaattaccggtttttaccggtaccggtaccggtaccggttgaaaaagttggtaccggtaccggtaccggtttttgcagtacccggtaccggtttttttgcaattaccgattaccgctcaactctaatttata

SEQ ID NO: 23213 - DNA, 2332 bp, Heterodera glycines
atccatgcataacaattactcttactttatgacaacctaatctggctattaacacctaattagtcgaatcgtagctcatttaaggcccaacaaccgaaatgcccatttctctgctttaggcaattgcaatggcaccaaatttggctgttgccctgatgaggtgtccatggcacgcgggccggactttgaaggttgtggtgagcccacctgtgccgcgtcaacatttggctgctgcaaagaccgacgcaccatcgcatttgggcctcactatgccggctgtgaccggtaaattttgagtcctccattttttcattgcagaaaaagcggcgcctttttcgtatctcagcgatacagtatttattgaaaataatgtaccgtaactgtactgtagttataataaatttaaagcattaattgatatgagaacaacttacagtaatttattattgtttacgggtttagactattttcaacatggaaaaaaatcttgaatcaattcctacgaattttgggactcgataaatttttaataattctcatacccagtaattagtcattcattaattagattaataaaatcactgcagttcgtccttcccttgtgagctgtcaacgtacggatgttgcgaggacggcgagacggctgcgctgggccccaacggcaccggatgtggtgccagctgcttgctgaccaagttcgtacggcacatttacagaaatgacaaggctgtcgagaatccgaggagtctatggatgagaatttcaagccttagatctctccctctttttttctttctctctctctcgccctctttctctctctatctttctctctctccctctttctccatttttctttctctctctctatctcctctttctctcctccccctctttcgctctctctctctcactctccctctcgcactctctcctctactcttttctattctcgacttatgctcccaaaaattctcgactgtaaaactcacgggatcacaggtttggctgctgcccggacggcaaaacgcatgcccaaggcgcgaacaatgagggctgcggctgtgagtacgcgcagtacgggtgctgcccggacgggcacaatgcggccaaggggcccggcttttacggatgcccggagagctgtgcgcaaagcaaatttggctgctgtccggacggcaaaacgattgcccgagggccgaacaaagagggtgagtcattgtaattagatgatggtataattatgccattaattagcagagggtgagtgattgagatattcattatccgtgtgctatattcgtatcctgttcttggcacattgaccgaattgtttaacattgatcagtgatcagaagtagaaagaaaatttagatactgagatcagactcattaggaaggttaggagctggaaataacacacagatcaatgagctgctgcgaaataccaaattattgcactgatcagaactgttaagctgatcaaacccgttatgatcaagaccaggcaatatttattactttggaatttcattaatcaaacagtctcagttgattacagttaatgcctcaaccatttgtcaaattttattttgatcaatagatctgtgtccgttcattttattctatgatcataatgatacaaaattgaaaatttaaaaaattattatttttttcattttcccaggctgtccatgtcagtacacgcgttggggctgctgcccggacggcgagacaaccgcgttgggcccgctcaacgaaggctgtgacgattgtcgttatgccaagtgagcattgccacacttttcatccccgttcccctctctactttatcaatcatccccgaaaataggggccccttttgggtataaggtaaattagtggtatttttgtggttctaccatactcctttgatttctaccgtactcctttggaaaattaccattttttggtggttctaccatactcctttagcaaattaccattacttttgtggcactaccgtactccctaatgtaccctctctgtgcatcaggtacggttgctgtttggacggcgtgtccaaagcgatcgggcccgactatgctgggtgcccgaccaccacgcccgcgccttacatgctcggcggtaccgtatcaccatcgtacattggtaagtaccactgatcaggcggctttctgccgactcttatcaattattttgataactttaatcaatcataggattttgattgctataatttcttatctctcttacaccgttttatcggtgttatcgatcaattcccatttcttgctgatcggtatagtattcgatcagttttaatcattga

SEQ ID NO: 23214 - DNA, 872 bp, Heterodera glycines
actagagtagagcgggaccgggacgggaattcccggtcctccgaggtcccggttcccggattttgaaaatatatttcccggtcccggtatggctcccgggaaccgggaaaaacaagcactggtaagaatgatggtctgagcgaaaaattaatgagcgaaattgggggaaagggaaattatttgataaaaatcaattataaatttcgtttttagagtagtatttccaagtgtacaagtggtctagtggttaatcttctgttggttttctacttctttcccttggttcaatccctcttcagtagcctattgacaaaatatgattcatatatttatttaaatgtacacatatatattatatatttttttttaaaaaatccgttaacaaattttactcaaattttcaaaaatttccccggcggcgcctattggcaccgccggactcgtgatgcgacatttgcgccgcacagcaaaattggacatttgcgccgctcagctaagtcgacacttgcgccgcggatatttgcgccgcgacatttgcgccgcctagcaaaaatggacatttgcgccgcgcagtcaaaaataatattttcatttcaatttcactaatatcaataagatttactaaaaaccaacgacaaaaataacgaattgaaaaattaaaaaaaatcactatcttaaagatagacattaattttttttatttttaatcattaaaaatcttacattgattaggttcatcaaagatatgaaaaatgaagaagaataacaactaaacagactgacactgtttgaattagtcctaatcacggatttttgacctcccacggctcattaaatagttggaattgatgagtagggaggggggggggggg

SEQ ID NO: 23215 - DNA, 1570 bp, Heterodera glycines
tcggtcggtcggtttcggttaaaaaaccgaagaaaaattttcggtatatcgtttcggttttttttgaatttttatattttttccaaaaaaaagcaataaaacatttttattaacagtaaaatgtttttaatatttatattgaatttttggaagatttcgattcaaaaaaatcagcatttcggactttcttggacgcaagcggcgtcgacggtagtcgtatgtgtcgcgcgctgtcgaaaataaccgctcacttgccacgcttgtcgccggaatgcaaagaaatttttttgcttcttctgccaaaactaaatgtaaaattccttagaacggggtaataaattgggcaaattaaaatacccggaaattcattggctctctctttccaaaattctaatggatcagaattagacggaatggtgacggcagaacaataagcattgatttcgctcgttgcatttttctcttctataattcaaaaattttaatgaaaaaacaaattgtttttaacgtgagtttgtctcgactactgacgatgctgacagcgtatgatcaaaaatcaagcaatcccttcggctttttagaaataggagaatttggcaacggtaggacctcctcactgaattgttcctcccttaatgattcgaggtgtgaacaaatttggcgtctgaaaaatacaaaaaattcttcatatttcgcctcatattcgctgtttttgtgttttgatttaaggtggtttatcgcattggatgtgttgcctttcttacatataatattcttacaacactcggcacattcgtactcgaaatcattgttgttgctttttttataaagcccgatttgccaaatcacacttccagagggcatgttgactattgctgtaatgttttagatcaataaattaaaaaaagaaatgaaaattagtgataaacttttcaaaagtccgaaaacttaatcaaaaaccatcgaatttcaaacagtatattatgccaaaaattgttattaacgggttatgtcgcttcaaatcgccagtcggtttttttcggtttttgaaaaaagtcggtcggttttttcggttttttgattatttcggtcggtcggtttccgtataaaaaccgaaaaaaaccgaaaaactcaaaaatttctcggtcggttcttttcggttaaaaaccgaaaccgaaaaataccgaaaaaaaccgaccggtccgatctctaatgtcaatgtgatgcactaacctctacaccacattccaaatgtccaaaattgagcaaattttctttatttaataaaaatttggcaaatggttaaaaaaattcaaatttcgtctaacttttttgcattttctcccacgaaaatgccattcttaggggtgtatatttaaccccgaccccgatcggggttaagggtcggggttcggggttgtcggggtatgaagctcggggttcggggtcggggttttccccgaaaatggccaaaaatgtcggtgttcggggtcggggacgcaaccctatttttagaaactaaaaattaattattttggcagtttttagcaaactataaattggagcccta

SEQ ID NO: 23216 - DNA, 1668 bp, Heterodera glycines
aaaatagacaaaaaacaaatgaaaaaaaaatctgaaaactccaaaaattacttaggaaaacgcaataaatttcataaaaatctttgtttttttaatttatagaaaaaaataaaactcaaaaaactgcaatttttgttaaaaaaaagacaaaattttttaaaagcaagaaaacttgagaaggctctgaaatttgaaagaaagattttttttaaatttagctcagaaattttaatttttttttaaattaaaaattattaaaatgagtatttgaaaatataattgatattatatttcctcctctgaaagagagccccccacttgggcttcagcctcctcgatatttagtgaataggaagtctttatttttcaatcctttttttcaagaaatctaaaaaaaaaataaataattaaaaaaaaatttttttgcaactaactttaattgaattttttttcaattaatttattttttacttgaaaatttcataaaatgtactgttgatttggtccgcttacagcaagtgagcgtgcaaagcttcgctattatgaccgcaaatttggccaatgttcaccaatttcgggctcatcagcggaacgtcaaaggcaacaacagcacggcaaattggccaaccgtgccaatgccaaaagtgccgatgccgaactgctgaacgaaaagctggccaagctgtacagttcgcctcaggcaatcaaatcgttcgaaaatttgtgcttcattgccgctctgttgcgcaaaaaggacatggacactaaggtggcttattgcttcagtatttatttatcaggatggaagtcggctcctggttcagttttccgattggaaaacttcggattccaattatggattcgcgaaattttaagcaaaaaattagaaataatgattaaaaaattagaaataatgatttaattatcaattgcgaaaagtatttcaacgactttttagcattcataataaaatagaaaatactaaaatcaaaggttatatttgtctttttttggagggatcagatgttcaaatcattcaattgaaacgttgcggcaaatctactgagaaaaaacttgagtttattgaatgaaatgcaattttaggccttttggacgtgttttaaatacaaaatgccctccttattttggaattgaaaaactgtttttatggtattaaatattttgaaaaattatgccctaatttttaaaaaccttgcaatttctgagcaacggatttttatctgatcagagagagccatgattgacatcagagcaattttgtttgggcaaaccccgaatttcttgatcaatcaatcaatgctggttgattatagaatttccattttagcaagaccaagaatggaaatttgttgccatggtgttcgatcggctgtttctgatcattttcacgttcgcttgcttgttcggcacgtgttggattctcttccaggcgcccaccttctacgacacgcgacagccaaaacagccgatgatgagcttatgataatgatcattttttaagcaattttattgggcaccagttttgccaattaaattagggacaaatggactttagaactcactcgtttttattgtttatttcattaatagagcatgtgaagggctcttgaatgataccaagattgttggatttggttgacaatgaaa

SEQ ID NO: 23217 - DNA, 966 bp, Heterodera glycines
gagctgcggaaattgtgaataattctcagaaaaatggctatctctttttaggaaattttctatctcgtaaccccgatgctaatccgttccggagagcctcttcaaaattttttccattaccgtaagagctgcggaaattgtgaattaattctcagaaaaatggctatctctttttaggacaattttctatctcgtaaccccgatgctaatccgttccggagagcctcttcaaaattttttccattaccctaagagctgcggaaattgtgaattaattctcagaaaaatggctatctctttttaggacaattttctatctcgtaaccccgatgctaatccgttccggagagcctcttcaaaattttttccattaccctaagagctgcggaaattgtgaattaattctcagaaaaatggctatctctttttaggacaattttctatctcgtaaccccgatgctaatccgttccggagagcctcttcaaaattttttccattaccgtaagagctgcggaaattgtgaattaattctcagaaaaatggctatctctttttaggacaattttctatctcgtaaccccgatgctaatccgttccggagagcctcttcaaaattttttccattaccctaagagctgcggaaattgtgaattaattctcagaaaaatggctatctctttttaggacaattttctatctcgtaaccccgatgctaatccgttccggagagcctcttcaaaattttttccattaccgtaagagctgcggaaattgtgaattaattctcagaaaaatggctatctctttttaggacaattttctatctcgtaaccccgatgctaatccgttccggagagcctcttcaaaattttttccattaccgtaagagctgcggaaattgtgaattaattctcagaaaaatggctatctctttttaggacaattttctatctcgtaaccccgat

SEQ ID NO: 23218 - DNA, 1376 bp, Heterodera glycines
  unsure (1)..(1376): unsure at all n locations
tcaagaaaataaataataaatanttgaggacgaatttcntgggaaaatttttcattttttctcggtatattttctgaagttttggtcaattttcagtggtattattttctgaattttttgggaccgattcttaggggtgtatttttcgtttttattgcatttttgataagaaattcctggaaaagaccaaaataggtgcgctaactgcccgttttaggttttttaggtgctaaaaagtcgttctaaatcaaaaataattgttcggagaaaatatgattttcatgattctcatctagactgagtttttcgtgcgtttcaggcctccacagtccaggaaaaatatggatttccatataattctcagccttagtaatgagtaagaaaataaaaatgtttccattaaattagagtgaagcgggaccgggaattttgggcaaaaccgggaccgggaattgccgggacctgagaagccgggaccgagaccgggacctcgatttttgttcgggaccgtgaaccggaccaaccgggaaattttaaaaattcataaaaaaaaaatttttaaaattcaaaaaaatgcaaaaaaattcaaatttaaatttatttcaagtgaaaataaattaaaattaaaattatatttttattttgttttttattttataaaatccaaaaattaaagctaaattaaattaatgaaaattttcaaaacaaattttcttcaattatttcaaacaattaatcattttgaattaaatgatcgaattttattagtttattagaaattcagatttgattttcacatcacttttttcggcgcgcttttcccaaaaaattttggcaaagaagggtggtccggcggtgccgataggcgccgccgggggaaattttgaaaatttgagtgtaatttgttaacagattttcaacaaaaaaggctggttttgagattagtaggcttaatttgtacggattttcatttaaaaagtgataaaatagtgtcaattaaacaaaagtatgaggaatcattgttttcgatagtaaacccatgagtatacaaaaagaaaattcaaaatattataaattctgtagagggattaaaccatgtgaaagaagtagaaaatcaagaagattaaccactaagccatgtgcacaattggcagtgttacttttaaagaatatattaattattattttttatttttttccgttgactctaattttcatcactaatttttcactcagacccccattcttaccagtgcttgtttttcccggttcccggttgccctaccgtaaccgggacctgagattttcaaaaaccgggaccgggaaccgggacctcggatgaccgggaattcccggcccggtcccgcttcactcta

SEQ ID NO: 23219 - DNA, 2600 bp, Heterodera glycines
  unsure (1)..(2600): unsure at all n locations
cgcctatgggcaccgccggcccctgtgtccaaaaaatttttttcggaaaaagcgcgtcacaaaaaaacatgttttttaattttgactaaaatttccaaagtgctgatttgaccccaaatgatgcttcttgttgtctaaatgctggttttgaaaattttcagtttgcagccctgtttttataatgtaaaaagccgtttttttaatcttatttttggggccaacttagttttaacctcgttttgtccttagtttataatgggagactaaaaatataaaatttgatagcattttgatcaaataaattgtaaaaatttactgatttgaaaaaatgttgctaaatgttattatttttgagcttaaaatcttatttttcggccttggtgttcatattttgaaaaattaccgatcggcaccatggttttgaggggccgtcgggtgccgataggcgccgccggaaagtttttcgtaatttttcatgaattttattaagaaaatttgttctaaatctcaaaaattttcaatatttcccgccttcgcggatgaatttttttaaaacgctcggagtccacaatccccgaattagtgtcgggggtcggggggctcggggtcggggcttaaccctaaaataaaggggcagcaacaccaccatatcgttttattcacagtcaacacaagagacacattaataaatttttaaaagtgagaaataatcaatttactaacaatttgaaaaaataaaattaaaagcctgaaaaagatttatttcaaaattatacattgtattaataaatcaatctaaaaagtgtgatgagatatatttaatataaaaaaaattaggaaagacaaagatggaaaatcccagcaggtctctaagaactctgccaagggagaatttaatagtaaaaattaactatcccaaaaatacagaaatattccaatgaaaaatcactgacaaatttggcattgtggatcaccgaattctgactccggcattttttggtcggaattccgatttgtaaatttttctttaaaaatttgcacaaaaatactaaaaatagcactatatgtaaaggaaaataattaatgattaaaaaatgtactatcttaacagaacaaataaacaaaaaatacaatttaaaaattaataaagctattaaatttgtaaaagaaaacaaattaataaacagcgttgctttttgtcatctatataatgaagagcataagaaaaatccaatcgtaaagtaattaattgaattaaattaaataaatatttttattaaaacacttttaataaatcataatattaaataattaattattcaacattcattaaatgtggcaaaaagaaacattttaataaaaattaaaaacaaatttatcatatataaaaaaaatttttaattaattattttttaataaaaaatacaattttcattcaaaaatatacttttatttgaaaaaaatataggaaatgaaacctttgaataattaaaatacttgaacaaattgaagatttaaataggaaatgctgaaaatctttaaacttttataatgaaataatttgagctaattgtttaacaaaaataaatttgaatttaaaataaaataatttaaaaatatgttcaacagctgccatgaaaatgaaaaagttttaaaaatattaagacaaaatttgaaattttaattcatattaattaaatattttacaaaactttatttttaatatcacaattttttaaaatgattttaatcattcaaaaatgaaatttttatactaaaatgattattctattgttctatgtttatttattatgcaaacaaatcaataaaaaaatatttacacatacaaaaatggaaaaggaatattattaaatgaaatttacattttctagcattaataaaatggaatatgtgtaataaaactactaaatgttagtaaattaataaaaagcagtaagtgataataaattttattataatagcaattgtaaaaatacataaaagttaattcataaatgcgaaaattcatttctgaccgtatacatatacatgtattatatgtattctattggatcagcgagaaatttaaaaataaaatttactaagaaatataaatatgattaacaaataacaattagttgattataataaaaaatattacataaacaaaaaaatgaaaatatgtaatttattaatttgttaaaagaaaagcaaaaatcattactcataaatattaatcatagcaataccaaaatatttatatacaaaaaactcaaaaatatttattgcattcataaattaaagaataaattgtaaatattaaacaaaacatcattaaggactgcttatacgaaaaagtgacatagtgaaaaattggcttataattaacttttattcattcaaaaaatactttttatttgaaaaaaataaaggaaatgaattggacagaacaagcacaatttatgtaaattttgaaattatgcattcacttattttaaaaacacaaatatttatattatataaaaatattaaaaaaagttgagagaaactaaaaaccttaagagttatgatcaaataaatttatgacaaantttattttt

SEQ ID NO: 23220 - DNA, 1526 bp, Heterodera glycines
  unsure (1)..(1526): unsure at all n locations
aagaggtacaactgtgattagaagaggtacaactgtgattaggagagagaggtacaatggtgattagaagaggtacaactgtgattagaagaggtacaaaagtgattagaagaggtacaacagtgattaaaaaaggtacaacagtgattaaaagaggtacaaaagtgattagaagaggtacaaaagtgattagaagaggtacaacagtgattagaagaggtacaaaagtgattagaagaggtacaacagtgattaaaaaaggtacaacagtgattaaaagaggtacaaaagtgattagaaggggtacaacagtgattagaagaggtacaacggtgattagaagaggtacaattatggtttaaaatgaaataaattagaaaattgcattggatgcattataaattcatcaaattaaaaaaatcatttacttattaaaaataaagttagaaatttataattagaatatttatttaaattgaaaggaattaatttctcgaaaatttaaattaaataaaacagttattcatcagaaaataatttaaaataaattaataaaacaatattaaattaaataaaatacttaaataatttaaattaaaacataattcaccaaaataatttaatttaaattaaaaatttttatttattattaataatacaaaacaaattaattaaaaaatgtaaaagtaaacaaaaaatgcatagaaaattaatgtacaccgtctggattcgaacctgccccccccccagaatgatgccccagaatccccaatcacacagggattctgaggtcttgacgatgtcaaaagtaaaatctgatcacgtattcgtgatcagcagcccaaataacccctaaagacatatttttggaagatttttgtgaaaaaaattttccactcaaaaatcctggtcacacccctttggtcccgaatcccaaaatcacttttatttttgtatctttttttaaaaatgtgataaaaaggtgaaataaaatttatataatagagcaaaaaattgcggatttttgtagtattttatttttctagagtgacttttcagaaccgagttctgaatttttttctgaaaattcgaatttttccagaaattctggaataacttttttcttttttgagatataaatttcaaataaatcccataaaattctccatatttttctccatttttaaagctttatttcattaaaatagtcccacattgaagtgagctatgaattttcaaatattaggccaaaatcccgagggccaaaaaattgccaaaaaataaagaatttttaaaaaattccaaaaattctgaaacttaaaatagacatcatattcgtactcagcaccttcaaaatacccagaaaaaaatttttcaccctctttttcaacccaaaaaaaatttccgaaaatttctagggggcctagctcganaatttttgaaaatttccngccatataatacactattcgatagcattttaaaagctctacaaaaaatgtctaagacatttttcgctaaaatcaa

SEQ ID NO: 23221 - DNA, 1770 bp, Heterodera glycines
aatatacaccgcccggcttcgaactttcccccctcccaaaaaaacgacgacccagaatccccaatcacacagggattccgaggtcttaagtacgtcagaagtaaaatctcgatcacgtattcgtgatcagcggcccaaatacccataaagacacgttttcggaagattttcgttgaaaaaaatttttcactcaaaaatcccggtcaccccccttcggtcccgaccgccaaaatcacttttatttttgtatctttattttaaaagatgataaaaaggtcgaataaaatttatataatagagcaaaaaattgcggattttttaagtatttaaaatttcaaaaacacctttacagaaccgagttctgaatttttttctgaaaaatcgaaaatttccagaatttctggaataacttttttcgtttttgcagtataaatttcaaataaatctcataaaattctccctatttttctcgattttttatgctttaaatgagctcgaattggaccattttgaggcgagttatgaatttttaaaatttaggttttaattttcaagggccaaaaattattgatttttcaaaatttttttaccaccctccaaaaaatccaaaacgcaatataaagtgcatattcgtgttcagcacctcaaattagcccagaaaagtattttttggcaattttaggagcaaaaaagtttctcatgaaatgcaaatccatggggtcccccctttggttttgagtttcaaaatcacaattaattttatatctttttttatattaaagataaaaatatgggataaagcacattagatagagcttaaaattctctacaaaaatgctctaagacaatttttcgttaaaatcaacacctgacgagttataggcccgggactgaaatgtcccggtcaggccaaaaaatttttctatttccggaaaattttgaaattttttcaaaaatgccaccaatcgatagagctcaaaaaacggttgcttgaaagtggtctccgttttcctgggaaaaatcggcaaaaaataataaaattcaaaaacgaaaaattttcgagggggcctagctcgaaaaattttgaaaatttttaaaatctgaaaacgccatcggatgcagctttaaaaactacacaaatgctcaagcggcgccaacccgctccgcttaacccccagcgagttattcccgaaaaacggaaaatgccgaaattgggtgccaaattttgcaattttctgcagcattggcatttacagatagccccgccaaaccaacggcattcagtgccaaacattccaacttaaaatcctacctccaagcattttccgcccccacttcttcccgcaaagttacaggcctccaaagacggacaaaaaaaatttcacgccgtttcagcgccgccggcgctgaaccgtccaccggagcggaaaacccatatttttcctgaatgcgcctcaaaaagttgtaagacccttccaccactttcagacccctcccgacagccgttcgactcaaattagtttttaagacgagttgcaacttttctctatggtagtataaactagcgtgtcgcgcagtagttgctcggtgtagacagtatacttttggtatatatgggcgggcgctgacatgagcgcttcgcgcaaaggacttcgttgctagtgcatgctcggcttcaaaattcaaaattttaataggcttatgtttttttcaaaattttaaaggcgacatttgcagcttcgcggcctcagacgggcgcttttgcatccg

SEQ ID NO: 23222 - DNA, 1647 bp, Heterodera glycines
  unsure (1)..(1647): unsure at all n locations
gcttttcctttttgcagactgtacacatcctttttgtagtcaaagtcgaggcaatttttgcgttttttcnttcaatgtcaaaggatattgcgaaatatgtgcacagataaaatatgaaaaaatattnattctcnccttttccatttgcttttgcttaaactgttgcataaatatttttgtgtaaaaaaagaaaagtggccgattggctaaaagggaaaagtggaaactgttgttggattggaaaacgaacgttgggcgggtgaaggaatggccaaggtggaggaggacaggacggatttggccgcattttatgaaaaagtgagaaacgactgactgggaaagcaatggaaaggaaagaaatgttcgttccattagcatcatttgcgatttttccgctaccggacgatgggatttttactgagaaagccaatcgtccaatttttcaaaaaggcttatcgtctcagtttttatgagtagaccaatctcaaattgtatgaataggtcaaccctcccattttgtctgagtagactaattgtccaatttttctgagtaagccaatcgtccaatttcataaattatataatattatatcaaatttggcctgagtggcccaattgtcctcctattttgtctgttaggccaattgtccaattttttcagggtgggacaatccagcaattttatgagtaggccagtcgtccaatttcatctatgtatcaaattttgcctgaatggcccaattgtcctattttgtctgtgtaggccaatcgtccaatagtttgagtatgccaaatggtccaattttggggattcttcctggcttgatcatttcgatgaatattatgtattttttctttgactaatccttcaaactttgctttggtcaatccgaaaccatatcccatactgctgatcatttccattttactgcttctgatcagtgtttattttctcgttagcgattacctttttttgttgttcagtgtgaccccttttcctctgatcgttggcgattacagtatttttccaaatccaattcaagagatgtcccgtgaaagtctggttagtttatttgattaaattaaaaaatatataaaaagttccccagaatgttaatctattttgcacttggcaaaaatatttttcttttatttgtgccgctgaaatttgcctaaacccaactcattaaaagccccagagattagataagagcatagaactcctttttttgtagtggccattctttgcgataattttcccatcacaaaaatgtttttagtccccaaaaaattgcccgttgaattggtctttgatctgagccgtttcattaaatttgatcgaaaatggtcgagaaaatgccgagtttgctttttatttgaccaatatttgttggcacaaaaccgatattggctgaagctgatcaaaaaattggtcttttcctcaatacaaatgattttcatgatcaattttcagattactgagtgcattcgttccattgagagcttgcgggaatacattttggtggacatgaaagacgtgccggacctccgaaaaatggcggcacgcgccagttacagaagtatgtttaataatatttataaatttaattaaaaaatacttttaatttcacactaataagtattaca

SEQ ID NO: 23223 - DNA, 1267 bp, Heterodera glycines
tcgatgtattcttttcataaaatgtattatgtcattcattgttaattgttcgtttataacaaaacatttatctaattgtttttaattatttttgtttcaattataattgttgtactcttaattttatgtaaatttcgagcaatattatatgttttgatggtttatttaaattttatcacgaatagggttgtaaaataaacagggtttggcgtactgatgcatttaatacatttttttccttttctctctttctccgttctgtctcttttcctctccatttttctcgttttcactcttctcacctcactctctcgctctctttcttttctacccatctctttctctctctctccctctctccgtcactcttcctcacgggtctgtatcgtttcggcgccgccgtttcggcgccgccgtttcggcgccagcccttgtttttggactataactttttttgttgtcgatcaaatctaacaatcttggtatcattcgaaagctgaacatgtttagaagctatttctaagcaattgcttagcgattagtcgcttactaaaaaagttctaactgaaaattgcaaaaaagtcaaaatttttgtgattttttcttaataacttctttacaggtcaaattttttttttggttttttgtaggtctaatagggcttctgaagggctttagaatgataccaagattattagatttggttgtcaaagaaaaaagttatagtccaaaaacaagggctggcgccgaaacggcggcgccgaaacgacctagtccccaaaataatacccctgggagaagggagtgggaaacatgatttcaaaattttcaattttttctagtctaatctactcaaaacggttcagaattcgataaaaataacattcacggtgcgaaaaatggggtttgaaaagtttattggggaaaaaaagactttacaaaataatacccctgggagaagggagtgggaaacatgatttcaaaattttcaattttttctagtctaatctactcaaaacggttcagaattcaataaaaataacattcacggtgcgaaaaatggggtttgacaagtttattgggggaaaaaagactttacaataatacccctgggagaaaggagtgggaaacatgattttcaaattttcaattttttctagtctaatctactccaaaacggttcagaattcaataaaaataacatttcacggtgcgaattgctttttaatcctccccaaaaatgtaggcttaacttttttagtgaaaa

SEQ ID NO: 23224 - DNA, 1017 bp, Heterodera glycines
tttttctcgtccatatgaaattgcgcctttttggttaattttgggttgaatctgttcgcccatgtgcccttgaagtaaagcgcgttgatcagcaccaaactgaaaaaaaaaatgaaaatccattttacaaccatttacatttgtttttgctatactaaaatcaaaatcgtaggaaaagaaaaagaataaatattcgtagctttttgacataaaataattaattttttttccgggagcactccaaaatttcgcctcaaaattttttaaattcaaaactagaaattttcaagaaaaaaaatgaataatttttctaatgtttttttgaaatttatgatgatgaattattaatttctcaaaatttttgttaatttctaatttttgaatttaaaaaaaaaattttttttcacggcgaaaattctgttccatttttcttcgtaattttttttttgcggcgatgtttttggtgcaccatggaaggaaacttaagctaattgggtattttatctgattttttatattacaaaatattgttttcttttataaataaaagcagttggtttgggcatttgcgctttcttaccgagcgttctcgtcaatgccttcggcactgatcagatcgcggattttctcatgggttgcttccttcacgaatttgttgattttcttaagacaaaaaatgtccggccgtcaattaattgaattttttaattgaaaaaaactggcactaataaaagtatgccgtttttgaaacttattaaaaatcgaagggggtggggaaacatttttggttttacaaaaaatttgcttttcataaaatgtcgggaaaacgtattttcaaggggttttctggggggggggggggtcggggtcgttttcgcgccagtgcagtttttaaacttttttcattgtcaaccaaatccaactttcttggtatccttcgggagccctaagtattcgctattagcctgcaaaattgcgaaaaatttgattaaggttcaaaaaaagttatggccagaa

SEQ ID NO: 23225 - DNA, 2375 bp, Heterodera glycines
gatttcatttcttcaaatccaatctcacgtccagtatgcggttgatttacgtaatccaaaacgtttccagccaatcgttttttattccgccgctcaatcattcgccaatttatttttcacggtgcccaaacggcaccggcggaatcgcaaatcgttctgcacgagagcaacggggtgcgcggcatcgtcatagacgcttcgaagctcttccttcttaataaaactgaaaatttcgtccttcagttcatcgggactcgaaaggggaaattttgttggattttgaagaaaaaacaaaaaaaaattatacatattttttttattcattcttattgccagatgagagtactgtagtcactgttattgtagaacaagtgtgaaaaatcgacaaaatggacagatcaaagtactgctgaaaagcatcaatttgtgtggaaaaaagacacaacaagatttgataattaattaatttagtggtgctgcttcaaaaagttttttcttgacaaattttgttaaattcatcaaaatttttcgaaaaacgcccatccgcacacctccgaacccccaattccatgagatatgaaattaacagcccacaatccacaaattagccatgctgtagtgaaaattttgttaaaaatatgatcaaaatttttcaaaattgatctgtgctggcacctaacattggggggggggggtagcccatcccctggaaccaggaggatgcctgcgcctagctatgcccttggtgaaaaacgtttcatggtgtgtgcgctaatttgtaagatcaaattacatatatacaacaaatgattgacaacattaatgaactgacaaatgtgtctcttttcaacgcctcctttccattggtgttttgttctatagacatcattaattatccatccgtccgtctctcccactttgtcaacttcggcaagcctcagccgaggcaaaatgtttgaaaatggggccgtgccggaaatggtggacgcgtcattgtgatatgtatgtcaatttgaacgcggggtgggattggggatcatctccgcaacaacagcacggcatcatctccatccacgccaaatccaggaaaatccagatccaggaaaaatccaggttgccgaaaaatgacctggacctggacctggatccaggaaaaatccaggcctggatccaagtccaggtcgaactctagaaatcacatataaagtgcagaaagtcgggactctcgtaaggttaaaaacctctggcctaattaagggcatcaaataattttttggaaatcctttttcaaaatgatatacaattatgttcagaagatgtattaaataattaatgagcataattagcgcaaaacaattaattagtgataattagggaagcaacttttagtgaaaaaactttttttgcttaattgttttgaagaaaggagctcaaaaaacgcatttctgcgttaaaattttttcatttggacgtcacttttcgtcactagaaatcactattttggcgacttcgtcactaaaatagttaaaaatcactattttgacgttttgtcactattttgtcactatttcgacattttttggaaaattctttaacaaaaatgcaataaaaccaaaaaatacacccctaagaatcgacctaaaaattttttcaaaaaatacacccctaagaatcgacctaaaaattttttcaaaaaatacacccctaagaatcgacaaaaaaaaaatttcaaaaagcactcctaagaaatgaaaaaaattttctcaaaaaggtattttcgtggcaaaattttaattttaaaaattatttttttatgtacctattttgtttttttgcccttaaaaatcccagccctactcatttgcaatgcaatcagtgaataaaaattatttttgcttaatttttggctgaaaattatgtcactattcgtcactattttggactttttgtcactatttcttcactattttagcatttttactcactattttagttaactatttcgggatttttcgtcactaaaagttgctaccctattgattactttcaatattataccatagtaaaaactaaagcccagcgcgggattccgaattttttttggaaacaacgggatttgcgggattaatcccgccggattccctcccaaaacaattttgattgactccgacaaaagtaattagatttttttgtcgacaaacagtaaaagccgaggcagtacgaattgggtttctctccattttatatggatttgtaaatatttccaaaaaatgtttcattaaagaatttttcggaaaagaagccaccagaaaaaatacgtggaataaaaaagtggagtgtatggcaaaaaaaaattattttggcactttccgctc

SEQ ID NO: 23226 - DNA, 1236 bp, Heterodera glycines
  unsure (1)..(1236): unsure at all n locations
cagaataattacgccgatactaatgtttctggaatttgtttctctgcgcgttngtttggaaaaaatttggaaaattggctatctctttttctgctcaacagtaataggaattccaaccgcattctcagaataattacgccgatactaattgttctggaatttgtttctctgcgcgtttgtttgggaaaaatttggaaaattggctatctctttttctgctcaacagtaataggaattccaactgcattctcagaataattacgccgatactaattgttctggaatttgtttatcggcgcgtttgtttgggaaaaatttggaaaattggctatctctttttctgctcaacagtaataggaattccaaccgcattctcagaataattacgccgatactaattgttctggaatttgtttctcggcgcgtttgtttgggaaaaatttggaaaattggctatctctttttctgctcaacagtaataggaattccaaccgcattctcagaataattacgccgatactaattgttctggaatttgtttctctgcgcgtttgtttgggaaaaatttggaaaattggctatctctttttctgctcaacagtaataggaattccaaccgcattctcagaataattacgccgatactaattgttctggaatttgtttctctgcgcgtttgtttgggaaaaatttggaaaattggctatctctttttctgctcaacagtaataggaattccaaccgcattctcagaataattacgccgatactaattgttctggaatttgtttctcggcgcgtttgtttgggaaaaatttggaaaattggctatctctttttctgctcaacagtaataggaattccaaccgcattctcagaataattacgccgatactaattgttctggaatttgtttctctgcgcgtttgtttgggaaaaatttggaaaattgactatctctttttctgctcaacagtaataggaattccaaccgcattctcagaataattacgccgatactaattgttctggaatttgtttctctgcgcgtttgtttgggaaaaatttggaaaattgactatctctttttctgctcaacagtaataggaattccaaccgcattctcagaataattacgccgatactaattgttctggaatttgtttctcggcgcgtttgtttgggaaaaatttggaaaattggctatctctttttctgctcaaccagtaataggaa

SEQ ID NO: 23227 - DNA, 947 bp, Heterodera glycines
ttataaatctaataagggatttttatcaatattaataagacaaccattgttaaacacatataatgattaattcaattcattttgattgataaaaaaatttaaaaataaaattataaagcagaaaaaatgaagacttttcatttatcattagcctgatagaacctagcttaatgtttaaactaaaatgaattcaatgcaattaattgtagttcaacatttacaagaaaaatgaaaattataatttcattccagttgcatattcggagtggaaatgaatacttttgacacaacccgtttttaggtctaaccctttacagaaatgtgccaaatgttgtgtatgcaacaaataaaaatataaattgtggacggtgaattttcatatattttattggagaaaaacagcagaaattggtcggaggaaaaatgcacaataatggtgaatgaatagacgaatgccaagtgaaagggaatggacagggcttcagtaacagtcaatcaatagggagaaaggaaattgattaacaataagaagagagtgcataaagagagagaaatagtgaataaaagatatgcactactaagtgagagaacaaacacggtgtgatttggtcacacctaacaccaaacaacattacaataagtataaaaaacgatcatggttctaaaatagcagcataatttgaacgcataaaaatttttattggaaaaatatggttttaatctaactaactttgaaaaacgttattataatatttatctttacaaattaaccggaaatagtgataattttaattctagtttatataaaaaaaattacgtacgaagggaatgattacgcacgaaatttcaataaaacgctgcaagaaacaaaaaattataatttatttaaaaaattaaagagattatcatgagaaataaattattaagaaataataaataaatatctc

SEQ ID NO: 23228 - DNA, 1414 bp, Heterodera glycines
  unsure (1)..(1414): unsure at all n locations
ttttggatgatgtttttgatagtattataaaataaaaattttcacttctnttctctttttttgatagtggtttcgaccctataatatttgtatgataattttctaaatgattaggtttttaagagtaatgcaatcggttggtcttttgagtgggtattttcaaaaagcgtttaaaaaggtatgtgcgcaactaagtttttataatatacttttttaggaattttttctgtgaattaaatgacgatcaaattaaaaaaaattggaaagtctggaaaactataccgtggctgtttacgttgagagcaatttcccctatgcacaatggctcacagaaatcaaagattatttgttttcttttgtatattacgaaagaaatatgcgctgctgttgtgctcattctgttgttccgggaacctataatctctttgtatatgccagcgtggcaatcgaggacaataaggaaatcgtaatatttttccatcgcgatgtattccttcgatctaatcccagcaatatatatattagtaatctttaccgggttcgaatgagcataagacaaatagttttgttactgaacaaaagagagtggttaatttctcctgtaactatagtagtcaattcgtttctaaattacgccgacgggtaggtattttttgctattattgcctatttttaaacttaagtgaattgcttaacaaatggaaatatttgccatgtcgtgccccgatattgaaagaaatatgttgcgataaaattgccagaagtaagttttctatgggacaatatcggtcacttcctcttagttttaaacaaattttttcaaaaattgaataaatatttatttctgaattttttgtattgctttttaaaagtttatatttctttctatatatttacataaagcattaaaataatttacttagtactttttggttttgcgtttggccaagaaaatagcaattgttgttgtctttctaatgaagagaaacagcagttctggcgttttattgagcttaatgactaaaatggaagcaatttcttacaattgtcattaagaaagtacatccaaaagtttttagcattgagaggaaataataaaaacaacaaaaaatatgacaatttttaaatatattacgacaatcaaaataaatgtaaatttgttttgctgaaaatggattaaatagttaaactttaataaataaatcaaattgctaaaaagaattaaaaatgaaataatcttttatttagtttaataaacaaagatttttaatttattaaaatacctagaacaaatgattataaaataattattttattaaaatttaattatatctatttccaaaatcgaatactttttaaaggcgaatataaagtaaattttattatgtttattaattgaaagcataataagtag

SEQ ID NO: 23229 - DNA, 1223 bp, Heterodera glycines
  unsure (1)..(1223): unsure at all n locations
tcagaagtttcgcttttcaaaaagctcgttgggatcgtctgttttcggcaaaatagtgcaccacagcaaaaaggcgggagtttgaacgacacttctctagggttgagggtgttntgagtcagaagtttcgcttttcaaaaagctcgttgggatcgtcctttttcggcaaaatagcgcaccatagcaaaaatggcgtagtttgaacgacacttctctagggtttgaggtgttttgagtcagaagtttcgcttttcaaaaagctcgttgggatcgtccgttttcggcaaaagagcgcaccatagcaaaaatggcgtagtttgaacgacacttctctagggtttgaggtgttttgagtcaaaagtttcgcttttcaaaaagctcgttgggatcgtcctttttcggcaaaatagtgcaccacagcaaaaagggcgtagtttgaacgacacttctctagggtttgaggtgttttgagtcagaagtttcgcttttcaaaaagctcgttaggatcgtacgttttcggcaaaagagtgcaccacagcaaaaatggcgtagtttgaacgacacttctctagggtttgaggtgttttgagtcagaagtttcgcttttcaaaaagctcgttgggatcgtccgttttcggcaaaagagcgcaccatagcaaaaatggcgtagtttgaacgacacttctctagggtttgaggtgttttgagtcaaaagtttcgcttttcaaaaagctcgttgggatcgtcctttttcggcaaaatagtgcaccacagcaaaaatggcggaggttgaacgacacttctctagggtttgaggtgttttgagtcagaagtttcgcttttcaaaaagctcgttgggatcgtacgttttcggcaaaagagcgcaccatagcaaaaatggcgtagtttgaacgacacttctctagggtttgaggtgttttgagtcagaagtttcgcttttcaaaaagctcgttaggatcgtacgttttcggcaaaatagcgcaccacagcaaaaagggcggagtttgaacgacacttctctagggtttgaggtgttttgagtcagaagtttcgcttttcaaaaagctcgttgggatcgtactttttcggcaaaatagcgcaccacagcaaaaatggcggagttggaacgacacttctctagggtttgaggtgttttgagtcaaaagtttcgcttttcaaaagctcgttgggatcgtcctttt

SEQ ID NO: 23230 - DNA, 1782 bp, Heterodera glycines
  unsure (1)..(1782): unsure at all n locations
agggcagtgcgttaccctcctaccactttcctgaagacggaactgctggtccgcatggcgacatttatgcaggagttcgacctgctgcccgccaaactgttgcagacgcccagcgcacgccatgtgggctcgtggtacaaacaaagtgagtgaatcattaccatttggcatggtacagtaatccctaatccagcgggtaaacctgttggtcaatctaatccacaatccgtgccaaatgtccgttggggcctgatcagaaattgtttgggcttagtaaccctaaacagcttttggtcgaaggaatatgatttacatgaacttcatattatcgaaaatgcctggtccgacgataattgtctgggctaataatagataatcagtgctgattaaggaagattgacaataattatgttcggataagctaagcaaaatcgttttaaaatcgacttctgatcacttcatttttaaatatattattgacattgcaccgttcgttttcaaattgatcagcattttttattatccaaaaaactaattctgatcaaatccaccgaggatccatttcaaacagtaccaagaaaagagttgtttggatcatgatcttgtgattgtttggatcctgatctgctgatcagttctcccagccttgatcaaattgattaaattaacttcacccacatttcattcaggcttctctgaactgctccatttcgagggcctcgagcccagcgacatggtgttggacaagttcaacaaccaattgcgcacaattttgcatcgtcacaacaccgtcgtggagacaatggctgaggcattgctcgaactgaaggaaagccacggcgtggacattgcatgcgaacgcaacattcaggtggagtggatgaattgaattccagatatttgttgacacatggtatcgagtcttggcaagaggaaagtgttcgagagtctcgactcggcagaaatctcagccttcttgggtctcggctgaaatctcggcgttttttgggtctcgagtctcgggtcatgaataacatgaacttgtagctgttttttcgtcaaagccgcccctaaatacttttttttcattgaattacggtcccgaccctccgggccaatttttcgtcggcagaaataaaccaaaagcataattcgcacgggaattcctattttcagttaactaattttaatttaatttaatttaattattttattcatttgtgatttgtgcatttgttcagtacttcttggatcgtttctacttgaatcggatttccatacgaatgttgcaaaaccaacactgtaataatattattaccaaattattaaattttaattgttttaaaaaaacatttaatttcctccctttgtaagtggcaattttcgccgccgcctgcgacaccaatggcactaacaatcagtcgcgcaagacagtcgtggtggacccggccggccatgttggacacattgacccgcagtgcaatgtgcgcgacattctgctggacgcctacgaaaacgcgagataattaatttattatttatcaattaattcaattcattttaatatttattttttaattaattattttttctttaaaaaaataaataaataaggcactcatttgtcagatataaaacactggtgatttatgtatttttannattgttttcanagttaaattagacattacgataattaaagttttcaagagaaaatttttatttaaatcttaaaatatttatttattaattaaacaaaataactgcctttcgcacttttta

SEQ ID NO: 23231 - DNA, 949 bp, Heterodera glycines
gaaggtgtgcagtcaatgcctgtactgaaatggcagggatggaagggaccggcgggtgctgagaccttataaaataccatcatatccatactttttctcaaatctccattaacttgtaatttttggtatctttcgatgccctaactgttctctattagtatgcaaaattttaaaaaattccgtcaattttgagcaaagttatagccgaaagtacacaaacaaacaggttttcaaacttttttgaccataattttgaaacaacgaaattttttgaattttcaggctaataaaaaagacctagggctgtcaaatgataaataaaaaataaaaataatttaataaaataaaatgaatcttcttgtttagaattcgatgcgtgccaccattgagcatcaccatcgggtcaaaggctttgatgccgactcttccgatgatttggcagaagtgcgtgcctgcattgtgctcggcgcggaaaacctttcaattaaggcatgtgctttcgattttttggcactttatttttgtccgcttttattttcactctgaccactcacatttctcatctttctcagatcagtgatcgcggtggtggcgtgccgagtgccaagctggccaatctgttccattatctgtattcaactgcgccaaagccgtcacgcgatgactccaacacgccatttgtaggcaccaaccaatgaataaaaactctgatcacgctttcccgtcaataaatatcttatcacttttttttgccataggctggttacggatacggtctgcccatttcacgcctttactcgcgctattttcttggcgatctgtcactgacttccatggacggttatgggacggatgcggtcatttcattgaaggtagataattcgatcaattagagttgtttaactgggaaattcgctcctctcttcctctcgagaatggcacgggaaat

SEQ ID NO: 23232 - DNA, 1874 bp, Heterodera glycines
taaaaccctgaaaaacttgctcattcacccaataacctcccagtgttcccttttagtgtgtgataattaaacaatgggctgtttctcttcaacccttttgccttttatgttcgccgcctttttggttacgctgatcagcgaacatgccgatggcactggactaccgcagcagagttgctgttgtggaggcggaggcggtgggtgatgttgttgcggtggtagcggaggtggacttggcggattaagtttaggcggcggtggaggcggctgctgctgttgcggaggagggggcggaggcggaagatgaagtgaccaaaaaatagcggaaaaattgggaattaatcgaccaaaaatttacaaatggaaaaaagaaattggaatttattattataaaaagaaaaaacaggaatttattgaccaaattgatgaaattaaaagaatgccaaaaaatggaagacagaagcaatttgcgaaagagttgggcattagcaaagaaacattaagaaaatggaaaaaggaatttggcattgaaatgagcaaaagtaaatttgaaattaatttccaatataattattaatattaaattttattatattcttaggtccaattcgattcaccgaagaacaaaaaatgagcaaaatgaatgattattatgaaatgaaaaaagcaaatccttctttaagtgacaaagaaattgctgacattttgaaaattggaactgccaccctaaagagatggaaaaaggaaaataattcgtaatttttcgtttttcttatttgtattggtttcaaaggtgctaggtcactttaaaaaaaagttcaaaaatcaaaagtctgatttttcttataattttttatcaattttttaaattataaacatgttataatttaattaaatgattcttaaatacgtttaaagttttgttgaatttcgaataaaaaataattaaaatttacctaaaattttaaattttggagcttaaagggtgccaataaattttaaaaaagctaagtatagacggtaacatgtgatttcgtccgtaagggatttcgtcagtgataataatcattttttatgaaaaaacatttaatttttcataaattaaaattcattcgatatttaaattcaaagtaaaattatttgctcattgtcaatcgatatatgggtggtcatttacatatcataaaatattttgtatttgtgcttcgtttttgctaattttataatcctgtatgtttatttataggtggtcgccagccattcattcttcataatctcggaatttctcttttaaatttcttaccaggggtggagcgcgacgcagcaatttgaatccgcgctgcgcgaccgcgtgagctttctgtcctcgctccgtccctgtttcttactaataattttgtatttctgcattttgagtatgttgatgctctacctaatcattttttgtctccaagtcgaatcataggcgtctggcgatcacgtatggaagcgacctttaccttttcgagtgtgttacgagtagctgattttcgcgttgcccagatgacggaaagtgggcacgtgaaaagcacaaataaaaatggattcggcattgcaacaatttgagcaatcttatagaggactttgcaaatcgtgactcgtttaaatatttacggggtctgttcttatggctcgaatttttaatttttttagctaggtgtacgctgtttttattaattaattttcactgacgaaatcactcactgacgacatgacttactgacgaaatcacccgggaacccattaaatgaatgtatttagagatgcaatattaccatatatttaggccaatttcttcttctgctgttcaactttctttccattttggcaaaaaa

SEQ ID NO: 23233 - DNA, 1920 bp, Heterodera glycines
cgacgatctcttgggctcttccacaccttctccaacagtaaattttaataaaattgaatatattttatgaattctttaatctgttcagcctcctgcaagcaaaaagcgcgtttggcacgatggccatgagtgttgtgctcattgggccccgaaaggggcgtgcacatctgcgcctctgcacctgaacacgtggtgttcgggaacgtgccgattcaaaaggattagaccccacccctaaccagacaaatcactcaagacagaaagaatgggtccgatgaaaatattaaaaccccccccccccccccccccccccccgggcgtttccctcttttatttgacctttgtccgcattctccgcatcgtgccaataaaccatctgtttccatcccttcataattaacaaatcagccaataattgtgcagtcggtggtcttatggacacttcgaaattgtacgtattgtttggatgatgaaaagccctcggggaaagatccttaacggcaaagtcatcgacggatgaatggcggagggccaaacccaattaatcattggcacttccaacccattggagacggccatgtacgcctcgtaggggcgctgatgactctctcccgccatcaacagcatgaaaccggaacggagctcagcgcaaactgagaaaatgtggagagtgggggattggctaacaattaaagtctaaccgcaaagggcggaagggaggggaaaagccgaaaaaagggacaaaaccgagaatatcccaaaaagacaaaggaaggtaaagcacacttttggacatcaaatcccagctgttctcccgcgaaatgcgcaatgatttgtgtctgtgttcgagcagaaatgtgccgggagaagcagaattgaggcggtcgatggtgaagttgagagtggcgatggtggcatggtcatcggagttggtgaaagactcttcaaaacaaaaaattctaacactgatcgactgactgatcaaacaaatccccaaaaagagggggggggggggaaacgcaccgattggaatttgggagggaaacgcagcgacggacgaagcagcgaattggtgaaggagtaaaagaggagggaaaaggacaaattggagaagcgaaagagagatggccatttcggactcaattgggaccaattgagaagcaaaaggcaatttaaaggaagcgaagggaagagaatttgagcagcaaatgcaaatgaaaacgacagaaaacagccgaggcccaaaacgaaaacacccaatcgaatatggccaagtcgcatccccataaaattgcctcactcggacagtcagtccttcggcaccaattaccctcaacgagcaaaggcatttcatcagcggagggagggagggaaagggacgaacttgcggaaattattattttgaaggaaaaacaagatgacagcaacagcagaagaagaagggcctaacaaaggagagtgttcgggtgatggtggaacttccaaatgaaactttgtaggtgggtagaccacccctgggttgtattgccaaattttttttctagctgcggaataagcttctgtgccgagatatgaggctttaaatatttaataattatattatattaaatttaaaaggagaagcaacaagcgaccggttggcagggtggttgtgtgtcacgatttcatttttgtaatggaaagttcgagtcccccctacgcaaacatttttttattgtttttaataaattttattttaattttctctaaatcaaaatcatttaaaatgcgagatcttcaacgatttcaatttcttcttcatttttaaggcatcgttcaatgattaaaataaaattattagccatgtcaatctcgacaggcgaaatagttgaatcattaaaagaagcgaaaaatgttttgaagtaaagaaataatattttg

SEQ ID NO: 23234 - DNA, 1136 bp, Heterodera glycines
  unsure (1)..(1136): unsure at all n locations
cgcttttggagtataccagctccgaattgtggcattgtgcaccattcgatgggtgtancttgngctaggataagcattcaggggcattcattcgcagagcaactgaatgtttttgtttttcattggtgagtttttggatgaataacgatacaattttgggaagatcgaatttggcatggggcctctgacttcgctggtcccccccccccctatgtattcaaatcaaaatcaacagcctttcattttatttgagcttatctttttatttgagcaaatggtttgagttggaaaaaaataaaaattttatataatcaaattcctttatatgaataaatacaacaaaatatggatgaaaaatgttagctgatcatcggctcttggagagtgcaacccgcttccattggaaaaagaaaacccccggctgatgtccttagtttcgccacttttgactgctgttgactccgttcttttgtcaatgcttcggtctgcataccttttcttgctaatatccgataagtccactcgactgcgaagaaaatggcagcgtttgtcgggacagcccttaaacaaaaaggtaattaggaagcttaagatccaacgaataaaatcaaattagcacctaatcaaagttgagccaagtccagcaaagaatgttcgccagccgtgttccgagtaagcttttttgacaacttctcggtctgaaaaactatttgttcaagtttttctcaaaaaaatttacgcgcccaggaaatttggtttgaaaatttttcttttcgcattccatcctccccaatttttctcacaattttcatacgcatcgtccgattggaaccgggttttgaccacatcagttggataattgctcagccatgaacacattcccgctgctcctccagcaaaaagcaatttcaaattggacattccttgcgattgttctccattttcggagtccattgaacgcctcaaaaaagcataggaagcaaaataaacgcccatcgcaggacaatccctcagctgagtgatcagaaggccgctgaaattacatattggtggtggaacttgatctatttgattttttcgtgctgtttaagcatcttgaccaggaaaaaattggcttttatatttcgatcggtttt

SEQ ID NO: 23235 - DNA, 1755 bp, Heterodera glycines
gcgcgaggagcgaagcggagcgacgagcgagtgtaccgagtcaatacgaacctgatcaattcttttagatgtcacttagcgggcatggggtgaacggctaggctcagctgtcttccggtagctgctgctgcacgaacatccagatacgcatctgcgcctgagctgctactgcactaacaacctgacgcatctaccccgttactggctacaactcgacgggataggctcggctttctataaagcgcagccatctaccgggacgcctagttatctatatataaaaataacgggggggctaaccataaaacgatttggcggcaaagaactacgcaacggatcgccacgagaccggtaccattcgaaagagctcggttttttctatcgttctatccttgtggaaaaatttacgataggcagaaaatttcgagaaaatcgcgttcgaaagaaaaaaacccggctttttacaattggccaaaaatgggttgtaaaatgtgtgttttcaccttatttctcgggaaccataaaagctacgcttttgcggtaagcgaacaatttgtagagctcgtcgagctgaagggtgagaaaaaaattttgtagctctacgacaaattcgaacaaagttataccccggcaaaggtcgaaaaaagcccattttttttgtattttcgccttccggtttacaatccgtttacaattgtaaattcgtccggaatgtccggaatttcgaccgaccggatggattttgtgtttttgcatgtgttttcaaccggtttacatgtgttttcggcgtgagttctttaaaccggttccggtttttcatgtattttcttcacgtttacgtgtattttcgacacgtttgcatgcgttttcaacattatacgtgtgttttccttacattaacgtgtgttccagtacgttaacatgtgtttttgagtatttttacaactttatgccttgtgttttgctttgtgtttttgcattcaatttttacaatttaagcaccagaatttttctgattgttccggaatgcttcagaatagttctgataattctgttacagaccagaacggttctgaaaattctggaaaacgtcagaattgttctgataattctgaaacacaccagaaccgttctgaaaattcaggaaaacgtcagaattgttctgaaaatataaaattaaattaaataaattaaattaaaataaaataaaataaattaaaataaaataaattaaaataaaataaaataaaataaaataaaatgaaataaaataaaataaattaaaataaaataaattaaaataaaataaattaaattaaattaaattaaattaaatagattaaaataaattaaattaaattaaaataaaataaaattaaataaattaaaattaaattaaaataaaaataaaataaaatacattaaatttaaataaaataaaataaaataaattaaaataaaataaaataaaataaatttaaatacaaaaaaataaaataaaataaaataaatttaaataaaattaaatttaaataaattaaaataaattaaaataaaataaaataaattaaattaaataaaatcaaatcaaaataaataaaaattagctgttttgcacgataaggggcgggcgcgaagcggcctgcccctcgaggtgcgcgagcgaggagcggagcgaagcggagcgacgagcgagtgtaccgagtcaatacgaaccgggccttttgcccggtagccacgctctgcatgacaaaa

SEQ ID NO: 23236 - DNA, 2281 bp, Heterodera glycines
tcttccggcggtttattcagcaattttaagccccatggggatcgcttattccggaccgacaccgaccgaaacgtcggccttttcccccgctcatctacatcaatttcggcaccggccgtatcaattcgagcgaaagcccgtaatatcagcacgttcggcggacggaaacagccaacgtcaaaactcacaaaacggaggaaaaagtggggaacgggggagaatttgaagaaaaaagcgatcggggggtgtttaaataggggacaaaatcgagataaaaaaaagtaaagttagggacggaacacgtgccgactcgaagcagtggctcgaagcaaaaggtgatcagccaacacaactcgcacattgttctatttggactttgaaaatgggaccatttgcgagccgaaaaaaactgtggaggtaattaaaggaaaaaaaaattcaattattggaatgaatgacaaattggcattaattaagaattacgaacggatcacggacttacgaatgaacaaaagcgaaagagtaagcgaaacggaggacaaattggcactcacttctcatcatttcacttattatcttccaaaatgattgccaatcgaatggtttcttaaaattgttctcttttcagtgtctccccgcgtgcaaacgaagcgaacacattttcagccaatacactcacaggggatccatttggaatgcccgcaattacgtctctccctttcggcaagtatttcattcaaagtaaatagcggcggctttattaatcccacaacagtttaatcattatttgccccttttatggttttcaatttctttaattctctcttcccctccctttctctctctctccccatctctcactttccttctttctctctcttcccctccctttctctctctctctctctctcctcatctctcacttaccttctttctctctcttcccttccctttctcttccctctcttcccctccctttctctctctatctctctctcctcatctctcactttccttctttccctctcttcccctccctttctcttccctctcttcccctccctttctctctctatctctctctcctcatctctcactttccttctttctctctcttcccttccctttctcttccctctcttcccctccctttctctctctttctctttcctcatctctcactttccttctttccctctcttcccctccctttctctctctttctctctcctcatctctcactttccttctttccctctctgcccctccctttctcgtccctctcttcccctccctttctctctctttctctttcctcatctctcacttccctcctttccctctcttcccctccctttctctctctttctctctcctcatctctcactttccttctttccctctcttcccctccctttctctctctttctctctcctcatctctcactttccttctttccctctcttcccctccctttctctctctttctctctcctcatctctcactttccttctttctctctcttcccctccctttctcgcattttttatctttttaattttcccttttcattttagaatggaggtgtatttcacagatttgcaggtccatttcaattcaaatctttgctaatcccatctgtgccacccgcttctttttgagattgaagtgtatgaggaagtgccaactttgaccgtttcccgcttcatcgcccaattaggcggccaattaggcttatacattggactttccatagcatcattcgtccaaataattcttccttgcatacggaaatgccatgaatggatgaaattgcgaacggagaaacgacgaaaaaacaaaaaggaaaacgaaatcgaaatgttgcgacggaggagcgaaatggtgggacaatggttggacgaaggggacgaagcaaatgccaataccaatgtgacacaacgaatctgtcaatgggacggattgccaaaggcattataagcccgtgttttagcctcgggcattcgtcgcgaatgactcgcggagacatgaagcgatttattttgtatcatttgcataaaacactttaattgcctctaattttgctcatattaatgtgcaaattgatagcccctatattctcattgtcagtcaatcgccaaaatccgtcgaaacactttcttttgggcaccactctcatcacaaatcaatcactcagcccattaatcgcataattggcctttttcggctttcctgggaggattaatcccacgtattattttttgattgtttttgtgctg

SEQ ID NO: 23237 - DNA, 1537 bp, Heterodera glycines
aaagagttcgattcccgtcgaagtttttaaataaaattcaaaaaaattatttcttctccgaatgatgacttctgtttatatttgctactccttatggtccatgaagaggatgaaaaccaccaacttttctgttgtctgacggagaattgcgtttttaataatacttttaaaatatttttttattccttacattttttaatttaatttttgttccagtgccaaccgtgtcgactatgttttgcctgattttgtgcacacaacacggggccatgtgctgcatcggggggacgcttctaatagggtgaagaaacaaatcgctaattaaaaaaattcgtttttcagcaattttatggaaattttttgcaaatcttggtatttcatcataaaaattttgaatcgcaatttcttgaaattttcttatcaaaattttctcttggattttttttttgttaatttcgtttaaataattttttggaaaaacttctttcttaataaaattttgaaaaatctctgagaatttttcaattttttctaagttttgaaaaaaaatttagggggggggggggcgatctgctatttttttaattttaaaataatattatttctcattattttttgctgcagttgtcacacaaaaatgccgacgacgacgagcagcagcagaaggtcacgctgggcgttgaacgctttgcactgcccgaactgctgattcggcctggcgatgttgaagtgcagcaaatgggcatcccagaagcattgtgtgctgtcattgaacggctgccaaagggtgcggcggggggcaggggtttaaccgaaggcttttacttaaaaaaagatgtgataccaccgtgtgtgtgctgtacccaatcccgcattttttgggaattgcgggatttgctggattatcccacgggacccagtctcaccgcaatgccgcagcgggatctgcaaatttaaaatttcaggctctaatattgactcgccgtagggggcggagcaggtcacccccgcctcgaaattttttaaaaattgttagaatttttttttttgaaaaaatttttagggctgggggaaatgaagtgcacctcgtagcggaggagaagaaggagtacttttgcttattgctttcagaaatgcagctgttgatggcgcggaacattgtgctgaccggcgggaacgccctcttcccgggctatcgcaaaagaatgtaaaaatttggaaaaaaaacaacgactcacattttaccaagaaatagtgtaatactgttgtttgtccccccctttttaaataaaaaattttcaataaaaacaaatttcctatggtttccgagggactaggtcgtttcggcgccgccatttcggcgctagcccatgttttttgggtataacttttttctttgtaagcaaaatcaaacaatcttggtatcattcgaaagtccttcacatgctctactagccttacaaaaaaaagccaacaaaattctagcctttaaataattattaagaaaaaacttcaaaaatttgacttttttgatatt

SEQ ID NO: 23238 - DNA, 1716 bp, Heterodera glycines
cttgtaaaattttttattgtatctaggtcccggccggtaattacaacttttttgatatctgcaatggcaccagttttcaaaataataagtaccagtaattcttggaaatttaggaacagggaaagaaatttcaaaagtgtagaacatcaatttataaacaattattttttatattgttatatcttttggttaaaagctattaagaaaaggacaaaatttgcataaattttaaaaataaattgggcattttggatccattttttggaaaaatctgttgacaaattgcaatgaagaagatcgtcaattaattttaaaaaacaggaaaattctatcggaacttttccaggtcccggtcaaaaccgggacttcggtactcagttgtacgtgtttttcagtacccggtcccgtaaaactctagtttttatatctgtccatccatgattttatttttaatcattttaatatgtaattttctacttatttttattcaatctcggcattttctgttttaacctcgtattgttgttattttttaatagttttaaatacaaaatatgacatttctgtgcttctgcccattctgccgttatttagacatgctgatcaattagcgatctttaaggtctcattgacgaagtaactttgccaaatgtaacaatgttattccttaaaaactttttgtgcgtgttctttcattagataaactgattagtgaccattttaaactgatatttgcatatatacgaaaaacaaattgttaaaatgccaaataataggaagccagcaaccctctgcctaaaatcccgaccatgacaacaacaatggcattttactccaataaatgtcggcaactacagaagcgactttggcttccgcccgagctctcttttgagcttctcctttttatgcagccatcaaaaatttggggcgtaaggcgcttgctgaggacaagcgcaattttttaccgtttaattgtcggcacgaaaaatttagaatattggcgaaagccatactcagttttggtaaatgataaattgtcgattaaattcagattttatttttatattatttgatttaaaaaaaaatagtttttatctttaataagacgatttttatcctaattatgctatttgattctgttttttgggcactagttccgatatatttagcataaataacacattttccacttttttgaagcttctaggttgagttttattatgctttattttgcctttttaggttttcgtgctttttctgccatttttcggttttgatgcctttttaattccttttcttgataaaaatttatagtttaaaaattttccttatttgatacatttggggccgtaagtcgcttgttgaggacaagtgtaattttttaccgtttaattgtcggcaggaagaatttagaatattgacgaaagccgtactcagttttggtaaatgataaattatttatttaaattcagtagtttatttttatattatttgattttttaaattgattttctatttaataagatgtattttctgctaattatgttatttgattctgattttcgcattggtttcgacatatttagcataaataatacatttccactttgtttgaaagttcttgggttagttttttatgccttattttggcttattgggttttcgtgcctttataccttttttatttcttttctcgataaaattctatttttaaaa

SEQ ID NO: 23239 - DNA, 996 bp, Heterodera glycines
cgcgagccttacgagtcgtgttttctgtatgaataattccaactctttttcgtcttcatttctcattaaggaccattggaataaacgaatattttgttcaacaaatgatcatatttcttcaattttacaaggtgtttttcatttaaaattgctttattttcatggtatttagggcccacggcatggatggctcgaaaacgcactttacgtgtgcctttattttgaaccgggtcatgatacgctgaacaaccaattcacgacgatgcgtcaaataatcgatcatttttttgccaatcgatgggtacgctgagggggcgcaatttattcggacaaaatgaaatcgcacatttcacagatccttcatttgcatgtcgattttcaaggtttccaacaaagaaaaagaccatttcctatttgtttgtttaatttattttaattttcagtcaatttgttccaaaaatgggggcgctttaaggctgccaatgcggcgatcgccagcacttgggacgcttctcgtgcgaatgccttcgccgaaatgcatttctccacaattcgaagtgccacttttcctacctccggattgctttctttggaaatgttcgacgattatgacaaaatgctaagggcaatgagcgaggcaatcaaatggcttatccttcaccttccaaaaggtcgtttcgtttataatcaaaaatctttatatatatgtataagttttcagatgaatttatgtcgagaaataaaagatttaatctttttgctattgctgaagattctggagaaattctaaccgttttgaaacagttgtcgcaatttgaatataaattccgaaaagtttttcaccctttttcactaaatgtcattttttaaagaaaaaattaaggcaataaccccattgaggaacaatcgtcaagattgtattaacgcacttcatgtacgaatttcggacaacttctcgcagattattgcctttttgcgcaactctttgtctgtcaa

SEQ ID NO: 23240 - DNA, 1509 bp, Heterodera glycines
acagtctgttggaaaataaattgcgagccgtcatccaagtgagagattttcgttttgccaatttgttattttttgcatttttcaggccgtccctcgggccgttttccatgaaatggccaaattaaacgactgtttcccaactgacacttcatccgtttccattgaaaaggcgcgaattcgtgaattttcggacttcaaaagacgaagcattttggctgatctcacctttaaaatatcgaaacttgcgctcggaatttcgaacacctgcattaaacagctcggtgacgtggaaattcagccgcgtgctctgttagccgatggactccgtcgtgaacttgatgtaacattctttcgatttgttatacctttttaattttaatttcaagattcggttaattcaaatttttgcctcggatgtccaaccaaatattctccgaactcttcaaaatcagtcgctgaaattgcaacaattccgaaaatcttttctgttcatctgtgaccatgtcggcattcgcgacggaatccgtatttggacggaacaactcaaaagcattttggaggagtcattaaatgataaaatattcaaaactgccgaggtttgctgctcccacaacagttatttttccccaagttgtttttcgtttagcgaacaacaatgaccacttccgtcgtttctttcataccgcagtcaaaattggtggtggaaaaactgctcgattttgcgctctccgccacagcgccacagttttgtcaatgtatgcctttttttatatgaattccacgttcagatcgaccaaatacaaccgaatggagtccatttggcgttccgctgatgggaaaacaatcaaattttacggcaacgttttcgcttctcttgatgtaattaatgccattaaattattgaaataaccaaaacattgtttcttcattctaagaattggttgctgtacggtttgaactcgatggtcgcaactctgttggccaaggatgtgtttgaattgcaacgaattgtcgcacgacttccctttgagcagcaccgttcgttgtccgcctcgccaacggcacttattgcccagctgacaacgaatgcggcagagtttacacagtccggtccgaatcgcgaactgttgttcgccctcgccaaattgggtcagcaattgctgttgttacgcaatctgcaaatgttcgtcaaagcggagaaacacagccaattgggcacactgcaaacagcggaacggacactccgaaggtcatccacgcatttggagtcaagggatcagggctaaattcgcaattaatgagatttgtctcaatgcagaaacccgtaatccgtcattacggatgtccaaaaacgctgtaatttacgtaatccataaatgcttgcaatcctgcaagaaatgatctatcgaagtgtaaaaagtcatttcgtaggaaggcactgtcgaaaattacctaaatttttctgataaaattctaaaaataaagggggattggatattatttatggtc

SEQ ID NO: 23241 - DNA, 1626 bp, Heterodera glycines
  unsure (1)..(1626): unsure at all n locations
cccaatttggcttggtggaacagagaaatgtgagcacagaatggtcaatgtagctgaaaaggggaaacaaagaagacggcggccaaccatattaattggtttccgtataagtttgattttctcaatccgaaggaatcgaaaacggatttggnncnnnngngaatggtccggcagaggaaaatccacaaatttgtcatcgatctgtacagacagtttcgcttttggtcctttgtccttgctaattttgatttgtctccaaattgtcaattcgctttttccaccaaaatgcgtgtcaaccaaaacatcgaaacggtcggaaagcaatgccattttgagtccgagttgggcatggtcaaaagatggcagaatgtccatccacacgtcgccacaaatccaactgaaacatgaaaaaaataacatggaaaatgaaaattttataatttttaaaattcattaccgtcgattcattttggtggttcaattagcacgcttttccctttttccaattaattaatttgtgtgtcacaaaaggcaaaaaatttgttgttaacttaaaacagagagaacaattagaaaaaatgagagagcaaaaaatttgcttattttagagaaggtaaattgaaaacagcaatttctcattaaaaatttgaaattaccaaaaaattatatgtgcataatctttttgtgagaaagaggagaaaaaagggcagttttatatttttatattaaaacattagcgtatgtttgagtaccggtggtgaaaatgaaaatgccaataatttggcgagaaaaaaaaatgagaaaagctacataattgataattggttatttctagggctgctaattttatgtaaatacatttttttcctggattctccatagcctaattagtaggaaaaacactttcttttttgtgtttgcgaactgttgtgcctttgcacttgaccaaagaataaatatttatttattccaattttggtgaagacacaattaaataaagaagagaaatgggggcaggagtatcgattgagggagatgggcacatacaacaaataaatgagggaatgaacggatggtcaaagggacgggggtatttatggagggaacagcagagagagagtgggaggggaagagatagaaaggaattaaataatttaggcgggacaaatcagtacccttcccaacatctccccccttaaaaagagtctgtcctcatccatcggtccgttgatcagtgatcagtccatctcagctcggagtgtagcgttgaggaggacgtcgattgcgttgcgggcgatcgacacggacatggcctcgttcggcatttgcttcgtccgtctgttgtgcaggtgccgcttgttgatcagctggcagagctgcttcgttgggaccatccggcggtgccaacggaagaccaaaagcgtcgttgaaaatgttcaacgcttcgttgccatggtcatcatcatccgtatgacggggcgtcatttggtttgcatggaatcgngttggaagtgtcattcggaaactttacctcgntaatgactccctgacattggctgacgatcccagcgcgccatgattgcgattggcgatgacgaagcaaaactttatcgccaagaaaaattt

SEQ ID NO: 23242 - DNA, 1551 bp, Heterodera glycines
cccaatgtggcggaatttaagaaacgacccagcacgattacgaggtctcaaaaatagcgatagacttggcctgagagaaatcacttataaattgccttaaattttagttttgattgccttctacagaagcttttatcatgtgattgggaccaatgaggccatctcacaaatcatgcctaatttatacaatgtttggttcaacgagtacagtaatgttgctgacggtggtggcactttgtctgatcaaccgagcacctcccagcagccggactttgatcagtttgaggagtgctccgacgaggaatttcttgatgatccggaggtgccgagcacttcacatcagacgaaccctcatcagcgtcacccgccggcttgaggaaatcagtgccttgacaacattaatccatccatcgatcacaatcgactgatccaagtattcattggtgatcattaacgcagatcgttttgagccaatgaattttttacactgtatttttatgctcaatttaaattgcgagaattccgtcgggggcagtaatctttggggccaacacataaaaaatcaatgtatgaaaaaaaccggaaggaaacaaaatatttttaaaattatatttttattccaacaaatttgaaatttgtttttgacatttctttaaaaggtcaacattacaaattataataaatttaaatatttttcataaatttgctccaaaaaaaatttaaaaaacattttttaaataaaattccttaacaaaaaaatgcgtagaaaaagaaaatcaacgcaataaataacaaaaaaataatttctaaatatacttttattccaaaaatttatatttgagattattttccataattatttcataaatttatttatacaaacaaatttcaaaaaccttttaaatcacatttttattggtttttaattttattccccaaattttaatttttttaaatattttaaattagtcaatgaaatcgtttagcttaaagctaaaatattttaaaataattcacttttttcgacttggcattgtcccaatttgtcggctccattggacttgctctttttgatgaacaacaccaacaacaagacgaagaagatcaaaaggatgatgattgtaatggcacattggcaatgagcgagtgccaatttgaaacgcaaatgattgccatgtttgagcaatttgaacggtccaacaccgaaacgatgggacgcgcgacggcacgttagtgcccttctcgttttttgtttgatttgtcgggaggtacgtcgtacgtgccaccccctggggtcgtcgtccccgtcgatgcactccaaaacgtcgctgccgaaacatcatcaggacaaaacgtcgaaaaacgtcgccataaattaaaaaaaaattttttgaaaacctatataaattttattgaaacacatattttgccgaattccaaaaaaaaattgaattttttcttgaaactttcttaaaattttctagttttgacgagataacgaacaaatttgaaataataaaagtttgtcgcccgcccgaactttaaaaaaat

SEQ ID NO: 23243 - DNA, 1821 bp, Heterodera glycines
ccgtaactgctgcaccatccgtcatcaaagcattgccgattgacgaatctggcaaaattctctttccgatcgtcgaccaattcggtacggaattgggattagtcagtccctaatccggcatggaatactgtaactgctcaattcccacagggcgtccattgcccagcgacgcttccggtcactttgtcgatcagtcggacgagcaaattccacttgatcagtttggccaaccgcttggccctgacggacttccgttgatgaccaattcgcgtggcgaatacgtcgtgcacagttcgcccgccattcccacagcttcgattgggccaacaacggtgccaattgcgttgccatttccggcactttccgggcccggactaaaagcggaggcagaaaaggaggaggaggagacggaggagggaatgccacccacggacagcacgggaaggctggtgttgccggtgatcagcgcggacacgggacaactgatgccgcgcaacgaggagggacagttcgtcaatgcgcacggagaggtgagacaaaacataggcaacaatagaactgatcagatccgcagagttgaaccgggagagagggcaaagactgatcagactgaaaaaatattaagactggtagtagttgatcagacctgggataaaaatgctttactcactgggaggggatcagactgattaggcggatgccagaaaagggtcatgaatttgggaactaagctgaaatttgcaagaacggcttaatttcagaaaaagttatttgaaggtcaagactggtaaattatttctttgtaactaaaatggtaatttttcctgatcggacacgagacttaccaaaaacggtgcctgtgttcccagttccgttgctgatccgacaaaggtgacattggttaggagaagttccgcttttctcgactctcgagtcgtgaaattttttgcgtctcgttctgtctaatcacccttctttcccctgtttttttaggtgattccaaccgacgactttggtcgtccgtttgattggcatggcaaagtgctgccgcgcaacgagttgggccaattcgtgttccacgatgctgtccaatggccagacgaccatcaaacggcgccaccggaagtcggcgacgctgcgtccacggcacttttggcgcaacgcgagcagcaacaaatgctgcagcgacggcgcaaccaaaccgcgcattgttttgtcggtggttttgtcgaactgctgaatgtgttcgacacgagtgccaacgtgaaaatcctggattaccgcatgatgaaggaggcggtcaaggtcagcgggggaaatggagaagcggcggatcagcatgtgtagagagagagagagagagagagagagcggacagagtgacagacagtgaaggaaattcatgtctttttggtctctgatacagtaatcgtgataattatgatagtgatcaatcagagataaaggacacggatgctctggacaatgccaatccccgacgcaaacttcagctgattagcagcagaattttacatggattaaatctcaccaatgagggggaggggagctcacacatgggattctctgatcagcaattgcgataaaaatgataaaatcacttgaatttatccagtctctaatcacaattttattatttccgtttgcattttctacccctaacatttcatctcttcacacattgatagagtttcctcatggaccattttgaccttcgtcacgaccacggtgttcggatcggacttttgaaatacggcgttgtgaggggaggtgcccattacgctgggcgactacgacacggag

SEQ ID NO: 23244 - DNA, 2725 bp, Heterodera glycines
tacacaaacaaaattaaatgaaaaatcgggctgctggcggtagatgggaacaaaattgacgtaaaattcatgataatatatttgaataaatggaatgataataatgtgcgaagcattaagacattaattgatcaattaggggatgaaccgttattaaaaaaatcctattaatgatgcgcgttatttaaaaaataaaaacaactttactatcaaaaagctttttagcgatttccaaatatcttctctattagccttggaaatatcaaaaaaaaattttgtcaaacttctaaaaagttatggccaaaaatgtcgcaaaacgaggtttttactttttttaaacttaaaattcttttgcaggctaatagaaaacattggttgcttttgaacaaagttttaaatagtttttgttaggaagttttcattttgatgattttttaattatcgccaattatagtgattattaggcaccgagcaagtatttattgatcatcaaagtgactgatcggtgatgggcggacgaatggaagggaccgatcgccatttgactaaccgtatccattaagcatgcaactgtaatttgcactcgcgcaagtgtcgcttcaacgccgaactttaccgtctcagcggataccaaagcggtggcgtttgtttgaactgtcgccataacaccgcgggcagaaattgtcacgtgggcaattgaacatttggcactttgaccttcctaattgctctttctcccctcctacagtattgtcgctttggttattttcgtgatcagagcaaaccgatcactcatcggaaggcgtgcaaacgtaagaaaaaggaacacaacaaattaaggacaacgtttttttcagcctgtctttgccatccgatcggctcattgtcgcgcaattgcaaccaaacaagcggacaatgcatttgcaagccgggggtcgacggtaattgggcaaaggcaaagctaaggccgaaccaattcgattgtgccgggttcaggcccgacttgcaatcgatgtgccaagggcttccaacagtccctgtcgccggacaccccttgcgtccgtaagtcgccccttttgccttttgcttcgccatttcaacgcgtctgtttcaggccctttccctcctcgcccgcccaattcactcgccaaatcaaccgaaccaaatggtaataaatgccaaattccgttgcatttgaacttgttcagcagatgaatgtgagaagtgccgtgcgtctccaagtcgtcttacccttaaaaaattctgtcggcgcgattacggtaatgtttctattttgttactgtcctttttcatcaattattttaaaattcaaattcagccctgaaattacaactcatcagccgtgaattggtggaggggtgggccaaatttcgggcccaactcctcgacgagccgatcaaagatgagctggggactcttctcggcgcggagatgggccgcggcactgaaatcagcctttggctgcccaatcgaaatttaatttgcaaatgcccacggctgaaagtcggccgcaaataccttctgatgggtcagtcgcttttgaaagtgccaaagcaaacggaaaaggcggaacaaaaagtgccaacttttccattgccttttgcctttcacttttggcactttttcctttccttccaataatttcgcatttctctttctattggctgttctttgctttgctgttttcctaatttgccaatttcagctcgtcacggctcatttaaatctgatggcaaaggcattgtgaaagaattgggcgttgaatttggcggaaaaggtgaaaaatctttggcgaagccttcgtctgcgattgtttttgatcggcacgtggtgatgatggaatgggccgatgaagtggcggaaagggcaacgcgattcgcacagaaacggcactttatggagaaatgccaacggatgagagcaaaggaagagcaaacggaaaatagagacggaacagagacagaacaaacaagaccagaagagaaaaatgatcacaaaatggccaaatagagggggggggggggggggggtgatcaaagaaacaatggcaaatgggagacacggactcttttttgagcatttgccaatgaaatgactccgattcgccccctttcccaattaaataatgagtcatcgtcccttccaaatcatatcgaaactatagaccggacaactgggttcggagggagcctgattggggatcccgactgaatcacgatcaatcccgaagattttggaataacgatcgggacgtatcccgaggtcgggatcccgagaaaattccgcgggatcccaatcccgtccggtctctaatcgaaacgctgacctcctcgattttccaacattagagctttagttgcccattatcagttgatatttttgtttttcattccattacaagactttgctttgcttgccacaacaaatgatcatcataaattgtcattagccagatttactaaataaacgcaatgctttgctaaacccttaaattccaaaaagtacttgaaatgctcggtccgttgttactagaactactgtatcgtgttactcaaaattcttttatagcttctatttccacccctctctctctctctctttctcaccgcctcgctctctcccccccccccctctctcttcccccttacaaagttaaaaaatttaagaaattgttaattttatttaaaaaacttcctttgatgtt

SEQ ID NO: 23245 - DNA, 1142 bp, Heterodera glycines
  unsure (1)..(1142): unsure at all n locations
tccgtccctccctcccgtcggggattgtgccgactttgccttatcccccaccctccgccggcggggcaccaaggttcactaataagcttcaaaatggatagggctcggagcggggaaaaagcttaaaacacctccccccccccaacctccaanccacncccttgggggaaggaggaacaacggtgncacacacattggcacacgtgccaccctcgcggtaaaatgttatggcaccaccaccatgggaggcgatgctgctggcacccccagccatatatcaatctgattatccccatactcttgctaataaatttgttgtagtaaaactgattaagcctcccgccaccgggcatttttgccggcgggaaaaaaatgcacaggcattccaaaagtaatatcattagcaaacagcagccaaaggccgttgacttttttgaataaaagcgattttaaaagggggagggttgctatttgagcttgttttaagaatttttttagtttttaaccaaagcaaaggctatctcttagaatggcttaaaaggtcctcagagtatgagataaaaaaatttctcgaaatttttaaaattttccattttcttcctaacaactttatcgtattttttttaaaaaagcacattttccttacgaagaaataaaaaatttattgtaaaaatgtctttgcattaaacagcctaagagttttaaacaaaaattgtttttgtcgctttaagacataaatattagaaattgtaccattgcgtttcaaaagctttctcaaattgaatgaaaatgcacaataatacttggatatacagaagctgcctaattgcattcaaattgtttcaattgtttaaagagagtttaattttctggtgcttttactcacttttcagggccccacttggccgctctcttttggccacacttttcaactttctcaccaacccaaacagcggtggtggtggtggtggtggatggcccataattaaggccaaaagattatgcagatatgcgtgaccgacgaggggggcccaaatgtttccccccccccataactcccgccgacattggctaaaccgtttgacacttaaggctttggcaaaagccttcctccctcccaccaataatgaactaagcctgat

SEQ ID NO: 23246 - DNA, 1121 bp, Heterodera glycines
  unsure (1)..(1121): unsure at all n locations
acacttctttattccttaatgggagcaccttggcaccctcccccccccccccccccgggggctaaagggaggtcattaacgtgttggcgggcacagattaatgaatgtaatccccaccccgctcaaccctgaatcacaaacacacaaccaccgccagggctaaggtggattatgcagatgcacaggacgaaataaataatccacagttgaccctaccaacaccaacttattcatggttttaatttggtaatgtatcgtaactgagataagccaaagttacagtacataattcatagtgaagagatacacgaataaaaaagaaaattacttaatgcaaatatttttcatagtctaaaattttttttggctctcccatcgtcgtccttcttctcgccctctagggtaaggtaatattttagagaaattttgagtcaacccataaaaccctcggtttggcaattttgaaaacaatctgattttcttatgtctaaaacctctcccgccccagtagagggtaatattttcgaaaaatgggtcatcctcatctcgaaccataggctagcacttctctttttttttgaaaataacattttgagtcacccaccctcttttcgcctctaagcctctcaagcctagctaaaagcccacaaatatcgtattcattgtcaatgaatggcactgctctaattcggaggagaggttcgattaaatgccaatacataaatgtgtgaatgtgggcgtcgaggttgttgatatgatatgcctgcttttccccaagtgcggtggtgtgggggtaagtaaagccgagagagtttcgagttgggagggggcgggaagcaaccccagactaatttgccataaataacacctgcccattttggacttttggcacagaatgggcttcattaattcatctactgcaatgggcagctaattaaatgattaattaagaagggaaatgggataatttcacaatatatttcctaatcccatcaaggaaagttgtgtctgtctgctgatgggcaaatgaatgtgcggtacggcacggcacgaaatatacatacagcaagaaaaaaaaggtggttgctaatatgtacaanatgatgaacccagtctctgac

SEQ ID NO: 23247 - DNA, 1095 bp, Heterodera glycines
  unsure (1)..(1095): unsure at all n locations
atggtggacataggtgggaccagcnaacaaagtaaacggctccaaaatgatgtggaaaactcctgctgaaactgctgctggtgtcgacgcgaaaaaattggcgttgaaaaacacattttttgatgtgaaaattggtaatccaaatntaagcgaatttctaaaacaaataattagtcaaattaatttgttaaataattagtcaaattaatttgtttgacacaaaatgatgatgaatatgaatgcctatcaatgtttgtccaatgacaaatcttaaaattgcattatggcatcatgaaaaataattttgcattattaagcgattaagtcacctctaattggggcgcgtaataataaacaaatataaatgaaagaaataattatgtgtgggtttttcgagaaataacaattacgtacatcttatatataataataaagaatgaacttatttttataaaaatgttttacatacttttagaaagagtgggctcaccggcgatgccaataagcgccaacgaaaaattttgagaatttttgccaagaaaaatttttgcaattgtttataattttaaaaattagagcggttggagtgccagattccgctccggtgcttttcactgtaaacaagcgagcttaaatactgttttggctttatgagtcattctatctaacacctgctcgggtggagtggttaccgtaatccacaaatatacttataataccggaccactcgcaaaattaaagccaatgaatttaaaacccaaaaaagagtttaagtcgtttagggatcattaagataatgaggggagggggattaagatggaaaaaatgggaggagcagccgttgatgccttttaagtcatcaatttccgcgaaaactcaaactgtgagagttcattcatttgcgtcacaaaatcataagggggctgttgggcgcacggcgatttaaaaatgaacatttggcattatgtttttatgcactcacccgccaacggcattttttattatttacctcttcgcgcggaggctaataagttatttattaaaattaaataatgtgggtaaccaaatttgctntatgatgggcggaagnagaga

SEQ ID NO: 23248 - DNA, 1125 bp, Heterodera glycines
  unsure (1)..(1125): unsure at all n locations
ctgttctcctctttttctctgttctcctttcacntcatgcaatttttttcctttccgtttctgtcttttcagctctttttctctaccattctcgataaggttttcactatcccttttctatcctctctctctctctctcactctctatctctctcctttctctcttctctctctatctatctcctctctatgtttatctctctctctctcttatctctctccgctaactgtactatttctctatttcctctattattactctgcctccgcttccgccctcacttatgtatgccactttaagccagggctggcggtgacggggcggggattagcgacgtccgccggtggccaaaggcaaaagattgcctaaggcaaaaggaaggcacaaaatagggcacggcttgaaaaatattaaattaaaagatataattttttaaaattcgattctgatcacagatcaacttttcatgcgcattgctccatactctatctctctctctctccttgccccttgctctctctctctctctccccatctctctccttgctctaactgtcatgccatcattgatcattccatccacagcattctctcccctttttctctaaccgtctaacaacacccctatttttgttgcccaaatcataagtgactgtctgacctcacctcctaattaccctgctggtgtccatgacaactcttgtcactctctgctgctggtggtggtgatcaacaattttattctctcaccgacttgccgccttgctatttcgccaatagcaaatgtctctttctctgctgcacacgccatcctccagcataaatcaacaaatgtgaacatacactaattgcatgttattagtagtcactaatgatgataataatgtaataaatatatatccccaccattaccaatccccaacctcaacaaaagtttccgtccaaccgccgatcacaaatcccctaaatccaccacaattctcattgtcagcaacagcaggttgtgtgtgtttgttgttcgtgacaatttttatcttttatttttatcactcaatttttgcatgttatttcttgccctttttctctgacacttcctctgtccgctctctttctctcttctcctc

SEQ ID NO: 23249 - DNA, 951 bp, Heterodera glycines
ccgtgactgatgataaatcatcaaatgttgacgattcttccgtgactgatgataaatcttcaaaatgttgacgattcttccgtgactgatgataaatcatcaaatgttgacgactgttccgtgactgatgataaaccttcagatgttgacgactcttccgtgactgatgataaaccttcagatgttgacaattcttccgtgactgatgataaatcatcaaatgttgacgactgttccgtgactgatgataaatcatcaaatgttgacgactgttccgtgactgatgataaatcatcaaatgttgacgattcttccgtgactgatgataaatcttcaaatgttgacgattcttccgtgactgatgataaatcatcaaatgttgacgactgttcagtgactgatgataaatcatcaaatgttgacgactgttccgtgactgatgataaaccttcagatgttgacgactcttccgtgactgatgataaaccttcagatgttgacaattcttccgtgactgatgataaatcatcaaatgttgacgactcttccgtgactgatgataaatcttcagatgttgacgactcttccgtgactgatgataaatcatcaaatgttgacgactcttccgtgactgatgataaatcttcagatgttgacgactcttccgtgactgatgataaatcttcagatgttgacgactcttccgtgactgatgataaatcatcaaatgttgacgactgttcagtgactgatgataaatcatcaaatgttgacgactgttccgtgactgatgataaatcatcaaatgttgacgactgttccgtgactgatgataaatcatcaaatgttgacgactgttccgtgactgatgataaatcatcaaatgttgacgattcttccgtgactgatgataaatcatcaaatgttgacgattcttccgtgactgatgat

SEQ ID NO: 23250 - DNA, 1468 bp, Heterodera glycines
  unsure (1)..(1468): unsure at all n locations
ctctcncatcgagtgccacccaccttcaaatgcctcgggacgaagcagagaatgtgcgtcaagcggctaaaaagcaccgaattaggaaactgtacaatacagtacatcaaattgtcatttggcaatgcaatagaattttttaattgcctatcctaaaaattcgataatttttgcaaatacaaaaaaacacccaaaaatgttgtcaagtattttttggcttttttttggaaattcagcaaatttagttttcagtaacagcattccaaacagatttttcttgaattttagatatttttcaattttttcccaccttaatgtacaggtcaggcactgttgttgctgctgctttacgcctctgaacattctccgcactcatcaactgttcatgctcaacaccagcaacattgaaccttattacaatacattagcaaagcaacatttggtttgttcgtaagttttaaatgttaaaaataggtttcataaataatttaaaaaattgtttttttttgagttcctataggaaagtgaccagcagaaaaaaggggaccatcactttgtgaagttgggaaaaatcagtaaaaaaaaagtaagaaatcaaaagtacagtagcaaattaaaaaaaaaatcaaagaataaaaatcagccaaaatcttaaacttttttggaataatcaatggggaaacattcgaataaatccaaaataacatgataaaacatgtgttgttaaacccatctaacaatcagcactttttctgatcacttttggcgcataggcaaaacaaaaaaaaaaggcatcgaattcaaataacaaattgatatagaaaattcagtcactttttttttaccacgcaatttcgggcccaagccctgtcggattttggtacattgcatgacaagtggcggacaaattcttggccatttccatgtgcagtgatggcatgccatggtgatggccaagtgctaatgtgccagccagaaaacagaccaaatgatcctgggcgagggcacaaaacaatgtaataataaacatattaattattttaaacaaaaaagctaactcgcccagtgagactcgaatttttctaaccatttttggggagaatttgacatcaacggccaaaagttcgccaacaaaatgcaacgcgtttggcattgaatggcgccaaagacgcgtgtgcatggaatcaattgcatttttgtagtcatcgatcaacctgtggcaaatttaacaataaaaaaatgtttgattgttaattatgatagatttttcagcgggtgtccccccgggtgcactacgtttccctcccgcatcgtttccccccccgagaaaatttttaaaaaaaaaatgttaacttagaaatttttcaagaaaaaaatcttagaaagtttttttacaagaaaattctaagaaaaaaaaatttttgagaaatttttatggtgaattactaagatttttcaaaaaaatttc

SEQ ID NO: 23251 - DNA, 3497 bp, Heterodera glycines
tgacgccattatctttgagtattgcaatgaaaatgtgaaaaccgacgacaacaagccgagctgcctttactttttcctctccgacgacgatgaccaagtcagtctcgagtgcttcaagttgtttaaggctcggcctcggttgtccgccaaatttttgatcaaacaaatgaattgggcggaaagcgttcagtggcttaataagcaaaacggaaagtgcaaaagggtggagccgggaatcgtcatgaaaagaagcggcaaaatggaggacatggacctgagcaccgcattgcaaacacttttcggaaaggaataagcgaaacgaatgggacgagaagcatcggaaattaacatggggggaccaccgcactagtgatgctcgagactaaaaatttctcgagactcgagaccgagacttggccctgaaaccgaaaaacccgagaccgagacctaaaaaacccgagccttttctcgcgtcgagacttgagaccaagacttgattccgagaccgaaaaacccgagacttttctctagtcgagacttgactccaagactcgagacccaaaaaacccaagacctttctcgagtcgagatttgagatcgagacttgactccgagacgatacttgatcccgagaccgaaaaacccgagaccgagacttgactccgagactcgagacccaaaaaacccgagacctttctcgaatcgagatttgagatcgagacttgactccgagaccgatacttgatcacgagaccgaaaaaacccgagacttttctctagtcgagacttgactccaagactcgagacccaaaaaacccgagacctttctcgagtcgagatttgagatcgagacttgactccgagacgatacttgatcccgagaccgaaaaacccgagacccgagaccgagacttgactccaagactcgagacccaaaaaacccgagacctttctcgagtcgagatttgagatcgagacttgactccgagacgatacttgatcccgagaccgaaaaacccgagacccgagaccgagacttgactccgagactcgagacccaaaaaacccgagacctttctcgaatcgagatttgagatcgagacttgactccgagaccgatacttgatcacgagaccgaaaaacccgagacccgaaacaaaaaacctgagaatttccccgagtcaggaccgagacctcgaggatccctagaacgccaataggggaggcagggaaaaggggctcaccacccggaaaaaaatttttgaaattgaaaaactttatttcctttgaattttttttccctagggggataggggtatttgaagtccctttttcccgggggagaccccttcccccccccctgttccccccgggggcgggaaataatttttgtttttcccaataaacgggccccattgaaaggggggaaaaaaagggggaatcaaaatctttgtgaaaggaaaaaaggaggggggaaaaatgtgggtttaaaatactttttttttttttttttcccaaaagggaggggggggggaaaggggggccaccccggttttttggccccaaatttccaaatttgagggggggaaaaaaaaaaaaaaattttccccaaaaacaaatttttttttctccccctttctcccccccccctctcccccccaaaaaagagaaggggcccccccggggaaaaaaaaagggtcaaaaaagaggaagaaaaaaaaatttttttttttaaaaaaaaaaaaaaaaaggggggggaaaaattttttttttttttttcccccacaaaaaaaaaaaaaaaaaaagaccaccccccaacattaattttttgttttttttttttttttttttttttttttttttttttgttgtttttttttttaaaaaaaaaaaaaaaaaaaaaaaaaaaaaaaaaaaaaaaaaaaaaaaaaattctttttttttttttttttgagaaaaatttgtaaaaaaattttttttgaaattttttggggagaaaaaaaaaaatttttttcaaaattttttttctccccctctcccccttattttatattttttttgtttatttttttttctcacccccggggggaattttggggataaaaatattttttaaaaaaaaaaacaaaataattttttttcccctccccttttagtacaaaaaaaatgaattttttaaattttgccgttttttttttttatttttttttcccatccggttgccaaaattttttgttcaaaaaatttggttgggtttttgccgggattcatttttataaaataataaaaagttttttaaaataggaaaaaccccaaattcattttataatttttgaataaaacgatttttataaaatgattattttatattatatgaaatttattcacaaataattttttttctcaatatcattgaatcaattttttactagaataaataataatgcaagaatatcaaaatctcgggagcatttttggctaaataatgtgatacacattgaatttaaaatgaaaaagagacccttccaaatgggtgaaaatttaatcatttttaccccaaaaaattctaaaaaatctttgttcttaattgaactgttctgcagaacaaaagttcatcaaaaaaaaaaagaatttttcaataagttacctgtcgagccttattttcaaaacacgcgttttggcaatgcgccaaaagggaggaacaaaaagtgccacaaatccaactggttctgccagtgctaccggacatggaattcttcgaaatgggagaacagcactctaatattgaaggctggattgatcgcttcaattttgcgatcgactgtgcagctctgacccttccggacgatttaaagatgaaattgctaatgaggaaattgtctagcatgagtgcctccgcgcagtgaagcatgacgacgaagaatttggaatgttcatcaaccggcagaaaaaggcttttacgagacttcaattttaagaaattgaacgaagagcaatttaattgcttggtcctttggatttaattaaaagcgccgaacgaaagcattctacggtcaagaattttggcaaagttgccggcagatggcgatcaaatcaaatatgacaatgtcgtcgaagatttgaaagtttattgttatttttttatctttatatttacaaaaaaaataataataaaggttttcatatgaatttccaaaataaacacacatagaaattgaagacatgccaatttgtaagagtttgactacgatttccaataattcctaagacagaaaaagagcaatcacagaaaaaaaaagagcagcagaaaaatttaaagaaaaatgattccaaaaatcactttattggaattgatgcaaatttctttctccatctgatcagtgtttgagacccaattcccaatttcttggcaattttttcatcacttatttttggattcatttctttgattttggtatattgcttcacctttctcaatttatcctcattggaatatt

SEQ ID NO: 23252 - DNA, 1404 bp, Heterodera glycines
  unsure (1)..(1404): unsure at all n locations
cccccccccccccccctccctttcatctgacccctctaccgcgattcgctccccgcatattttgatcagataagattgttcaattgcgtttttttaattttcgtttgttgcgaaatttttgtgcggggcgcaccaaaaatggtgccatccgcgctccaaggtcaaaatagtttttatgttcacaatctgtcaatcaaagttcttgggcgagaaaatttaaagcgctgcggagatgcaaaaatatttgcggtcactttaccgcagtttttatacacgggaactgtcaatcatataaagaagggaacgccgaagcgacttcatttcaattccatttcggttgaggcggggggtcggggccattctttgcctctcggggcgcttgcccacaaatattcaaatttttccatcaatcatctttatctgccaccgcggcacggcagcacggcatggcagtgggtggagtcagcagccgcaccatccgcaagtttacttcatttgccactttcgtccgctttcaattttgtcagcagcagaaccatccccaatttcaattctcattgtttgtcagtttcgaccactttccattgccaacatgtcttttattgcccccggcactttcgcgttcctttcaaaagactatggggaattttcgactgggcattttgacccaaacagagcatacgacccaaattcgcttgcagaactttcgtaatggcatttattttgcttccattatctttcattttttctttgtagtcaatggagaaaagagtttctggacggccgatacggatccaaacaaccaacccctccttccaccccgcgtgccccatcgcccagcttcccaatcccggtcattgttggtaattttgaatttgttttttggattttgcaaatatctatcttgacaggaaatcgtccacaggatgaaaattgtttggtttttccacaaatatcttgtctgattttttccattttagggcggcagatgttcccaaatgacgatggatacgaatcggaagatgatgaaattctcttgccacctccgccgatccccccgcaacttggccaccctccgccaaatgtgccggtaatttcggtctcgcttttcgttgctttttctcaaatttccgagtgcttttttcaggcagttcgagttcagccaatgcatgttgggcagcagcggctgccgctgagagtcctgccgcaaattttccaccctccaccanatgtgccgggtaattttgggtctttctttcgattgctntttctcaattcccgagtgcttttttcaggccgttcgtgtccaatcaatgcagcaacccgtaccaatgagagccgtgccacaattcctcaccttccgcaaaatgctcggtatcttgagcctcgtttttcgggtgtttt

SEQ ID NO: 23253 - DNA, 866 bp, Heterodera glycines
gaatccgctaataatccgtccttggatttgcctactattaacccgtggccaaaaggaatttaacgcattttgccttatgtccttgagcatcggcctttgtctactctcctcgtccttggcatatttgccaattaattattaccccccccccccatcaaaaattgcttttttcccccgccataaaacgcacttccaacagtcggttcacccacacttcatcagcaatcacttgctgaagctgttcagaggaggcgcgcaagaagtttacgtactgttggccaagctgggcactgttgttggccccggcggcggtgccgcctccggccgatgcctgctgagaaattgatggtggtggtgaaatttttcatataaacgctaggattaccggatttgaatcatgtctcccggattgataacctcgggatccggtcctgccccttctttccaaaaagccgggaccgggatccgggaaagtcccgggtgggagtccggtcccgtccggattctattggcatacaaaacgagctttgctatctttttaaaatttttccgccccagggggtacttttgagaattgtttattcgggaagcctcagtttatttatgtataaaagagaaggttagttagatttttaaaacatttctatcccaaaatttttttaagactgaaaacccaacccccgcgttgaaatggtggaattgtgccgtggacggtcggtgttgggacgagagttgagtgccggcgccgccgccgcctccggcgatgttgccaagcatattgctggactgttcgcccaccaaattcctcatcttgttgaacagtgtgttcggctttgtcgatgccattgacagaagtgcaccgattg

SEQ ID NO: 23254 - DNA, 926 bp, Heterodera glycines
  unsure (1)..(926): unsure at all n locations
taacctggtcaggcccctgatcgctaagtgatcgcgcaaatctttctcaggggtcctctgatcattacgcttaggtttcaatgtgcataaagataattaatataactcacttgcgcacttcccatttctcgcggcaaaaatttttctcaatcgattggctgatcgaatgctccatcaaatctgtgagtgatcagaaaataatcatgctagcatatcattgattacatatattttaaaaaaacagtaggaaaactttaccaatgtagcggacaaccatcggagaaaattggctgatcaatttgctgtggaaaatgcccatccgcaagttttctgcgtattaaaaaaaagtatggcataaaattttgtacagacaattaaatattcaagagtctcttgactcgagaattcgcggattgattggacaatttttattcccattggtctcgacaggaattctcggtctcgatttctgggacgaattcagttccataattcaaaatatcaagctataatcctgggtcaagtaaactccaactcaatttttttgttcgaaagcaaattcccatgatctcgagcctggtctcggccactccgatcacttacgatcaatgcacaggtagtcgttgagcagttgaaacaacgggaatgagtcccacgagtcgggcggttgcagctccaacgcggcgtccaaatccacggaatagagggaccaaaaaatttcggagtgatcggcaagcaaatcggaaaaccaggcaaatgcctaaaatggcagggaaaaataagaaaatggcaaaaataggcggagaattaaaaaaatgatgcgcaaaatggcaaaaaaatgtgctcaagtgatcaagttcatttgatcaaagggaaagacaattattgatcagangtaatagcagaatttcaaatttgactgatca

SEQ ID NO: 23255 - DNA, 1058 bp, Heterodera glycines
aaaaattttgaagaggctctgcggacgggattagcatcggggttacgagatagaatattgtcctaaaaagagatagccatttttctgagaattaattcacaatttccgcagctcttgcggtaatggaaaaaattttgaagaggctctgcggaacggattagcatcggggttacgagatagaatattgtcctaaaaagagatagccatttttctgagaattaattcacaatttccgcagctcttgcggtaatggaaaaaattttgaagaggctctgcggaacggattagcatcggggttacgagatagaaaattgtcctaaaaagagatagccatttttctgagaattaattcacaatttccgcagctcttgcggtaatggaaaaaattttgaagaggctctgcggaacggattagcatcggggttacgagatagaatattgtcctaaaaagagatagccatttttctgagaattaattcacaatttccgcagctcttgcggtaatggaaaaaattttgaagaggctctgcggaacggattagcatcggggttacgagatagaaaattgtcctaaaaagagatagccatttttctgagaattaattcacaatttccgcagctcttgcggtaatggaaaaaattttgaagaggctctgcggaacggattagcatcggggttacgagatagaaaattgtcctaaaaagagatagccatttttctgagaattaattcacaatttccgcagctcttgcggtaatggaaaaaattttgaagaggctctgcggaacggattagcatcggggttacgagatagaatattgtcctaaaaagagatagccatttttctgagaattaattcacaatttccgcagctcttgcggtaatggaaaaaattttgaagaggctctgcggaacggattagcatcggggttacgagatagaatatagtcctaaaaagagatagccatttttctgagaattaattcacaatttccgcagctcttgcggtaatggaaaaattttgaagaggctctgcggaacggattagcatcggggt

SEQ ID NO: 23256 - DNA, 1913 bp, Heterodera glycines
  unsure (1)..(1913): unsure at all n locations
ttgattttatttcaaattgattttttaaaaagggataataatnatttnanttagcataaatnnanccaaaaatatatagaaattaatgtgcaccgtcgtgtccngaaccttcccctcnncctcagaatgatcctcagaatcnccatttacgaagggtttctgaggccttaacaatgttcaaagtaaatctgattgcagatctgttatcaggatcctaaaatacccttaaagacatatttttggaagatttttgtgaacaaattttccactcaaaaaaccatgtcaaccccctaaagtcccgtattccatttgaagtaatgattatactcggattgaaaatccaaaaatgccaaaatatgcactaaaatatgccaaaaaatgtatggatttaaatagacacaaaaaatggcagaaattttgtcaaaattcgaaattcgccatataaccatttatatgaactaaaaattttcactgaaaaaagagaatttttttggtatgaaaattaagggagggattcttggaaagcaatgatctgctaatgatagggggatatttaagattaaactacaaatgagcccttaatgcttgataataattggacacaaaacattgccagcgtaacacttacacctattaatttacaaattcaaaaagcggaaaattgtttgcctacatgaatttagcgtgacaatttaatgagtttatatttcgaaaatgccactggtacttaatttataaatgcataggatgaaaaatattagtcataaaaattgaatatggataattctttttttttttttggctttttggcaattacaaatcagataaaaccaaaaatacgactaaaaatgctcttccaaaatttcaaaaaaagctttttaaaaaataatttcaattaagaaattttcaaaaaagattataaagttaaaaaattatatttaaaaaagaaaaagtttaaaatttaattttgtttaaaatttgtaaattttaaacacattaattgttttaaaataaaaaattatcacaaaaaaactaaaaaaatttaaattcaaatattttaaatttctttgttttaaaaaataggctcattattcaaattattccatgattaaatcaaaaaactggaatattactttagtttcaaatattcaaatattttctacgacttttttttaatatcattccttcattttgtacaaacaaaataaatcccacattgacgcctgaatcccgaatctagatagccgaaactcgaaattttttttgtctcgactaaaaaagttttttattttacatacccaaatctcgagctttttctcgtcctgcggaaaccctgctgtgaatgttagattttgttgaacaaaaaaaattggctcttgaaagtttttcaaagaagttctcttattttaatccaaaattctttttttattctgtcacgcatttttcaaaaaaaaaatccgattccatgctttatttgtgccggatttaaaccaaaaaatttgatcacctgactttctggacttcttggaagactttcgcttcgctgaagacgaatattggacaagaagagtaacgcatataaaaatttccgaaaacgaaaaaattccgttccatgaaacaattttaagttctatcctcgtggggttttgtttaaaatataacaaaattcatttttgtatatttgtcttattcaacttaaatgagatttaaatgtagaaaattgaaacgaatttatgtatttaaatgaaactgaaaattttcaaaatcagcattttagaaattttattccaaatgaagaaaaagcattaaaaagattttttgcgaagcgtttttttcaaaactttttgggaacaagaggccggcggcgccggtaggtaccgctgagaaaaatttttcaaaatttgattgcagct

SEQ ID NO: 23257 - DNA, 1088 bp, Heterodera glycines
ctttttaaacaggccaaaaagtttagtcttaactttttttttcagaaactgatcagaagcgcaccaaactttgcagggaaactccccggtaaaggactaacttacactgaaatgagcgccgagctagctgggtttaaaaattttttcgaaaatcagagtctttcgtttttatttaattatttattattttttgcaaaattaattcataattattttttcagaaagtgctctgaaacgcaccaaattttatttacaagctattttaggcactctgatgctttttctatcaaaaagggagatgaataaattttaaaaaatttttaattcctctttaaacaggccaaaaagtttaggcttaactttttagtgaaaattaatttactcatttttcgagtagtgatcagaagtgcaccaggttttgcaggagcctaaaaaggtcaaggaaaggcgtctctgcgttgatttagcagtagtacctatgaatttaaatttcctatgaatttttaaaggttcacaatttatttattttttgcaaaattaattcataattattttttcagaaagtgctcttaaacgcaccaaattctatttacatgttaaataaggctctctgatgctttttctatcaaaaaggaagatgaataaaattttttaaaatttttaattcctctttaaacaggccaaaaagtttaggcttaactttttagtgaaaattaatttactcatttttcgagtagtgctcagaagcgcaccaggttttgcagggtaacagctgagaataatgcttattcatataattatttaactgtcccataatgtttctttaaaaattttagacattgcaattttgcgtacttttccaattttttgcaaaattaattcataattatttttttcagaaagtgctcttaaacgcacctaattttatttacatgttaacaaggtcctcttaggcttatattatgaataaggctaaagaataaaaaattttttaaatttttccttatattttggttatttcgttcaactttcggtggggtgcttggaaaagtggaaacatgcgtacccgtccgatctgacaagttaag

SEQ ID NO: 23258 - DNA, 1427 bp, Heterodera glycines
  unsure (1)..(1427): unsure at all n locations
gagtgagtacctcggtgcaggaaaattataaaattttaaaaattttntaattgctttttaaatatgccaaaaaatgtaggcttaacttttntagtgaaaattcgatcactcatattttttgctaattgagcagaagcgtaccaaactttgcagggatactccccggtaaaggactaacttacactgaaatgagcgccgagctagctggctcaaaaaaattttcgaaaatctgagtctttcgtttttatttattttttgcaaaattaattcttaaatattttttcagaaagggttctgaaacgcaccaaattttatttacatgttagtttaggcactctgatgctttttctatcaaaaagggagatgaataaaatttttaaaaatttttaattcctttttaaacaggccaaaaagtttaggcttaacttttttttcagaaactgatcagaagcgcaccagactttgcagggatactgaaaggaagagaatatagccgtattttaaatgcgttggattttgctccccataattgtttgagtaaaacggacacgaaaaaatcgatttttttgttttcggggcagtccccccgaaccgatgcgcccagatttatggggagaccgaatccttcgggaatagcttccctatagtctgtactttaattctgcgttggatttttgctccccataattgtttgagtaccccaaacggacacttgaaaaaatcgatttttttgttttcggggcagtccccccgaaccgatgcgcccagatttatggggagaccgaatccttccggaatagcttccctatagcctgtactttaattctgcgttggatttttgctccccataattgtttgagtaccccaaacggacacttgaaaaaatcgatttttttgttttcggggcagtccccccgaaccgatgcgcccagatttatggggagaccgaatccttcgggaatagcttccctatagcctgtactttaattctgcgttggatttttgctccccataattgtttgagtaccccaaacggacacttgaaaaaatcgatttttttgttttcggggcagtccccccgaaccgatgcgcccagatttatggggagaccgaatccttcgggaatagcttccctatagcctgtactttaattctgcgttggatttttgctccccataaatgtttgagtaccccaaacggacacttgaaaaaatcgatttttttgtttcataaatatttttttcagaaagtcccctaaagcgcaccaaattttatttacaacttaattttagcactctgatgctttagtatcaaaaaggaagatggagaaaaaattttttaaaaaatttttccttatattttggttatatcgttttgcttttggtggggtgcttggaacagtggaatcatgcgcacccgtccgatct

SEQ ID NO: 23259 - DNA, 1488 bp, Heterodera glycines
ggattagcaaattcttctttaatactcctttgtctttaagggggaggggtccgcgccgtttgttccgatttgctgccgccaattgccaatttgccgccccaagaatttgcaccaaaattactccgcaagtttatctcaaactcaaacttgggtaattaaacccatacataagaaatgtgtgagaaatacaaaggggggaaattgtgacaatggggacaaaatgcgaggggaaatgcaaagggaaaaatggcacaattggggggcacatgaatgtgacgtaaatgcagcatgccgttgtccagtaggagacgagcagccgaagtttgtccatgaaccattcttcggtgaggccaatcactccgttcgggagagctcccagtgtgagcgcacgcgccgttttgtgctccttctccttcgacttccattgatccaaacgcagccattcatccaagtgcgcgaatagcccttcgcctgtttcgttgtcgatcgtacatcgatgaaaaactagcggcgtgatttccaacaacgatttgtctccagaggcttcgcggatctcagagatgctgctggagtcgattttctggatcgtagcggtgcgtgtgtcgattttgatccaattgttctggctcagctgcagataatggtagcggaaatttccacaatctgcgaatggtgatgacgctgtgaggatgtgaagctccggatccaggaatgcgttgagcgtcttcttctcaatgcggatttggaccggaatgtagcggtagcaattgttgactgcctgatagtccacattttgcattgaaaactcagcgcacgagaagatttgcatcgtgtcttcgtttagccacctggccataacatccttgcgtcgtaaaagtcgtctggcctgaatggtcggatttcctcctctggaacttctgcggcattccttggaaaaaagctgcgcgattgatcggcttgtggcgagttgtcctgcagttaattgtactgcgagttgctcctcctggatggctctttttcccaatccacgatcggtgacgatcttcaggtactcctcctccaggattctaaacgattggttccgacgagcgaagtgcttttccgctgcatgttggtttcatcttcctctccttcccttaccatctactgattatggtatcctccggcacggtatggaacgcaatttttcagtccattcctgaaatcgaattattacaattttttatgggaaatataccgtattaatcaccggcagctcgtaaaatgtttttttaataagtcagaattttttttccacaaaattagaatgattttttttttctagaaaaagctaaaaaataattttgctaatttctctattgaaaatttaaaaaaagttaggacaagacgtcaattggtatgaatttccatgctattattcaggcccggtgcgggtaaaattggtattttatgaaattttttagggtaaatctgaaaaatagggacatt

SEQ ID NO: 23260 - DNA, 2389 bp, Heterodera glycines
ctttatgcataaaaattacaaaagtgaatcattcatcaattttgcccttttgttatgaaatttctggtttagacaggaaaagatgtgttactgtgccgtgaattagcagatgaagcaaaggggacaacatttgggcttaaaatccagagaaaagtcaattgtgcaattttttcgggatttacctatagaattaaagaataaaactgacaacttattaactgaaaattataggtgaatcacaagaaaattcaacactcgggcttaaaatccggagaaaagtcaattggtgcaatgttttcgggatttacctatagaattaaagaataaaactgacatggagcagaatttaaatttacatgtacaactaactttggtaccgcattggcaaatgtaaaatgccatagtcagaattttcaaataccctgtgacacaaaagggaaccaacagtaaattcagctttcctttaatcaaccgagtgtaaaagaaaaatgtgaagttatatgtccagatggaaaaagtgaaataacaattgaagccactctgaattatgtgagccaacaagacaaaataattaacccatcgaataacaaaaaggaaacacccgtacttggaacttccctcgaacaattttccgatatatttaatttcatatatacattaatcaaaacaaatctttttaattttttaactatactttttactttgattgtgatgataacatttataatttgtatatgtccaatgatttacccacttctttttaaatactttcctttccgtcgcgggaatgtcgcgactacgcgaaataggatttttaatttaaaaaataaaaacaaaaaacatttaaattaattttaaattagacagataaatattaattaattaaatgtgaacaaaatgaaggaatgagagaagggaaaaacactagtcatattagtcacaattttttctatccgaaaaattatcaaatgttaaaatttaattatgaataattggaacgttaaaagaaataacagattttaaacaaatgttaaaatgagacaaaatgtgaatgatattaaagaaattgtaaaatgttagaaaatcggaaaaggctaaaatggcacaaactggaaaatgagaaaaggttagtaaaattggcaaatgttagggacagaaatttggacatgccaggttggcaaacacattttcaagcagaagttgccggtataaaaggagggcgctaaccccccaccaatcagtacaccaacggtttcctgagaggcattgcctcgtcctcctttccctcccttccctttccccccgtgccggcaactgctccgcctgcccgttcgtgccgccgactgttgtgccgaaccgtgcgccgcccgttcagtgccatgcccgatccgtgcgccgcccgttcagtgccaagccgacccgtgcgccgaccgttctgtgccatgcccattccgtgccgccgccccgcaccactgatgccgtgccgtgtcgccgacgtttgtgccggatgccccatctttccccgacttgtgccgtcccccatttgtgccgtcccccattttgtgccgtcccccattttcccccattgtgccgtcccaatttctgtgccgtcccccattttcccccattgtgccgtccccatttctgtgccgtcccccatttgtgccgtcccccattttgtgccgtcccccattttccccccattgtgccgtctccatttctgtgccgtcccccattttgtgccgttcccccatttcccccttcggtttaattacccaagtttgaggatttcaataaagtgcaaattgttacactttcccgcctcacttgacccccagcaatttcgccatccccgattgaccatcaagcgtccaccccaaaatttcgccacaaccattccctctcctggtcaccattgcgccagcggcccacaccccgccgactcgcactactcgtccacaactcaaatcccagcaccaccaagcagcgccggccctctaccaaccattgaactcatcagcacccccacatctcgccaaattcctacccctcccatttgtgcgccatcgaaagcgtacaagtggtgccacgacccgggaacaattgcacgcccgcctctaccggaccacaacaactgacccttcgaaagcacgtcgccacttttctgaaaaacaccggccgctcaaccattcaccaccggactccatttgaaagtaaacacggtcacaaacccaaaaaactcacaaaaaagggtcaccaagctcaagactcgaaattaagggataatatccccacaattcaaaaaaacacacacacaacacacaaacaaatcacaattcagtgagaaaggaacgcccaccgcatcccgcgcaaagaggaaaaaccaaaa

SEQ ID NO: 23261 - DNA, 1159 bp, Heterodera glycines
ctcttttctctctccctttcttttccactcttttctctctccctgtcttttccccttcttttccgtcgtcttttctctctccctttcttttcccactcttttctctctccctttcttttccccctcttttccgtcctcttttctctctccctttcttttccccctcttttctctctccctttcttttccccctcttttctctctccctttcttttccccctcgttttcctctctctccccctcttttcccccttcttccccccctttttctttttctccccttcatcaatttgtttcttcgtccattcgcttctttctttgctcctttcccatcgcttttcaaatggcaaagattttatgctcgataatggtcggactttccatttgttgccaaataacattatcaacttcctcttttccccatttgtgcacatttatttgaatggtcaaagggaaacacaaaatgatcaaattgtttttaaaatttttataaaatatttaattaattaattgttttattgttgaattggcccatggattggcaattgtgatgggaaaaggaggatgtttttatctttggagaagacaaacaaatgggggaagggacggacagaggggggagcggggcaattagcaaaacggcgatcgatgccaatgatgagcgactgactatcaatcaattaacattaattaataattaattaattaaacaaacaaacaaacattaatgatgtgttgttttatcattaacaccacgatttccgttaccatttataaataatactttaaacacatgttttaattgaataaagttacgaaaattgctgaatttaaggtcagttaagaattttaaaattaaaaagacgaacaaaaaaacaaagaggaaaaggaatagaagaagaataagagaaggaggaaaaggaatagaagaagaataagagaaggaggaggaggaagagaagaaagagaaggagaaggaggaaaaggaagagaagaagaataagagaaggaggaaaaggaatagaagaagaataagagaaggaggaaaaggaatagaagaagaataagagaaggaggaggaggaagagaagaaagagaaggagaaggaggaaaaggaagagaagaagaataagagaaggaggaggaggaagagaagaaa

SEQ ID NO: 23262 - DNA, 1094 bp, Heterodera glycines
tgcagtggcaagcacagcgagtcgcttatatgcacaccctttgacacgtaaaatattccaaaaaaaagagatagtgattttttctggattaggccggagaaatataaattaccagctatttgaaatgcagtgggcaagcacagcgagtcgcttaaatgcacaccctttgagacgtaaaatattccaaaaaaaaagagatagtgattttttctggattaggccggagaaataaaaattaccagctatttgaaatgcagtgggcaagcacagcgagtcgcttaaatgcacaccctttgacacgtaaaatattccaaaaaaagagatagtgattttttctggattaggccggagaaataaaaattaccagctatttgaaatgcagtgggcaagcacagcgagtcgcttaaatgcacaccctttgacacgtaaaatattccaaaaaaagagatagtgattttttctggattaggccggagaaataaaaattaccagctatttgaaatgcagtgggcaagcacagcgagtcgcttaaatgcacaccctttgacacgtaaaatattccaaaaaaagagatagtgattttttctggattaggccggagaaataaaaattaccagctatttgaaatgcagtgggcaagcacagcgagtcgcttaaatgcacaccctttgacacgtaaaatattccaaaaaaagagatagtgattttttctggattaggccggagaaataaaaattaccagctatttgaaatgcagtgggcaagcacagcgagtcgcttaaatgcacaccctttgacacgtaaaatattccaaaaaaagagatagtgattttttctggattaggccggagaaataaaaattaccagctatttgaaatgcagtgggcaagcacagcgagtcgcttaaatgcacaccctttgacacgtaaaatattccaaaaaaagagatagtgattttttctggattaggccggagaaataaaaattaccagctatttgatatgcagtgggcaagcacagcgagtcgcttagatgcacaccctttgacacgtaagatattctcaaaaaagagatagtgatttttttctggatta

SEQ ID NO: 23263 - DNA, 1195 bp, Heterodera glycines
  unsure (1)..(1195): unsure at all n locations
acaattagcactttctcaaatgtttcaccgtttcttctcttgttactcatcaaaattgatctgaatgtttctgttatctgaaaatgagcatgattcatacatatcggagtaaaaaagctttataattcattggaaaattaaacagtattttttgttaatatttttactatttttatgtacctacattggcattcccgttgttcaattaaattttctgatcagtcaaaaatagatctcgccaatcgaccggcgagtccatttccgcactttcttttcactttgtatttgtcggttcttttttcccgaagtcattcatcaatcactttcaattgccattggcccttttagctctgagaaaatcaatccgaaaataattgcactgataaaatcaattgtaaattattgggatcaaatattttgaaaagtgtcgtccaattcgtcggtttagcatttgtcgctttccaatttggcttctttgtccactgatcattgtccccttttgccagtgttttgttgtgaaatgtttcgtgccgatgccatcaccaatttcgagcgatggctccaccagcaacgcgcagcagacgacggaggacagcggcagcagcagtttttgtggtccaaaatcgaattgcgaccggtggaggacgacgacggcgaggcgatgggttacggcatttttgcacgggaggacattcggctggacgaaacggcgataaaagtgaaacgaatggaaatggcatttgcattcagtcggattgcgttttggaactcaaaaaaaactatataaaatggccaattttgaggttcccgaacggatgatgataacggcggggagagtggcggacattggggaatatgccgagatgatggaaaggtgggggggggggaagagaagagaggatgtgggaagtattgaaaaagaaatatcaatttaaataaatttaaaaaatgaggaggggaagggaaagaaatgcgaaaatacattaaaaattagagatcggaattttgcgaaaatacggataagtatcagtattacgtacttgacaccgatacggattaagtacttacggactaaaaatacggaaaatccgtagtccgtaaaaatccgtatcggccgaaaaaaatacgtattacggactacggatccgtaaaagtacgtatacggatccggtccgtatccgatctctanttaaaa

SEQ ID NO: 23264 - DNA, 1094 bp, Heterodera glycines
ttggaaaatgagaatggcattcccaattgatcatttttatgcagtgcgttgctatgtttgaccataaacacttcacgcccattatctggttcgtgccgaccaacacttttgtgcccgctgggcgtcaactttttgtgtgttacggtgcgcatgacaacgcccgacttggggtggaatatggctttacaataaaggtggggggacagtaattatggccaactaattaagctaattaattgcagaatgagtccaaccctttcaaccgcgtcgcattgccccgtggtcagtgtttccgcattctcttttttaagtgttctgtttattttggaccttttcattgccctcgccgaacgcagcggaaaacgcgtgagcgaaaagcgaagggaagtgctgagaaaggctaatctttcctggtgattcaccgattaattagcctcgggtgatcagttgttctgataatttagcacaatttatgccacggatgaaaagccgagcttttcgttgcgaaaaagctgcgcaattcttttgttggaacgcgacaaattgtgcgtttttccttaggcgaattgatcaattaatttattggatttaaatttaattaggcaaaattggagccaatacatttttggagacaacaattgtgagggcaatgatggggaaaatgatggtcaacaattggcggatggaagcgaatcattgcgcgaaacgcaactcttggcctccattttgggccatttgcaaaatgcgcttgaggggcgaatggcaaattgcgtggatgccgaaggggaaaacgtagcgaaatggcaaattggggagaaggaggaagaagaaaaggggcacgaagaggaagcgaaaatggtggcatcgttgtgggaggaacaagtcgaaattgtgcgcggaatggcacggcatttgacgcccattttggacggatggagcaaaagcggggggactgatcagaacacaagtgacggatcagcaacaggccaattctgacagattttagacatttctttttgtttgccttaacttttccccgtttatacaattgttaatggttgttttttctttttcgactctcagaatattcatcg

SEQ ID NO: 23265 - DNA, 1889 bp, Heterodera glycines
  unsure (1)..(1889): unsure at all n locations
catcgaacataagggtgggcgcaaaatgaatgccgtattttaggggaaaatgtgccaaaatccgtccgcctaagggtgtccactcacgcgggcaccgaaacgaccatcacattcctcggcttcggcaaggcaaacgcgggccaatacacatgtgtggcagagaaccaatacggcaaagcggagcagaatctgttgatcgaggcagcatgtaaatggaaattggaaaaggaaattccaaattcatttgaatttagcacggccaaagtttgtccaagggttggccaaccgggaatgcccctccgatcgtccgctgaggctcgacgttcggatagagggcaacccggcgccggaagtcaaatggctgaaggtgcgctaattgacactaatgactggtcaatggccgagcaatttgacaggactggcgccctctggtcgagtcgtcgcgagtgcacattgtgcacgagccgggccttgacctccggtcgctgctcatcgaccagccgatttggagcgattccggcatttattcgtaagtgctaattgggccatgaattaatcactaatgggcaaaagagcattcattagttggattaaattgggtttacgaagcacttgaatcttgttttgttttttggcatcaattctgagcgttttcagttgccttgcaatgaatgacgctggccaagcggtcacttcgtgcacaattaccatcgaaggtaatggcaaaatgtcaaatgtaaaattattggccaatttcagccgccgaaacggatttcatgacagacataaagcttcgggcgttgaagaaaagcataaaaatggaacggggcccactacgcgacatttacgacattcaggaggccgaggtggaggagtactcggccagcgaagcgacctctgttcagaacggaagctaaaccaattaattggccattatttggaaccatttaatttggaagaaaattaaatttaatttgggggaaatattttcggtaaatactttaaaattcgattgattaatttgttggttcacaattttatttgccgaatcagcgcaagttttccggcactttttccgtggctcaaatttctgtccaaatagcaaatgttcccccgccgcccaccgcccccacacatttctttgctatttttcatagcattattttggaatccctcctccacttggatagatagcagctgttcccctccccccttccgaatcgaatatccccggaggggatatatccgctttgatgagattgatccatttcgaccatcattttagatcaagctcggtggaaagcttttcgtttagtttcctgaaaatagcattcatttttggcaccgtttcaatgtgtgcctttttcatcaaagaaaatgcaattgacaattattacataattaattatctcattttctctcctctctctctcttccccatctttctttctctggcgattccttgttgtgttttatgtattgttatcgccgtcaattggtattgtttattgattgattttttgatccattttcaattgattttttctccattgtcctgatcggacttgactgcccaccgatcgaaattcaaccactcccatttttcgttgtctccgtcccatggttttgcgccaaataaactcactcaaataaagagcatttatttcattttttattaataaaataataataatttttaaatgaatagattaatgaattttcttaaattaaattaatttttttctgtaaagtcctttttaaatttaattgggtaaaatgtccgatgctttcgccgccggcgaagaanatgcaaagggcggtggcctttttgcggttaatggcacggcaaatgcaaatcgcaagtcgccgtccgtctcgcgaggcgattc

SEQ ID NO: 23266 - DNA, 1154 bp, Heterodera glycines
gggggggggcaaagggagaaaagggaagggaaaggacacccccggggagacaccccccgggggcgtatcaatgggccatttttacaccccaacaaaacgctttttgcattagcagcagcaacggcagatggtcagcaagggatgggtggtgttgagctttgtcctctccgtttatttgtgcatttaatggagagcatcgagaaaaaatgcacttttctattttttaattgtccgtttgttttttgcccactaatatatgtaagatttgatcacaaaatgaatgtgacagaaatgggcaccgattgtgccgatttcgaatgtgccatcattatgccattagtttccaaaactcgacacaattcaaatggaaaaagcattgtgtaagttcataaaaatgtaatggctgaaaattggagtcacatgaaatgcaattattgaagccattcccgtggcttttacaaaatcattaattaattttaaaaaacggacgaaatttttgggacattcgcgcattgttgacacattaagcagaacaaagcaaaagctaacagacagaagcagcagaagagcaacttggtgaagatgcacttgcacaaatgggaggagacaatgggcaaacaaagaaagaaaagaaggaaaaattggggggaggaggggaaaagcgagggatttggggctttccggtggcccatcaaatccaacgacgaaccaccataaaatcaatgctttgggtatttttggcgtaaatcttcaaaaaaaaagtctcaattgcggttgatcaaaatttggcccaatgattgtcacgcgctctttgagtccgatcaaagtgtaaaataattttaaatcaaaattggttatatcacaatgcttttccttccattttcagtgccgatcgttctttcatcgattcgcttcttccgcctccgtccccgcgccgttcgcctttgccatcgacctgcggcgccccgcccggctctggtagcaccgccgcgcggttgggcgcttcgcaatgcacgcgcgaggcgcaagtgcaagtttttgtgagccaatatttaaacttatttcttgcatattttattttgggggatgtcgtcggtaaaggcttctcgagagacgcgccccgagaaaagcctttggtctcgtttcttcaaaaa

SEQ ID NO: 23267 - DNA, 1790 bp, Heterodera glycines
ttcttcccgcccattcttctttgatgataaaacgccaactctactaaaatttaaaattttcaatttaataatgaaatttttgtttatacctaaattctaattttagcatttaattttaagccttcaagccgaataaaatcttttttcttcgatggatcaacaggagaaaaggtaaactttcaatgtgtggtaatttattcaaattaataaaaacaaattttttaaatttagttccggatggtttgcaaatgttgaaatgggtccaccggatgtggttgtttttttgcatttttttactagtcaaacaatcaaaaatatagattttgggcgtaactgaagcatttaaacgcgatgacaacccgaaaaaggttaaccttggagtaggcgcatacagagatgaccaggtaattttaaaataataatgttcgtgagattttattattattttttaaatattcattttctgtttagggaatgccttttgttctgccgagcgtaaaacaagccgaaaaagaattactcgaagcaaacctcgacaaagtaagtgataggacagtcaaattaatcttgatgcacttataaaatggagcagttcattctaggaatatgctggcattgccggtttgccggacttcaccgccaaggccattgaattggcgctcggaagagattctgaagttttgaaagcgaaacgaaacgcgacggttcagtcggtgtccggcacgggagcattgagaacgggcgccgaatttctcgttggtttttaagattttacccaatttttattgcctaaatagtgtaaaatgcactaacgctgatcataaatttgacaaatgcattttagtccaaatggtttccgcacaacaaagttgtttatcagccgacgcccacttggggcaaccatgtgcccgtgttcaagtgcacatcaaagcaaattaattgccaagtccaaatattcttgtcgtttaggtttgctggctttgaaatccaaaagtaccgctattacgacccgaagacttgtggctttgatgagaatggctgcttggaagacattctgaacatcccggcgaagtccgtcattttgttccacgcgtgcgcccacaatccgacgggcgttgacccgacagtgcgtttttatatgaaatttatttgattttttcatcattcctcatttttaactaacttatcacaatccggaatgacaaagaaacccctaattagccagagcaatggacaaaaatttcggatgcatgcaaaagccgcgatttgtacgtctttttcgacatggcctaccaagggtttgccactggcgacgtcgatggggacgcacacgcattgcgctatttcgttcaacaagggcacaacatttgtctagcgcaatctttcgccaaaaacatgggtctttacggtgcgaattattgtttttatacaattattgtatatcagaaatttggttttacgaattcaatcaattaatcatacctgtttttatacaataattttgtttttgttccaacaaaccctatatatgtttttttatataactctaaagccataaatgtaagtctgaataaggtaattaattgtacgagaaagaagagaatgctaacatttaaccaaagttacaaaacggtaaataatcaacgctttctcaattatcatattttttggcattgcaaaaaataaaaataaattatttttattaattttaggtgagcgtgtcggtgcgtacaccgtcgtctgtaaggaccaggaagaagcaacccgagtgatgtctcaactgaaatttt

SEQ ID NO: 23268 - DNA, 3161 bp, Heterodera glycines
tttcgttttaatgaatataactcgaaatctccgctgggctggaggaccccgtcccgcttttgcgagacccaacccattaaacgcgcatttcgcttttcggcattctcaagaagaatgggcgtcggttttttctgcgaaccccagaaaaacctttgccacctgtacacaaaacactaaaattttaatgacttccagcaatttttaatttgattgtccattttaatttttatcattttctacaaaatattataaaatcatagccaaatctctaaaaataactttctggcaccgtatgcctttttatgactgatcattttaaaacaaaaccacagtacactatttaactttaaatcgatgccaaccaaaataaatgtccataattcaaaataatatttcaatatccatttgctaacctaattataataagtgtattcagttgatcacaacacagagtctcagcatcagcaattccatacgtctcatcctcctttcttctctcccctcaattgttcagcccttcttgtcaaagtacgcctgcgagccctttcgggtccggcttaatggtgtcggtgccgggctgccagttggccgggcacacctcgccatgcttgtccgtgtattggaacgcttgcacgagacgaagcgtcttgaaaatgcgtgatgcgatttagaatttgtgtaaattttagtttcaaaaattattatgaaaccaaacgcttttcttcagttagagggggggggggggggggaattgcgtaagagaacggtgggataaaaatgcacgtgcttttagccctggttgtggtaaaccgttcattaatgcctcgttttataattggtggacaaccagtcctagacaagaaaaagtgattgaagagcctgtccgtccgaaggaggaagacctttttttctcttcggaatcaaaaaaaaatttttttcccaatttttttttaatgaaagcaacaatggagaaaatagcttttttgagcattcaaattaaaaaaacaaaacaaaaacaattgcctcgtcaaccgagcgaccaacaggcaaatcgttgatggtgatctgacgaagaacgcccttgtcatcgatgatgaacaatccgctggaaaaggcaggaaattaatgaagagacagacgaccccagtcctcctctcattgtcagagtttctctgtgtttatgcggaaaaacaattttgagaattttccatggattcacgcacaaatttgacgcccattccaatgcctactggagccgaattggatatttaaaaaaaaacagagtcaattgataaaactttagtctcgcgtttgttcagatgactataataatatgttatggatcggatcccccgggccggagtttacggaatgttaataatccgtaataccgcatctgttgaaaatttcgggttgatcccgcaaatccaaaccggaaaaaaaaaattgaatttcaatcccgcaaaatttgaaagttgcgttagggttactactctttaccctaaaaaattttatgaaaaggggagggaggaagggggcccgttttgataaatatttgaaaaaatttatggaaaattcttataccatccggccccccccccctcccgttaaaaaatgaatattttcgaaacgagattgccgttaaaagcattgaattagtcgagcagcacagaccgataagcaatgcccgcctcctccatcagcacgccgtagtcacggctgattttgtggctggtgtccgccagcaccgggatgttcatctcgccaagtcctccctgctttcgcggcttgttgatccattcaagatggctgaatggatatgggaagatttagtgaaaaattcgtgcaaaattttaaaaatttatccgtttcctaacaatttccagggaaggaatcgaactcgagcaaactcccaaaaaccacactccctccctgcattgggtatatcagtgtaaatttaatcccgttagttccggtccacatgccgggaagtttgggtcgggaatggaccccgggaatccgtttcggaaacgggtccaatgattgtccatgcccatacataccaaaatttagagtcggtagaacacgcgatgagttggacaccgatctttttgaactctcccgccttgtccgaaaaggcaattatttcggttgggcaaacgaaagtgctaaatgggagaaattatagtaaaagagtgaatccatcaaatgcactgttgccaagtaggcttatttctctaagatttgtactgatttcaaaatttctgacaaattttttttttaaaaaaaggactcaaaaccgcaaaaaattgcgttttttccctgtcgcctacaatctttttttgaaaaaataaggcaaaaataaagcgctaccggcaaaaaaaaaggacgttcgtctgggcgaatttatgggattagggtaaaatttcagatttcggagcctttgtgcccatttaaaaacttggcaacattgagcatattatcatccaacgctgttgccccgtacaaatcgagtgggtagaagaacagcaccacatattgccctttgaactgttccagcgaaattgggtttgaaagtcgccgttcacaacggcgtccgccatgaaatttggcgccggcttaccaatgaaagctttcgagctggatgacattttgtcggattcaataaataaaggcactgcttaattgtaaaattttaaaggtggaaagaattggtttttaatgcaaattttggtacttttcggttttggggcctagatttgaatttttttcaaataaaaaaggacacgcaaagttgcaaacttatgtgccaaaattatattgtgagcataaatgtcagccaaaattacattgtgggcataaatgtcacaatttaagctgatctttgttgtttaaacaaaaaaaaatcaaatctaggcccaaccgaaaagtaccaaaattttttgaattttctttcctttggaactacatatcaatttatgggaattaatctgatgaggattttatcctcagtttgtggtttttggaggagtaaatgaggattccttttgaaaatgcgatatttttcgagaaatgattacctgctttttgaaaaactcacaaattttctgatttagtttgaataagtgtaaaccttagtatgagaattaaaaaaaatatat

SEQ ID NO: 23269 - DNA, 1968 bp, Heterodera glycines
tagccctaaaattttaacttttacgacaatttttctttaccctccatataatcatcgtatcttttttgtgccatctctctggtgtaaaaaatgtcgtcccagtaaagcgggtcacccttttcgccccatcggctgctgctgctactgcttggcgtggtgtccggcgcggacactttttcgcccggcggtgcagcgaattcactctgaacaaaagaccaaaaatttaaaaattgctcaaattatttgatgtatgtggtccctctaattgcttaaaaaattctaaaaaaaaaaaaaaaattgttttaccaaatttcaaaaattaaaacgacagcaaaaggattgattgactgctgctgggtggagaggtgggttcgatttccgtgggtattctaacatttagtcaggtttgggtagaaaaatgttgcccgggaattttgaaaaaagaggcaaaaaagttagaattcttgaaacagcgccaattaatcctagaccctgccagttctacaacgacggtaatttcgaattgactcgtaaaaatccgtaatcgcttcaaaaaattgcttttgtctgtccatatggggtccttaaatctcagtactttatccacagtaatgttcggcacattacaacggcatcggttccacgggttgaatggcgagcagcactgcagcacttcgcgaatttgcagcaaaatttctcgggtcgcctcacagtcatcggccaacaaatcgcatatgttcggagcggtctgtgcaaaatgcaaaaaaaaaaaaataataattacttacaaattagtggtaaaaaatagagaccgggtgggaccgagactgcacggctgcgggatattttttgggcaatgcgcgaaatttgggactccgcggcaatttttgaccaattaaaaaaatattttgaaaagtaaaaacaatcatagctaggagggacctgatttttagtggcaaaaaatcccaaaataattaactaaatgttcacaaaaaacccaccccccccattcagtccatcgcaaattttgtgtacaccgggctttaaaaaaattttaaaaactttaaaaatggtttaaaaaattggaaaaattttaataaatgcgcgatccgcggtccgaggcaattaaatgtgcggtgcgcgggatttttctgtgtgcggctccaccccagccacccgtcccctatttcaggtatgctgtctggagtccggtcccggatctcgtcccggttcattttccgaatcccggcgcttaaaactagttccaattttttggaatggcatttattacacaattctttttgttgttgttgttgttgttgatcaattcaccttattaggattgctttcatagggtagcaaattcgttttgcgagtgatccgttgcgagaacattggccatggggtttggaagaaaattcgcaattcttctgcgggcggaacaaaatgaagttgttttgtgcggtgttgtcctcttccgtctttgtttggtgatgatgatggttcagaggcaattgaaggcaaaattgtgccaattgttttgctctttaattgcattatttatgaattaattaatttaaaaagataattattagggatctttttttatgtaaatacatatttttttcctagattctccatgctctaaatagtaggaaaaacactttcttttttgggtttgcgaacaaaagttgggactttaatttacatatttttacaaatttcgggggttttctacatattacatatgtacatatttttatacatattttggactttttcgcattttttcgtacatattttacattttttgataatttttaagggattttttattaaatgtccccaaaaaatatcccaaaatttcgcaattttttcaaaaattttgagaattaatagaaattttttgtgaaaataaaaaaattttttttttgaaaatgggccccaaaaaagttttttttttcaaaa

SEQ ID NO: 23270 - DNA, 2293 bp, Heterodera glycines
ttcgctctaattggcgctgtacactcggtcccttccaatcggtcaacgatcacgaccaaacagcacatcacaaacacacgaattatttaaaaaattattgtatcgctgacccattcgttggaagggagtaccgtacctctgctattgcttgtcctaccgtaccccgtgcactgtgtctgtcccttactttttctaggatccttttttagacactttctttctgtttcgtttatattttttatctctccccctcccttcttagtctttgtgcgatcgtaataataaaatgcgatggaatgactgaccgaacattttgctgatttgtgaatgtttctgtctcagtcgtctgtccctctccacctttctctatctctttatttctctctccccttttttctgtatctatctatctctctctctctctttctcctctctctttctctctctctatctgtctgtctcttctctctcctctctctttctctccctctctctccccccctctctctctctctctctctcccttctctcttttcgctttctctcttccccctcccctctctcttcctctctatctctctctctctttctcctctctctttttctctccttctctgtctgtctcttctctctccttctctctctctcccctttctctctctcttccatttgctttcactttcaatttcaagacattcttttccctcttaaaatattacacaatttgcagatgggtttaatgaatgaatggggaaaggacagtgatatttttatttatcaatttattttattttgattatttatgcgtttctctgccgttcgcttcgtgcaaaacaaaaaacgctttggatgttttacttattccaccgccctccaattctttgtttccaattgctccatccatcatccttatttctgttcatctgacaaatcattcatttggatcggtccggtggcatttcgtacaaaataaacattttattaaaaattaaaataaaaattgtttttaacattttttgttcgatgaaggcttcagaatgttttaggttttaaggctcattagctcagttatcatttacgaaaaatacgaaaaaattgtacaaaatgacatcgattattctttcaccatccatttgtcatcaaagaccaaactttttgttgcaaaccgtatcaaaaagtcgagaatacgtcgagacgggggaaaggtctaattcaaaatccatagaaaggacacagtccaatcccgctgcccaattctaaatcctgggacagctgatttcccggtcccaacaacaccttcgattattaatcccacttgaatttaactgtgtgattttttaatacccttttatatttcattataaaattccatttttcttaattagtcttaaaaccattaaaactcattaatcggttcacctttcctgctcagaattcgtttggagtccattcgcgaaaggaaagcatttgaagcagtttcggcatccatttcccctgcagcgatgtccccagtgccggtcaattcgcccaccacgccgacaacaataaacggaggaattactcatccgatgccaatgtcaccggtggcagcagtgggggcagaaaaggcacgggaggagcgggcgggggcaaaagcgatggaaaatcatcagccgatggggggataaatagggctggcccggacggtaaaagggataattcaaggacagcctaagcgtaattttagcttaggtcggcgtactggagtcccgcaccgatttatggatttaaggagagttaccataaaacacataagcacccagccatttttaagaatctttttggagagggattattttggaatgacttaattttcccaaaaagtcattttaatttttaaaagacttatttaggacgggcatttattttaggaatttgttaatttaaaagtgaggttcatttggattattaaaacctaaatgggcttggttggttggtttctttttggcataccttttgtaataaaaagttttaaaaatatatttcctataaaaattattcagacatccatttaaccaattctcatcccttaatttgaattcaaacaagaacagaagtataacaattttaattttcaaatttattcattctcagtgcctttattttgcagacaaccttttttatatcaaataaaacaacttatataattttttatttgatttttgacgatcgataactgagccctattaaaagtggacttttcagtacctaagttttttttacatgaaaatggcaaatgcgccttaatttgcat

SEQ ID NO: 23271 - DNA, 2126 bp, Heterodera glycines
  unsure (1)..(2126): unsure at all n locations
atttttgcgattntaataatttgccctaattntggtttgttttcagtntactgactgtccctggtcgaacccgagagcagaaaggtgtgaattgaattcaaattcaattatggaacaacaaattaataaaaggtgccaccactggactggctaattggtcaaattatcaaagcaatcaaacagaagttgaacattccgataatcgctaacggcaatattcaggtagcaacggtatttctagtgcattttcaaattgattttatcggtaaatcaaccttttctgtttttcaatattcgggcttcgtccaaatcttatttgaaatgttgttgggttttcctcggcagatgcccggtgatgttgaacgatgccttgccgagactggaattgatgccgtaatgagtgccgaaggggtgctcaacaacccacaccttttcgatggcaaaaatccattttcatttgaggtaaactattcctccgaattaattgtaaagtgcatataatttattttttggttgcacgcgaatatttggagtttgccgaccgttacaaaacggggacaagcgcagttcgtgcccacctttttcacatttgtcattacaggtgttttcgtcgaattatttttacaaattattttgctaattaatataaatttcagttttctgaaatacgacgacttgcgagaacggaatgcgattatttgttcgcttagcgaattttctgagaacattgagaaattgcgcaaaaggttttagtcttttgtttaatttcaatttaaatttgaccgtttcaatttgaggtgtcagctcgaagttctcaccaatgcaaatcattccaacgacatttgttggtccgcttccgtgcagcagtgttgtcccaacttcgaatcactccaacaaatggtttttaattgagtccaattatttctcgttgctttttttagtccatcattttcaggttctgtccactccccacttcttctgcaagccctatgttcgtcaaatgttaaaatgcgctgcggaagcctcggaaaatggagacgatgtgccaaatttgcccgtctctgtcagtgcgtatcgcgagaagcggcgggcggagatcgaaaggttggcaaaagaggcgggcgtatcgaagaggcaaattcggaagagagagaagcggaagagggggcagacaaaggagcagaaccgaaaacagacgtacccaaagtgtgaacggtgagtggaacagattgcacagtccgtgttcaaatggtttgggttttccggttttgaatcacttcggtttcaattcccaacagcctccggttctaccccaattgacaattcccaaaataaagtgttaacggcgaacactgcacttatcgaaaaacaaaaacagatgccagcagccggccggtgtgaactgtcactggacaatgtgtcgacgctgttgcaaatggacatgcgcaaagcaatggaaggaccgggagggcgaaggaattgggcagcggacggcgcaagatgagaaatactgcaaaggtgggcactacttcccccttcccgtcgttccctccccccgcatcgtttcaccttgagaaattaaaataaaattattaacttagaaatttttcaagaaaaaaacatagaaatccaagaaagaaggattttcgaagaattacagcggttttttggaaaaatttttgaaatcggcaattcactataatttttttcgaaaaatttttcttgggattctcttataaaaaaatttctgattttttttgaaaatttctaacttttcgtcccgagggtaaatgagattccatttctcttttctcggtcacagttcacggttttacgcccaaaatgatggccgaaaaatggaaacgcacaacaacgccgccaaatgcttctgatttgtgagtgatgcgaatggaacaaacggacagaaaacgaagtcgcaattgtcccagcagatcggaatttgaaatggacttcggaatttacaattttgtgccttggtttttattgtatataaaactctcgcatttgttaaattttgttcaaactccgccgtatttccaatataaacagacgcatttcaatgtttgtacttctcttgcgtttgtctatttttgcagagctttctc

SEQ ID NO: 23272 - DNA, 1768 bp, Heterodera glycines
ttcgcatattttagcttttcgcatttcgctttttatttttcaatttggcctatccctggtgtcgccgttttagcttttaatcgacggtgttttaagagaattcgttggtgcgcctccgcagttttgctttgaaagttatgaagtcagttgggttggttcttccccatacattaaaaaagcgggggtggccaaatggcgaaaaagccacgtaattgactacctaagttatacggcgtgattttaaaggcgacgaccggtgggagaaacctggccacaaattgccaattattgtgtcaaactacaagattttagggggatttatagtcccagtcgcgggaaaattcttgaaattcttaatgaattcgtaaaataattgtttacccaaaaaatttcctttatcctttccgtaattcaggtgcgccttttggatgagactggccttgaactccttttctccggcacaggtttcgcaacgaacgcccacaatttccattttttaaaatttgctttctgagatattattcctttctgctctttttttactttccctattttttgttagtccatgccgaagaaatgcatcgcaatggcagcatggcaattggacagttcaactttactggtctcgaagtctgttgttcacttgtcgttttgtgacttcttttcagtacgacaggatgtacatcccttccgtaattcccgttgaacgggcggttgacggccgctgtttgtgccctgtttttgggtccgacccttacgatgtgaaggcggtctgttcctgcgtagcggctgactggcgacccatcagaatgactcgtacgttgtttttagtgcaaattcattggtaactctcttctcatcctttcctccgtttaggccctgacgttgttaaactgtgcgctgactgtaagactaatcattcgcttggcttattgcctccaccgattgaatttacaaatccgacgacaaacagcaaaataagcataatgtggtgggcatttccatttccccattttattttcatttattaaagttgtttaggcctcttttcgtgctattcaatgcgcttttcctccttttgctatgcattttcatcatcggatatcttcgctttcgatctaacggccaaactctgagcaaaggccaatttcaagcagttcgcttcgtcccaccttcgcagaaagaacgtacggaccaaagcgaaggcaacgcggggcgtattgtcccccgctgtcttccttcgtcaacggcttcgtcactcgctgttcattccaattttgggcttggcacagtgtctaccgcttcactgacaacggaacctctcatttcggcttatgactctttcgaggcgccaatttgtgacgtttgtccgcagaatgtgctcattgtgtattctcacgacagcgacgcgcacgaacgcgcagtgattgcattggcagagtttttgcgcaatgttttccttttgaatgtttccgtgagtttttcgctgtattattttattcgtagtttttgtcttttgttagttggaccgatggaacttgaaaagaattgaacaaaacatggtcgattggctatcgtcctctgttgtttcggccgacaaagtgttggtggtcaattcggctggggctttggagcggtaccgtacgaaagcattttggggagcaagtcaaattgtggagaaaatagaatcggacttgttggatcgcatttttactgcacacattgaaaaggcacttcagtgagtctctgttttttggatatggtttga

SEQ ID NO: 23273 - DNA, 1280 bp, Heterodera glycines
  unsure (1)..(1280): unsure at all n locations
ttcaggttttntgaaaaccaaatntggacaatcttgggtgtcattcaaaactcttgatgaggagaagctttctctagcaaatgttaagcaattttgagttgaaaaaaagatatgaggcttcaaaattttgttttttgagtaattcataaactaggtaacagataaaatcaaaaaattcggcactatgggtcaagcccagtgttagacaaaattgctcataacgccaaatagcgtaattggcgtaaatttttgcgcgctaattcaaaagttacactggtaaatgccttttttgtattttttatttcgatcttccataactcgcttcattcccaactaaactgaacaaatttggtatctaaaaaaagattttgaaaaggagaatctttttctaagcaaatgctaagcaatttaactcatatgaaaaaagttgtgggaatttcaaattttcattacgttataactcagctcattgactgctgattttaaccaaaatgcctaaaactaataatttttctattgatgttaaatgtcgaaagtgaatttgttcttttataaccaaaattatttgaattagcgaatttggtgttttttatgtgttagagacatgaaaatagtactccaaaaggagagaaaaagaaatgcaaatttttttcatcccatttttgtaatgttctaggccgaaattcttaaccaaatcactgaaattttgttaattttctttttctctatcgatgtgcaaaatttggtgtgaatttaacaagcagaaaaaaagttaaacagcatgaagtaaatgttgttttttacataattaaaatgaagagatagtacgccaaagaaagagaaattacaaagaaaaagagaaacgacgagatagtactaggcttttctctgcacagtggagttgacccatagtgaattcggtttttctctattaacagagataaagaaatagtacgccaaaatgagagatgtttttttctctgcattctctatttattggtacacttctcgttttttcggacggttacctatccaaaatttttgtttttgcctcccagcagaatcgaatgtgtataaaaagaatcgcctttccctccacttcacatttctccttctgtaccacactgcaaccaacgaaccacttcaatggccgaagaatattttttaatcgctgcggctgccttcggagcaggaattgtaatgctgcgctttcttcattttttttcaaaatgcaattcaaacatttttgtcccttttcagtactgttggaagacgtacct

SEQ ID NO: 23274 - DNA, 2075 bp, Heterodera glycines
actaataaatatatcttaataccttaccaatttttaatcaatttcttattttcacgttttcacctaatttctcacataactcatattaaaaacgttatggcttaaaacaaatgtagattcgtattcagcatccattttacccaagaaaaaatattttaaaaaattcaaggggtcacaaaacataaaagtacccagcttcgtgctcagcgcctcagattacgcctagaaataatctaccttaaattaaaaattcgggaccggaccaataacctccaccattaccaaatttgtgctcattaatttccaagaccatctaatttatcttcaaaaaataatcaaaatagcaaaactgggtgattttcttggtccacttctgttgaattcacaatttttggtgctgagtcgttatataaaaaccatcaaaaagggcgttatataaaaaacgatcaaatggaaaatttcaacctaaaactgtccataccttttgttaaagtcaacagaattaaacattcttggcatcatgcgatagccctaacatttatctattagctcatctaaatttcaaaaaatttggtcggtcaaggctgagcaaagttatggccaaaagtacacaagcaaccaggttttcaaaaaattttggccataattttttaaaacctaacgaaatttttttaaattttgcaggctaatagaggacacataggttatcgactaatagcaaaaataaaaaacaaaaataatttctaacagaaattttttaattaaacataaaattattttgatcatcaaaaattctgatcaaaacatcttagaaagaacaaaataaagtgattttgctatcattcgctagccctatgtgtcctctattaagctgcaaaattttgaaaaatttcgttaggtttcaaaaaagttatagctaaaaatgtttgaaaacccggtgccttgggtacttttggccataactttgctcaagcttgaccaattttttgaaatttaggtgagctaatagagaaatattagggctatggaatgatatgaataatatttaatttggtttgctacaaaagttatggacagttttaggttgaaaatttccatttgatggttttttatataaagccctttttgatggtttttatataacgaaatagcaccaatgagaagggcaactactcagttcgactttttagacttccgtcctcacagaagggaccatcattttgtctaaatggtccgacccgacgtatttcatccgcacccaaatgtacaccttcacggtgcgcaaccccgacgaaatcacccacggggccatcccttcggtgaagcggcaggggccctattcgtttgaccaaattcaaaagcggaaaatccaccaaattgtcaatggaactgtgcagttcgagacgctgcagtcctaccacttcaacgaggaggccagctgtgccgagtgctttttgtacaaccgaatttggatccccaatttggtctatcagaaatttgtggaggcggcctccaaaccggcgatgagagtgggttttgcccgttggcggttcatttgccgcttcgtctgcgctttgcttctatcccggcatttccccttcagcccgccctcgccgcagtggccatgcaaacgccctttttggaggtggaagtggccgagttgctctacgacggctacaaggacccctttctggaccaaatctgctctttgcccgtcgtaaactttgtctgtgaacaaattctccatttgccggaccgaatcggacttttctataaagtcagacatataattagcaaattttaattcaacgaataaataatttcagaaaaatgggacggcgaacggagttttcgttgtggaggacggacacaccgaaaacgcggagagtttgggcagaattttgtcgtggaaaggctccaaaagccttcccgactattggtgggaaggggaccaagcactgctaataaacggtgggaatgagaagcaatcgctacaatcactgggccattcgcctccttttgaggtacggacggaagaagggcccccgtatattaacaaaaggaacgcctccgcg

SEQ ID NO: 23275 - DNA, 1128 bp, Heterodera glycines
  unsure (1)..(1128): unsure at all n locations
ttgaggagctttttgagcgtaattacgattttacttacaccattttttgctaggcttagatcacatgcgatttcggcactctgataattntagcgctcataatgggatgtataaaggcgattgtagaaggaattggatgcgctaaaattgtttgagaagcttttggaagcgtaaaattgtttgagaagcgatttttacttacaccatttttttctaggcgtagatcacatgcgattttcggcactctgataattttagcgctcataatgggatgtataaaggcgattgtagaaggaattggaagcgctaaaattgtttgagaagctttttgagcgtaattacgatttttacttacaccattttttgctaggcttagatcacatgcgattttcggcactctgataattttagcgctcataatgggatgtataaaggcgattgtagaaggaattggaagcgctaaaattgtttgagaagctttttgagcgtaattacgatttttacttacaccattttttgctaggcttagatcacatgcgattttcggcactctgataattttagcgttcataatgggatgtataaaggcgattgtagaaggaattggatgcgctaaaattgtttgagaagctttttgagcgtaattacgatttttacttacaccattttttgctaggcttagatcacatgcgattttcggcactctgataattttagcgctcataatgggatgtataaaggcgattgtagaaggaattggaagcgctaaaattgtttgagaagctttttgagcgtaattacgatttttacttacaccattttttgctaggcttagatcacatgcgattttcggcactctgataattttagcgctcataatgggatgtataaaggcgattgtagaaggaattggaagcgctaaaattgtttgagaagctttttgagcgtaattacgatttttacttacaccatttttttctaggcttagatcacatgcgattttcggcactctgataattttagcgctcataatgggatgtataaaggcgattgtagaaggaattggaagcgctaaaatgtttgagaagctttttgagcgaattacgatttttacttgcccattttttt

SEQ ID NO: 23276 - DNA, 1837 bp, Heterodera glycines
ctatttattcatccctttccgatctctttgaacatttttcctccttttgattgaatttcaaatttgtaatttacagatgcgcggtcatcctcggtcggatcggtgaacagaagcgatcgccggcgtccgattgacccataagcgtttgaatttgcggtcgattggtctgtggcacttttgctgcagaatttgtctgtccttcgcttcttttctatgagaaatcgaaatgttctcttcgcgccaaccttcgtttggttcctttgctcttccgttgcctttttccttctcatcgcttcctctccccgtcccttctccgtttcctcttgctcttatcaggcgaatatctcccttttctctttggcattgatcagtcattttggctgtatcccgcttcaggtccctggccctgatcagctcactttcggtgtgcctctgctccgtccattccctttttcccctccgcgccctgcgcctttccgtcgccctcggcgtgcgcgacaacggcgcctctttcgccgcgacttggccgtaagccgtgacttccgtccgttgagaattcatttgcattttgaccccgtcatcattgaatcgtaagcatcgaaatctcagcactaattattttttaattatttggctttaattttcgcttagattattcgtttttcctcttcaattaagtttgcctccaagtaagcagatgttcatcaacgtgagttgtcgccgaattttcgctgcttttcccctcccaagtgtacgccgtcctttccctccctcccttttcagtccacgctgttgcctcaggcaatttccttctggcaggtaccgtaccgtacccaatggtacgattttacagtatttatttgttgcctcttcagaaatcgcttctcgtccgtccggccaatgttcccatccgtttgagtcggtcagcttcatgtatccattctcttttgcagtttcctttgcttttaagcaaatgcgagtccaatcagtattactctgatcagtctagtgcatttttgcgatgtgtgacgcggtgcaaggcaattacgaattgcggcgaggtgcaagtgccggacgcgcacctttttgtgagaagagagaagcaaataaataggggaggggtcgagagtctcggcctttaggacgacattggctacaacccaaaacggatgattgcttcccattctggttaagcaatgccgtttctgtctgcagtccaaccctttgtcctgcatcccttccggcccctcggatgggccgggagtgtccgacaccgattttctgctttacgtttccgccgtggacacccaaaggtgtcgcaacgaagagaccattgcctatgctgcgcattgccagcaagagtccgagcttgacaggtcaaaaagccaattgagtaactgcttttccaccgaccgtttcccttcattttcccctaattattaggccaattgccggtcacgtgaacatttgccccggggcactgtccacccatgcccatgacaaggaagtgcttttgtccaccgtcaaacatgaaattctccacgcgcttggcttctccgccggactgtacgcttttttccgcgacgcggaaggaaagccgcgatcgaaaaggtgagaaggaaaagaataaccccttttttcaatgattttcaagaaatgtgaacaaccgtccgctttcatttaaccgcgagcgcggctattacgacgcggacccatcgacggtgagaacggtggtgagggaggattggtggacggcagagggacaggtggagaggaagagagcataattacactaattaaccgaattaattgtcagatccctcacccaattcatttg

SEQ ID NO: 23277 - DNA, 1358 bp, Heterodera glycines
  unsure (1)..(1358): unsure at all n locations
catgtagaacataaaaggtaactcgcccggcgggactcgaacccacgaccccagcaatccgtgccatgctataaccaactgagctacaggccggggcccaactggtcgagtcacctagcaatgttggagaaagtgcttcgtcattgctgctttagttcatcatttgatgtgcagttaaacaaaaacaattgatataagtttacagtcattagtagggctacgatttatagttttttaccaattttcttcctgagctccacgtggcctgaaactcacgaaaaacgtgttttttcggtggttcttaagctatttttctagttattagcaactattttctagttttttattttagcacaaaaaactaaaaaattttgaaaaaaaccatttaactatttttgcttgtgaattattttcgatcactttgcccttacaatctttgacggtacggagaagtgacatctgaaattaacaaacaaaaaacaatattcgttttcttcattcatttattaataaaaaaatctcgaaatcataaaaaaataaaaataaaatagatgaaattattgctggaagaatttgaaaattaaaaaaaaaatcggtttggagaagcggcggagaggggaggggaagaagttcggctctattacagttcacacgaccataaaaattttttgcaactttaatgtaacataactttttcaagaagcatccaaataaaacattcttggtatcatcgatagccctaataaacacctacttgtctgcaaatttcgttttgcccaggatcataaaaacttgaccattgtgaaaagggcgaggagaaattttgaaagtgccgtcaacgtaaaggtttttcacaagctaaacccatccaatgaccgattctttcccgaacacaaccactctgtgcgggtcttcatgcccggtatcaattaaaagaaaattttccccttcgtatgtctgttcttcttcccgaaattccaactcatgaaaagaagatcggggtcgagtttattgtttttctcgtaaagataaagaaaaccgttttcgtaaatttgctgttttcctttgttggaaataatacggcgtaaaataggttgctgcgctgccattgcaacaaaaaattttgattccgaaagtgacgaaattggaaattttttgactttatatagaggttgtttagaagtaatgaaaacaacaaatgtaactgagacggaaatttttatttaaagtgtgagatttctagtagtttcatcatttgcttttttctatgactgcattgttttgaatttgattttgcaatttttcattttgttctactanctttcgtcttcctccttgtagatatgtctgactcgctg

SEQ ID NO: 23278 - DNA, 1616 bp, Heterodera glycines
ggaaaactctagctaatccaaacatcattattttctttaagaagcttgaataatatgtgaacataatgtagagaacatattaaaaatatgatttgattcctcaaaaatcatgccaaacaaaatgattctttcctcccctcaaattgactaaaagtgttgcgtctcgtcatctttgttactctcctcagccaaaaagttcttatagctttgctcgctcatcagctcgtccaactccttcaggttgctcaccttcatcttgtacagccaacctggacaaagaaggagttgtgaaattaaaacagcttttccccatttataagagaattcctcaatttttggtagctgttgaattttttttttttgtcaataaaagcccttgtaataaaattcttgcattaggacaaccgacaaaaatttaaattatttaaaaatagtaaaaattggcattttcaaaatttaacatttcgttctcctcaatgtttcataggtatatttgctgttttcttgtatgtgtttataaaatctctaaacagcaagacttcgattgacactaagaaaattgttgccttacggtctaggaaattggcctatttgtctatttaggcccctttttgccatcacttttttagattatttctcagtagaatagaaatgcttcaaaattagattttatagataaattattcaaaaaacatgtacatcttttttttgtcgttgtaaatcactgttttttggcatacgaaattatcggaccagacatgttttccattagtcagaaattgttgaattgtctcaaataggcatttgttttggtgcggaaactggtttggactataaaattgccaaaaataaaaaatgatgaaaaaaggggaatacctaaattagacaaatgcctgaaatttatgatggccatttgtttcggctcgtaaaatgaaggaaaaaccgagatttatgttaccctttccgtagcagtccttgttgaccagcgccggtttgtcctccacttccgcgttccgttccaccacttcgccggcaaccggcgcgtaaaggtccgaggcggccttgaattgaaaacaccaacaaacatcgacccgaaaacgggggaatttgttaagtaattcggaaaacaatacaacaaaacatgaatttatttcgagtttcgaaaaatttttgcaccctcaaaaccccagacttttgggccgataaaatttggagagtggcaaaacttacattttctggtcccatgaaaaaagtctgaaaatgatggttttgcacgacattctcaacgagtaaaaaaagtgcttaagtgtgagtgctaaacatacaacttccgaaaaagtttacattttttactttcgctcttagaattttttacagtagtaatgtctgactttgattccatgttttaccacgatttgtttttttggtcgaaaattgtaagaaacccgtctaacaaaatcataaattcgtcacccattttttgtacatccgaaaacgctaataattcgtatattttcctccatcaatgcaaaaatggcacttttgcaacaccatcattccccgactttttgagtgggaccatcaaagagtaagcttcaccttgtcatgcactacct

SEQ ID NO: 23279 - DNA, 809 bp, Heterodera glycines
tgctggtgggttgagtcccagtgattgaaatgttggtggattgagtcccagtgattgaaatgctggtggattgagtcccgttgattggaatgttggtgggttgagtcccagtgattgaaatgctggtggattgagtcccgttgattggaattttggtgggttgagtcccagtgattgaaatgttggtggattgagtcccagtaattgaaatgcagaagaattgagtcccagtgattgaatgctggtggattgagtcccgttgattgaaatgctggtgggttgagtcccagtgattgaaatgttggtggattgagtcccgttgattggaatgctggtgggttgagtcccagtgattgaaatgtcggagaattgagtcccagtaattgaaatgcagaagaattgagtcccagtgattgaatgctggtggattgagtcccgttgattgaaatgctggtgggttgagtcccagtgattggaatgttggtgggttgagtcccagtgattgaaatgttggtggattgagtcccagtaattgaaatgcagaagaattgagtcccagtgattgaatgctggtggattgagtcccgttgattgaaatgctggtgggttgagtcccagtgattgaaatgttggtgggttgagtcccagtgattgaaatgttggtgggttgagtcccagtgattgaaatgctggtggattgagtcccgttgattggaatgctggtgggttgagtcccagtgattgaaatgctggtgggttgagtcccgttgattgaaatgctggtggattgagtcccgttgattgaaatg

SEQ ID NO: 23280 - DNA, 1508 bp, Heterodera glycines
tttctcgagattttgttgaaattcttagacatcaaagattggtaattttttgtcaaaaaaaacgccaaaaacggaaaacttgtatctttatatcgctttttgttaataagggttataaattgtatgattttgcattttttctgcgcatatgctatgaagaaaagggttcaaaaatagcatttatacgttaaaaaatttttatttagtgaaggtttttagtgcatataaaagcatagtttgggggtttcgagaataaatgcatattttgccatttttgtgctttgagggcatattttggccatttttggcaaattttcataagaaaaatgcaatagtgaaaaaacacccttaaaaacctaaaatattggattttctgtgagaacttttgaaaaaaatttgttcatataaaaattcaattttattttaacatataataaaaattaaaaaaaaattcgtacttgcatataaaaattttgaaagtcaattgtttttaattgtccaaaaaaggctccttatccattgttttgatgtttttaaagtcaattctgtatttttacacaattttggcatttttttaagggttagaagccatctagtgtaatttttaaggcatattttagtgcatatttgggcatttttcgggttttaagggcatatttgagtgatttttagtgcatattttatgcgcatatttgcattttttagtgcatacaacttataaccctattaataaataatagattcatgtttattttgattttttcttttaaattgatttttaatatcgtatttaactatttagaagattactaaatggttaaagaattttaatattaagaaaatatattttcaatttggaaaatttgggttcttattttataatttttatttccatatttgatatttttggtcgattttatggctatttttttgaatttatacctttatattacaaactcgaacattaaaaacaaataaataaaggaaatttatttaaataaaccaaaagaaaaaggaaacccaaacacacaaacgaacaaaacagaaaaagtgaataaatcacaaaacattttgtacggatggagaaaagtgattgctgctatatgtcgatttgaaatgccttttaggaatatttccaatgtttacaaataataataataataataataataatgcccggcagagaaaatgcatttcaataatagcgatcagaacgccacaatttgaaagccctccaaatactccccacgcaaacgacaaaggaaaaaattataaaaaataaggtccattcttctctcgaattcaaagcaccggaaatgccattcacagctttgaaatgttgattaacggacagaaagtatgacaacgaagtgcccaatccgaaggaaaagcacacgagcgcagcatatacaccaactttttcattgtcacggcgtcgccttcgcaaccgaagagccctttttgtccgacgaaaatcgggaaaagaggcagccgaaatatatctctca

SEQ ID NO: 23281 - DNA, 2244 bp, Heterodera glycines
  unsure (1)..(2244): unsure at all n locations
aaaagttcacgattttgagttctctggtaaaaaaaaatttgtttttcaccgaatgtcctacctttatgtacaagattggtatgatttgacgttgttttgcgtaatgccgagcaacttttgaggaaaaaaaaaattgtcaattttcccattntaagaaatttggtaaaacctctgtagacggtgtccggcacaaattccaggatcaaattcagataaacttcatcctttttgtcaccgcttgagtagaagaagtacttgagcttcaccacgttacgatggtcaagctttcgcattatttgtagttccctgttctggaaaagagataaaaaaattctacacaaaaaattatttataaaaattccatcaattccaaaaatttttagccagcgatggtagaaattgacgaatcgaggacaattaggaagaagttcataagaaattttaataaaaccaaaaaaatggttgtagttttcaccttatttccctttaatttagataatttcttggattgcgacaatttcgtgttctttttttataaggagtccatttactggattagttagcctgacaaataaaatcttacaattaaaccttttttttgaatgttatttaatttgccaattttgctttttcgtcaaaattttcaaaaaaaaaattgcaaaccaatagggtcactcttcgtttgtgaaaaaatttatgccacttaaaccaaaaaatgtcatcagttctaatataccaccccagccagtccaatccacacaacatttggcggaaccttgaaacgtttgtcctgcaacacttttttgatggcgacgtcctcgttgttgtacaccaacttggccaaatagacaactccaaatgaaccgttgccaatcactttggcctccgaatattgaagttcgatgctccgttcattgccagaaccaggactaaaggccaggaattgatttttgtgacaatttttgtttatttgtatccaaaaaatggggcaaacggaaaacgcaaaattacctggctgcccttacagtttgttcctgaaattgaagggtataattagtggagaaaaaacccatggcttattcgccattcagaaaaattgacgcgaaaaacaaataaaattacaaaattctgtgaatggtcgtccttttttgtacacatacgaatttaaaaagctataaaaatcctcccaatttttgagtttcgataaatttgcaatttcaaaaaaattttagcatttttttttacctgtggtcgttttgtactcatctccggataaatgacaaaatgatagtcggttgttttatggttttgctgtgatcaatgctcggcagaaaaataggtagcaaaatattttttattatataggcagaaatttactctgtcacaaaaaaacaattaggtaattaattgggaggcttacaattagaaaggagtgtgaggcggaaaacgaaagaggacaaataaaataattatgatgatgacagtgatggacacattttgtggatggaacaaatcagcggtgtgatcaaatttgctgttttttcctacttggaccgataatttgatgcgatttgatgtctcctcacaccctcccgccaaatcagtcggttgtgtgacggtgacgatggacggtggtggtggaaaaatcgaaaatgatttattgatcggagaaagttgggattgtgaggggggcacaggggagggaggggacatgggaggagacagggggtactgactgactgactgactctctcattcactcactctcttcggtcggtggaggaggtttattggtcggtcggtcggtggtcggcggaaagaagaaaaatggaaaggggggggggggggggaaatgaaagagaagtgtacataatgagagaagaaagcagcagcaagcatagccatagccaattgagaaaagtgaatgtgggagggaatgagtgaaaattgaggggagaaatgggaggaggcgaaaaatggtagaaaaacatttttttggagggggtcgacggacagaaagaaaaacagccacagaagagcagcaaagaggaggatgcgctttgctgctgatgatggttgggtggtggtgaagaattgaatcccccaaaaaaacatagggggggggggggagaacgggtgggctgggaaaatggaatggagatggcttcttcgcccttttaacccttccttctctcgaacatattttcccgcgcttattcttatgtgcgtaagcaaaaaaaaaaa

SEQ ID NO: 23282 - DNA, 1661 bp, Heterodera glycines
  unsure (1)..(1661): unsure at all n locations
atattaaaaaataattaagtttagtgcaaaggaaatttctcaaatttntggaagaatacagctagaagtaatatttttatttacatttaaaatttagtaaataaaagttccagataataaaattggatgatggataattaaaatttgcttataaatctaacaaaatgttttaaaaaagaaactaaaattgattaacaatgtttaaatatattaataccaaaaaaataaaaatactatgaaaatctttttattaaatctgtttgttattcaatgaatttggcgtaattatataaaaaataaatatagaaaagttctatttagttttaaaagaatgcataaaattaaatattgttataaagaattagttacatatattcaattaatatttttaattgcattttaaacatgaatttacaatagatgtaatgataaaagatttaatggattaaaataattcaaaaaaattttataaatttaaaaaatgcaatgtgtaaaaaacaaaaggtgactaccgaatagtaaataacaatttaacataataacttttttaagtttagcatatgccttttctaaatgctcacattaagaatattgaaatattaaaatatatacaataatcaaatgaaaaaacaaaaaacattcatttagtttaatgataacaaatgcattaatgtgcatcaatcacatttattatacataaaattttattttccctaatttttctttaaaattcctctttaataaaataaaaaaatcttattcaggttgtttatttagcttatgggtttgttttttacgaacatattattattacgagttagatattttgtttctaaaaaaatatttttttttaatttggcatattttatatatttgtaatttatctgttaattcttttatatgaaatcattttataaagtatagttatcagaattttactttcatttnattaaaattaatattttgaatgtaaatttnaatgaaaaaatttttaatttaaantggnattgtttttgaattaagaattattattatttttttatnaattannaantnggtgaangnngnagnngnaattggnnagnngnaattggtnntggaannannaaattagtttaatatatggtgttgaaatntattttaaatttataattttattatattaatttaagnttnntggntnatggngtgaaaattaaaaaatnaaaaatagggtangnttgttttagtggnttnttaaattatgtgaattaatgataaaagagatatattttnntnntaaatatttagaattnttatttttgttantttattttgtggaattnattaataaataaggttnttnnnganaatattnntttnctgggtattaacantttaatatttnttaanaattttaatatttaatttntttggatataaatgtgaattttattatttaaattatattatgttagattattttattgaataattaatggtggtaagataatattttttatgaggggtctttaaaatatttaattatntaaggttaattttatttttgacataattataatttaaaaattatttataaaaattaaaaatataattggattggaaaatttttttntgggttttattggggatttaaaaatttaatttataaattttttttt

SEQ ID NO: 23283 - DNA, 1397 bp, Heterodera glycines
gtgtttaaatattttcaactaaatttaattatttattcaaaatattttttttattttaaattaaaattttacttaataaaaaatggttctttttgtgtttatgctattatttgtagtcgatgaaattattttaattgtaaaattaaccatactaaatttatgctgtcattcttaagcttttcaaggctatatattgatttttcaattgggatttaattttacaaaatgattatttttgacctcaaatgcttattttttgtttgtcaaatgctgattttgaaaattttcatttggcaaccctgattttattctccattcattgtaaattaaaattattcattataatgcacattttaaaatttatgtcaaattatctttgttttttttgttcaaatatttaaacagaatatcatgtggaatatcaaaagaattttttataaatatgttatatccatttggattgattaattaaattgcatcttccttaaccaattaaaagcgctgatttgtccaataagtttccagcagttaagccaatttttctgaatttagacgattgtcgagggtgtaaaatgaaaaatagtagtaaatgttggaaataattacgatttgcctaatttcagccttttcggggtgtaaaatcacattttagaagcaaattttggcatactttcgccttttggggatgtaaaatgacaaattagtggaaatttttttcatctttaattaatttagttaagtttatttttaaatcttaattttataatgttttgcaataatttttgagtttttttatttctttctaaaaaaaattcttggagaactctccacaacataatgccccagttagtcgctataattctttttcatagttcagtgctataatttaaaatttaaattatccctaattattgagaaatgtttgtaaaattttgtatttgtaaaatactgtatttaatataatctgatattcggcttccgtaaatttatttatttattatttatcaatttgaatatacttaaataaaatatcgaataattagtctttgcatgtttactacttacttactctgcattaatttttttattattatttttgattgtcaaagaaaaacataatatactataatggttttgatcgaaaagctaatgattgcgaaagtttgacaaatcagattttgtgtgttgaaaaatgacaatcgtccaccttttcaacaattctctttcataaaattttatttttcattaaaaatttttaaaattctcacaattcatctgtgtgtctgggctatttaagatttttaaagggaattttagattaaattaatataaataaacattcgaattttagaaaaaatgatttatggataatttttttaattatatttattatttaa

SEQ ID NO: 23284 - DNA, 2634 bp, Heterodera glycines
  unsure (1)..(2634): unsure at all n locations
agagtatgtttattgtaaaatataaaaagttatttattaatacanaagattaaatgtacntttcatntaagaaatctttgtaaattatgtcaaatgctcaaaatttgctaaaatatattaaaacattttttttgttttttattcatttttcaattttttattttattttctcacatttattaaaagttcaaaattctaaaaattatttgattaaataatagagagtgaaattaatattattgctttatattaaattattattttgggatggtaaaatggatatatactttttatttattattcactcttttttaactcatgttccggattgttatattttgtagaggcagaaatatgatcgtcatttaataaatagattaatcaattaaaatttttatttatgttgttatattaagtactctattgatgattaaattataaattttaaataagataattttattcattcatttattaaatatttatttgtgcgctttgtaatttattaagaatttcatcattcatttttactttatagctatttttttaaatcctctgcagtaattatagttttttaaatttatatgccaaattcaatttaatttacgaattttttattcattataatctgagtggccaagtgtccttttttctaagatttgtccttttttggaggggacagatcttagaaagctaaaatatacatatttctaagatttttcttatttcaggcttccacaaacttattaaattttttgtgcttaatgatttatttcgatgatataaatggtaccaaaattcccaattttttcccgggcggctcctatcggcagcaccgggcaacccaaaaaacttttttttccttaaaattggctcaaaatcataaaaattgtcatttttggtgaaactctgttaacaaatagtgtaattgcccaaaaaagccttaaagaacagtagcaattataaaattttctctaaatttttgttaaaaagtcaaaaaaatttgacagtttttggcaaaatgtgttaataaattgcttcaaattcgaatataaaaaattctatacatatcgtggctaaaaccaggagggtattctttgatttttgtggctatttcgtgagtttatttttgattatttaattgaatttttaaacaaattattcttttatacattagtcagtatttgttttatttatattaattaataattgcattgaatttaatatgtatataattataattgtgtatcgtaattaaacggcaggatacatatctgtgggtgaataaaacttcttggaaaaacctcatataaaaaattaaattaaaaatctaacaatcatttattatttttattgaaaaatataaatttgaataattaatgttttttaacaacaaacctattagatgaaaattaaaaattaataaaatattttataaaatttattatgcacataacaatgtttaaaatttaacacacaatttatgttttatgaaatattaatcattcatattatttgataaatttaatttaatgaaataatcaattgatcttaaaattatttttagcttaataaatttgtttaagtcaatataataaaaaataacataaataaataattaataaaatttaataaacatatgtatttacataatggaaatttaacccggaaatacataaataaaaaataatattaatatttattcttcattaatagaatcatttgccattatttacataatttaatataaaattttaaaaaatatttaattcaaaataataatagaaaaactttgggctatcttttcacatcaagtgtggtgtgatacattttttatgtccataaaaatatgaaccatttaagatttctctattattctgttcaattaaaaaaaattttaatgagttttaatcttgtttaaattaaaaattattaataggattaaaaaaatatttggcataaagtcaaatcactgaaaaaataaacaaaaaatattaataaaaagataaattcgtatgaaatagatcaagaaaaaatataaaataagttaataatctaagaacttttctatataatgaaaactttaaaattatttgtaaaaaatataatttaattatgcgagtttaattgaaagttataataaaaaaatattcaaaatatttgattaaataaaatattatagcgaagattcggtatatataaaagggcaatgaaatttgaataaataaattaattattatggactgtacaattaaaaaacacagtatattcttatttaataaaaattgctaaacgttccagaagaaaaaaacgaacgtaaattctatccaaagcatgggattttaaagatgaaataaaaaacaaatataaattgtaatatttccacttcttgaaaaaaaatacaaaaaaacatttttttaaatataaacaaaaactactgataaaaaagaataaacaatttttggaataatgcaaatatcatggaattaataatttctaatgcacaacaaagtcaaaataacaacacaaaccgttttcatttaaaaagattattaattaaaaaaatattgaaaacttaggaaattaatataaaatatggaatgctaaataataaatcatacaaaattaactgat

SEQ ID NO: 23285 - DNA, 2499 bp, Heterodera glycines
  unsure (1)..(2499): unsure at all n locations
aatggagcagtgattgaggaagcgctgatggccatccctttgaaggttgaaggtaatttaataatcaaaatatttctaacatagacattttggataaataaaaattacttattttgttagtgctcaagtccgacttccaaaaatacatcatcgagttcaagccgtttttgttgacttcgttggacaaccacgaggacccgcaggtgtgcattgctgcaattggtgtcatttccgatctttgccgggcgttcgagcagcacattgcctacgtgatggacgagattatggagaaattgcttggcatactccaagtatggcattaaatatatataatatttttggtttttttttgatcacattccattgatagcattttgtcgtttgcccctaattttcttgtttgtttttaggacccaaaggttaaaaggactgtcaaatcgcaggtgctcaacgcgtttggcgatgttgctcttgctttgaacgctcagtactcccggtatttggcctccaacatgaaatggttgtcggatgcaattgcggctgctcaaataaccaacccggttttgttaaatttattttattaaaacagttatattattttgaattcaattgttagacgaacatttaacaatagacgacaattttttcaaaaaatgcttgtaaaaacacacacaaaattgctaaccacaattttttttttaacaggacgactatgatcaggtggaatatgtggaaaatttgcgtgaaagttgctgctacgcattctccggcattgtccaagcgatgaacggcactgacgagggcaaacagcaaattcagcacagcattcagccaatgctgcagctcattgtgctgatcgccaattcgcagcccagtgcgcccgagtcattgtgcgcaagcgcttgtgcactcgctggcgatctgttgcacgcgtttggtgtccaatttttgcccgtggtggacgctgccgactttggcatttctgcactgatcaccaagtgcaagaagtccaggcagaacaaggccaagaccattgccaattgggtgagttcaggaagagttcgtctcaattaactcgacccttctttctatggcaatactgctgaatatgttaaataacaaaacgattgcttattacattttcttacgctttttgggagtttcggttgttgaagcctaatttcattttttttaaacaaccaacaaaatgccgcttttgggaatattgnngtcagaaaacttaatggatatttacgcttaaaaatttggccatgattttgtgtttgtcttgattttttttttaattttcaggtgaccagggagttgtcacgggtcaaacggcaggctgcgggtcaatcgtaaaaagatgtcatctcaacagcacataattaattcgaatcgtatactatcattgttttttgtcattgatttatttttttgttttcgtttgtcggccgttgttttttatatctgtcgtatgcgccgccgccgttttttgtttttgacaaaaattttttgattttttaaaagattatttcatcaatcatttgatatagtatacttatttatttgtccggattaaaacatttttttatttgcctaccgatttttatttgtttgtttgtgcttttttctccatttgattattccaaacaaattttgtaagccccgaaaatggctgatgaagcacaatctccgcccaaagatggtggtggtaaaaacatgcaatggatgtacgagggtgccaaatcggtggtcaatcgggaggactatttgctgggcaaaaaggtccgtctgtcacacatttattcattcgacattttgcgtgtccaagttcatatgtggttcagatcgacaagaatttcgagatgttctctgatgttgttgtccatgaccaggaggaggagaagcgggatgcattcttccagcagagccttctcaagccgtccacttccgcccatactgctgctcctttcgtcgctcgtaatcagcacaaagtgtccgctttggacacgcgtgttgtacgaactgaagacccattggtggccctgaaagtaacgcttatttgtctattttatcttacagaaaatagttattgcctacttgtacagtttgaaattcataatcagcacccaagtgacagttttgatagacataattttcgagaaaaaaaggtatttcccatttttgtgtaaaaattggaaagatatcccaaaatctaagctgattatatgtttaacgctctttattgtaatattttaatgtgtgaaaattagttccaagaagagcagcgacggcgtcaacttttggaaaatccgttgctcaaactgaaggcgcaacgtgtggttcgcaaagcgtttgaaaaagagttgaaaaaanctntcaaaaanaagancancancancaaaannaacaaacaaaggacggtcatcatcaccgtcttcttcatcgtcctccaggtggagaccagaacgaagaaagcaggaacagaaacgacgg

SEQ ID NO: 23286 - DNA, 2394 bp, Heterodera glycines
gatcattataattttccatttttattagagagattttattaaaatattattcttaaatttctgttaatttctaaaaaaactaaatttttttatttgcataaataaaccaaaagataacatgaaaacgactcgggaaaaagcgtcaattttcaaaagtcgaacctcattaaggggggggggaaactgcggtaaaatattcaatttgaccccgaacaaaaacaactccaaacaatcaccaataaaaagcaaaaaataaggacgagagtctcgtgggtcttaggaaaatttccaacaaaaaaataattaaattactaagtgtgatgagcggcccctttgacaggtcaccggtgccaccagcgaacattccttcggcgccctcggcgaagacgaggcgccctttctgccggcgccgtcgtccgccgtctctctgtccgcttctttgctccggcgctgctcccgcctctgctggctgttcgccactttccttctctctttcctcgccctcatctccgcccctctgatggccgcgctgccgcacgccgttggccaattgcaactttttgcgggggacaacgcacaaaggcaacagtggagggaacagctgggcatttgccaagtcgactgtcaggtgggaggaacggacggagaaagaaaggcaccggggagagttgtccatttcggcggaaggatttggcactttgtccatgccttttggcgcttttctgtccctaatttcgccttttttagggtcagcttctcaatttgagtggcaaaacggtaaattcgcttctaaaaattggccctttctaccgttttctcccctcccaaatccatatcttgatggaaagtgatgcggtaccgggacctaaacacggacaactgagtacaactgagtaccgaagtccctattttcccagccaaaatttccctgcttttcaacccgaaaaggtcccggtctcggttaagcccaaaattcccggtcccgctgcaccctagtttattgatttgtaaaaaactttctcatttcctccgggagatttttcattaattaacccgattaagtgccttttaggctgtcgtaaaaatgagtcaaattagcaaattttggctgggtttttcatttgatcactttttactgatcacttttggcgccctagccaaaaaagccgaaaattcacaatagcaaatcgactatgctctacacgaaagaagtgattttaaagtgatctgggtggttacagttccgggaaaagttccttgtgagtcgttatataaaaaactatcaaatgaaaatttttaacaaaaaatttcataattgctcaaaagcaactaaattgttaattcttcaaatcattcgatagtcctaagagttctctactaatctgcaaaatttcaaaaatttttgttaagcttgaacagagctatggccaaaagtacacaaggaactcggttttcaaacattttatgtcaaattaattttgtttttatttctttggtactgaagtgactaatttcattaggactcagttgtccaagaactcatagcttgggcctaagttttttttcactttttttttataacaacaaagtttaaaaaatgttattaattgcatgaaattatctatacacttttgtgttttttaattcaaccagaaagaatggaagaagtaagaaagttgaataataaaaataaaaatgtaaagttttcaaaagatttatttaatgtttaaaaagttttctccaagctatttccgatatattttttaaattcatctttgtaaaaatagccaaaaaagttctgccgctagcaggggtcgaacctgcgaccttgggcttattagacccacgctctaaccgactgagctatagcggcactgttaaaaaaatttttatattaaataaaaaatgcaattgaaatatttttaattaaaaacaaattttttcgacattctattagcactttgatgttaaaaattttatttatcttttttctgtttaatgataaagttgactggcatgttatcggttttatcattatttaacggtctctaatttccatttctggcggaacggaaccaaaagcgataagtcattagcacaataaaattatttgtcattagtccaatggtcctcttaaaattaaagaattgaacttaagaaacaaaaaataaaatcttacaaacttccgttctctgttttcctaccggaaattttagccctcactaaaataatggcagacaaaaacatgtttttcattcttgtaattcattttctatacagcaatcaataaagatttgttttttttaaaattaatttataataacatttcatcttttcatgtttatataatgattatgaatattctcaattatatttaattctaaataaatgaaa

SEQ ID NO: 23287 - DNA, 1573 bp, Heterodera glycines
  unsure (1)..(1573): unsure at all n locations
ttgaaatactttttttaatttgtattttttgtcttcattttggggtgcgatagnncgnaannnaggngaaacaaacatcatagataaagagaggaaccccgaaaagcgcccgaaacaagcgccacaaaaagggcccaaacgccacaaaagaaccaagacggggcagaggaaagcaccaaacgaatgaaacaaacaaacaggggaccccaagaaacagcgaacatcgcgagggaggccgagaacatttggtgcaagactatctgcgtgactctgatggtgtgtcactgcgtctgagcatcaaccaacggttgcccgttgttggcgacctgtacacaaaactggtcgagtacgaccgcactcagttggcgctgatgttcgccatggagcgcgacagaccgtgcgaaccgctcgtcaaatatttgcaggtttggctttcggcacagttttttttttgttcattgtgattgagtaaaatggagagataccgtaataaatatttttaagattttttttttgcgatttttttttcaaaatttaccgttttttttttaatttttcggggcgaaattgtcgccccaattcctttgtatttttaaagttttggcttaataatttggcaataataaatgggtgttggttgtgaacatgggctggccaaggatgacaggataagacgccctaaccaattaaatttattaattatttttaagttttttaatttgccaggaaaaaaacgccgccggtgtgatctctgtgcccggcgcagttgtgtacgtgctgaccgatacgccgatcacgcagaagctggtcaaatttttcacgccacgcctttgtcccctgctgacaccgacgcccaaccacctcgtcctggtgctcaaactgactgcccaaccgaccgtgatgggcggtgccaacagcggcggcggcggcaatgccatgacggcagcgccaacttcgtacggactgctcagcgcgacaatggcaccgccaaacttgacgacggcagagatgaaaaaggagttggtggacaccaccaccatggccatgatgacgacaaacagtgttgtgaaaactgaaacatggaaagtggtggggggcgaggaaattgcgccaccaccgccgccgccacaaccaccatcaggaacagcagactacacatgatgatggtgatgatcaggatggcatttggtggtgcttgtttgctttttgattggcatatgggcaattggactctctttctctgtcatcgtttgtcctatcatttcgctgtcgccccatgtttttttcgtaataatgtaccatggatatgtcacattattttatcatccattatttccggaaaacagcagaagttcgtttttgtacctgtgtattattggtgatgggagcagctcgtttaagaaagagaaatttttttcaaatttaagattttttagaaaatagtgtgtaaaattgttttaataatttctcgtggaaagaaaagatgtggtggcnctgatcgtgagggaaacgcctaaagggggggatgtagttcacacttttttctttgataagcatgactctagaggtcccc

SEQ ID NO: 23288 - DNA, 1307 bp, Heterodera glycines
ttcacatcataaaggtcgtccatccattatttctaaatatttaaaaatatttttttaattaaggcgtttggagcattgcggttctgatttttatgcatgtgttgaacaattgagttcaaattttccatcttttccacaaatccgggaggaaattgtcgaaaaggtgaaaaacaaataaaaaaaacattaatattgtgtccttggttttaaggcttttaaaccatttgaaattatcgttttctaagggaggatttatttaatgaaaaacattgaaaaagaaatatgaaaaaaccgggaataagttcgggtcaacaatgaattaaaaccgaaaataagtttggtcaaatgaattagaaactggaggataatttgggtcaactaatatctcagagcattttgaatgggttagtgcaattagttatttggaaatgatttgtcgccaaaggcaaagaacagaaatgacccaccgagacatgacatctcagagcctccgtttaaaaattattttagtatcaaataatatttttaattgtttgcagactctatccattttgtccaaaggtggtggtcaatgccgtaacattgcatttgctaaaattctgttgccaatttttgcttccattggcccaattcaaagggcagaacttatcagcagaattatttcatttgattattttgaccaaaattctgaatccatttccatttgtggtgcgcttggtcaaacaaaattgcatttacatcagctgttcctatttaaggaattggtttccaccacaaaatttggtaatcttctgacaattttttctaaatgcaaagctaaaactaaaatttagatttacggaattgtcaaaattgaaaaagactcatttttaaaaacaaaaattttattctaaaacaaaatcgttaaaattggtcaataaaatctatgtttttttaaaacataaaatatttcctttattttatacagatttagtggaatctagagaggaaatctttcaatttataatgcgaattattcaaattgcaatgaaaaggggacaaatggaaaggtggcgccttttttcaatggctggcaatgctttcggtgtgttttttttttttgtttatattcaagattaatttacgcatagtatttaatacggatattagttgtatcatttaattttttttttttttttggttaaatttttttgattaaggaaggttttgcatattttgaatttttcgagatacacgcatattttgcatttaagaatttttagagtatattctggcatttttgataaaaattaattaaataaaaaaaa

SEQ ID NO: 23289 - DNA, 1574 bp, Heterodera glycines
tcaaagttaacataagttatggcagcagaaatagtatttattttcatacactttttctaaagttgactaattttttcaggctaatagatttctaagtttgattttgaaaatttttttgaccttatgaaaatttactccccgacgagagtgtggtccccggttttttaaatttctctagtcatcccaacaaatttcttcggggaattccgcgccgatgcccgacttttctctccccgagggtcggggcgcttaaccctattttcggtaaaacactcgaggcctaacattttcctatttcttatcttataattttttgaaaaccacttcttggaatttttagggctatcgataacaaagctttttttctattgtccgtccccctgtcctcctccggaaaaattttattcaaaattttctaggggattacatatccgaacagttttcaaaaaaaaatttcccctaaaaaatttttttgaataaaaaaaaacctcgtgatcgcacaagtacaaccagtcataggatgtctatgttgttgttgttgttattgtttgtttgcccatcattaatcacataaatcagcttcatcaagtgcgcgcaactgtccgcgtacaaattgtggccaattaagccaccacaaatgtccccggacacaacaaattatggccaattaaccatgtaatgatgatgacaaccgtgcacatacatacacaacaacacatataacggggcgggccaaccgcaaaaccaatcaaacaaatcactcactaaaacggcctctgatcacccccaccccctgaattcctgttctcccaaatcagcaccaccagcagcaaaatggggtgaatgatcagctcagcaacagttgggcggagggagaagaaagggtgcggtgatcagcgcgaccaaaacattcattccctccccgccccctccggcgcattcacaaaatcagttttttccattgtcctcagggaccaactgttgtaatccttggcccttttttagggggagggtaatgaaaatttttcagtttttgagacaatgtcgtcatctgtagaaaaaaatcagcaactttttacctctgggtatggcaccacataccaatgttattcgggtactctctttcatctcctcacttcaccccccggggggcacaatttcgtctcttcactctcctcccccagggtagtttcgttttctccctcgtcccaggggtgattttcgtcttctcctcatcctaggggtattttcctctcctcgtttttcggcaggtgtagttttcgctcttccccgggggcaattttcgtcgtctcccttttccaatactacccttggggtgatgatgtgaaaatgggggaccgatcacccattctcctgatgctcccacatctcccccccccaagcgctatatgtctgtgggtctttggtcagtgtgccctccattctctgccctctcccccctccagccgatcgcccaaggggtgtcaaggtcaacaaaacaggcagcagcaataagcggagcaagcacaaaagagagcggcgacccccggggggacgacgagccgagtgaatga

SEQ ID NO: 23290 - DNA, 1340 bp, Heterodera glycines
atttcatttttaaaaatcttcccccttcccctcgcattcttcacgtgattttccgtttttaaataaaaaaatttctgtttttctaccagagaaaattgaactcccatcggcgccgtttgccgtcgacactcagcgaattaactcagacacaacgatttggactcatttgtcagcagagggccctcaaaaagcgacgatcgtaatttgaaaaaaaagcaaatagggttactgtaccctctctctctctctctctcttctgtgtgtctctttctctcactgaacaacatttttttgtgtgtggtctatcactgcagagacaacaagcaattagtggaagcggcagcaaaacagcaacaacaaatttatcatcatcatcatcaccatgttcgagaatggcatcatccgtgccgacccgtaagagcaatgcattttcctcaatggcatgggatgggcttagcccaatggggagcggtgtcatggcaaaacgtacaaaatgggtattttttaaaatttttctaaatgcttaaactaggcctaagcctaggcctatgcttaaaaaaatgttttccacgttttgccattgacccctggaaacagaggggaggggggggggcttaggttatgaagcccatccacaaagtttctcttgaaaagaattattttagggacgagctttcaaaatttcaagatttgagaccgagaattgacccccctccccccgagagtcttgacttttgaatgaagggaatcagtcggcttgccggattttcaaaaatcggaaattggtattttggaattttcttgtgattttacttagttattagccaaataaatttttaaaatgtttttaatccccgcttcaaccttctccagaatgtcccatcgtccggtggaattgtggaagaagtatttgcgacagggacgcgtctgtgacccggccaaagtgttacggtaggcactcaaatgctcataaacgaagaagcacacaccctggcatactgtactatcctcagaatttttccgggtcgcgaactcaaaccttactgtaaatacagtatcccctatttgtgtcaaatttttcgagccaggagtgaaggaggaggctgctccagggatttcttggaaatagcagaagatggtcccagctcaacaacaaaaaaaaacaggggtttttaaaacggtgcccccgtcccgcattttcaaaattccggggctctagaaattttcctaaaattgagggctgccacgccacgcaaacatttttcgtcacacggcaataaaacatttccaccctaaaatgccataaaataatcattaaaaaaccattcaggctgaacacg

SEQ ID NO: 23291 - DNA, 1289 bp, Heterodera glycines
tagggctggtcgggaccgctattggggcggcaaatcccggttttttcaggtcccggtcccggcgggactaaattaagcactggtaagaatgggggtctgggtgaaaaatcgagatgaaagaatggagatttgaggttaagaaacttttaaataacatacctaggtaaacattttgcctatttggtgcatttgaataattatttcttttaacattttttcttttctcttattcagaatgcttacaaatggcatcctttaaaattacataattcattttttagtagatcaaactctataaatgtctgacatttggaaatatttcgacaaatcgctgaatgataaagcaatgatgaattttgaaatttttcatataatctatgcattttgatgaaaatttttggaatttttcatttttttcaaaaaaaattcacttgtgaaagttccggttggtcccggtcccggcttttctcgcggtcccggtcccggtcgaagactaattaattttaaattaaaattatcatttttttccaggaaattaattgacgtaatcgtaccaggcagttacatttaaccgaccgaacatttgattaaaaatggataaataaattaaaaattagtgacaaattttgtttgcgtcaatgactttttcactgacaaaacaaaacaatatttttatgtaaacaaatatattgtaatataattgtgaaatgggaatctgggcttttaatgcaattttattttattttttaaataaaaatattaaaccaggctttagaaagtcggggtcggtatttttcggggtcagccagaggtcggggcctggatggacccaaatcagtccgggtttttcggggtcagctcgatctgggtcgaatggaacaaattggtagaggtcgcggttttcaatttttgattttaattaaggtaattaaatgaattaaattctgatgaaaatttttcatgaaaaaataaaaattatataagaattatacatatatacatttcttaaataaacaaggggccggccaaacaggaccacacaaaacgtgtcccatggacgaaacggcactgaaaattgtttaaaccagtttttaaaatgactgcataaatattgaaataaaattttctataaatattgaaaaataaatgttccataaattcgaaaaataaaatgcagcataccgaaataaaaaaaaaatacgaaacaattcttaaaaattttttgtcattaaaataattatttttatggatttttggattgaaatttttaattattttatgcaaatttt

SEQ ID NO: 23292 - DNA, 1408 bp, Heterodera glycines
tatgaaattttggctccggcggtgccgcggaaattttattacaattttaaatgattatatatttaaaaaaatttttatgaatttttaatcatgattttaaaaagtacgaaacaaattttattgtttataaagagatagtaaaaatttcaaataattaaattttggattttccaaatatttataatagggctgtcaattttatgtaaataaatatttttttacctggcttctccaggcactgataatagaaaaaacactttcttttttttgcgaacaaaaaccggcacttatatttacatatttcgagatttttgtatatatttcgggcatttttcttacacatttatgcacatattttgaacacattttgtacatacttttgacaaccctatttataaggctcccggaaaatgcgtcagtgaaaactttaatgtcataaaaacaaattcattgggttttcgttgtgtggtggatggatcatcaatcttgtatacatttcggccaagtccgaccgaactccggactcgaattcgaacaaaaggtcgactcaaaattctcgaatttaacatttttttagttcaaaaatggagatctagtttattttgtttattcaaaccgattttaacaaaaacgctaattccgaaaatttgaactttcgactttttgttcgaattcgggtcacgggttcaaatttcagagagctatgttcttatagaattttacgtttatactacaatacttaattctacagtactttattttacaacatttgtatcactgacgcttttccactgacgcattttccgatcacgatctataaaattaaaaattacattcccagaacaattacaaattatacatggagaatattttttttttacaaaatgataaaaattctataaaatatggcaaaatgcaattataaaatcaattattgatgaattaattttatttcattttttttttgttattcattcatgtaataatttagagctagtaggatttttaggtgctacaaatacttaaataggtgctaaaaactctcaaaatggcaaaatagttgcgaaaaataaattttggatactgattttgagaaaatttttcatttcttaggggtgtattttttgttttattgcaattttgctaaggaatttatggaaaactgtcaaaatagttgctaactctattagtaatttgaaacgagcagaaatttcaaaaattgtatatatttttttttgtaaatttttgacgcaaaaaaatggtgaaaatgaatttggttattattattactttcttcttatatttaatcatcgtactaattgatggaattgaagaagatttatttgatgatttatggaaaaattcactgctatcgacatcaaaaaattatgaacagcaaaaagcaaag

SEQ ID NO: 23293 - DNA, 1277 bp, Heterodera glycines
caatggccctatcgcacaaatgatggaagaggcagatgaaacgactgaactccctgccattttctccccttctttccctcacttttcttcatttaaattttcacattttctttcatttcgtctttgctctatttttttttttaattttaacttatcttacacctctttacccgggcaaaatttatttatttttaatccataaccaatgctcttggacactgcccataaaaaaaacaaaaaaatttgtcccctcacgtaagtccaaacgacaatttcttcaacttcgagcagtacaaaccgcgtaacagcacagcaaacgacgggaaacatcaacagcatcgccatttgtggtcaacagcccgccaagagagagagaaaggacaacagaagagaaagacagaagcgacagaaggaccgtcattcagaaaagtcggctcaattgattgacatttggacaatttgagcatcaccaagttagcttcgaaaagagaactctgacaacagagcaactcttccgtcaattacaacatttgaaacagcggacaacaaaaagaggaagcaacaaaaaagagcagagggacagcaaatggacaataattaagagggaaggatgataaaaaagaaagaaaatgtcatcaaaaaaaaaaaattaaaaataaaaaaacaataaaaataaaataaaagggacagaaaagagcaacagccatccaagctttggttgtgaattaaaaatggggggccattttcattggggagggaggtgtaacatattctaattatcacccatgagcaaagacgaacccttcacacatttccctttttggccaatcaatgttattcatcttttccacattccccccgttcaccattttattcactatttctcttttctctaactctcacaaatccccgcaaatccccgccccttttccgttcaattgtttcccccaccaatcagtcagtcgagtcggaggagatgagagtcggacgtcggagcgatcaaagacaaattaattatttattaatcattcatttattcgcgcatttaatccgacataataaaagagccatacgaacgattggaccctttggacttcttggggatcagggcccgattcctaagattaagacccttcagtcctgggacaatccgtctcctcccatcccgctctggcatggatcctcacgtcttactggtagcaccggatggttcgactttcgagtcgaaggaaagacgatccagcgaggggatgaaatccgactggctcaagctgcag

SEQ ID NO: 23294 - DNA, 2012 bp, Heterodera glycines
  unsure (1)..(2012): unsure at all n locations
cccggtaaaaatgaccttttttgaccgggctaaaacgggtttaaatttcaccagtgaaactgccacaaattttgaaaaatctaataattattgngcgaaatgtctttagctcaaaattttgaagttagaacttcgggattttttaaaaatttgcattaaaaagatcacaaatccacctaaataaaaatttcgcataaatagcaatttttgataaaattgattaaaatgtatgtaaaaatctataaaatttctcttaagaaattggcttaaaatcacaaaattatgagcactttaataaaattttcagtatttttcgtggtgtctaaagtaaaaaagtgccaaatttggttatttttcggcaaaatccgttaacaaatcgcattcctcaaaactgtttgaatagtgcaccgcaaaaaaaaagcattgtgaatggcaaaaatgttcttggcttggcctaatcacaagctgaactataagactaccattttttattttattaatcaaaatcccacaaattttgaaaaagcccgggcccggcgggcgcccggccacaattttagaccgggcccgcgactcgcggtaaaagggcttttttttggaccgggcggcccggtcccggtcaaatggctaaaccaacccggtttcggtactttaaaaattccgggttctagtattaatcacttacaattggagaaaatctttataaacatcgaccgaattaaaaatatttttataaagtccttaaattttaattgcttaaaaacatagctaagattttcaatgaaatgagaaaaaggtaacctatttataataaagttaagtgtactattaccgtaccctttctttgagtgatttttggtatggcatgttgaatatgacaaatgtgttatgacgtaaaaaggacgttgtcaatgattgtctgtcatacagtacgctccttctttcaccgtaaagaattgaacaaatctgtttaaaaaaaaaactttttttgtgcctcttcacattttgaaattattatagaagagatacaattgaataactcaaaaatttatatttaggaaatttaaaagtttaatagaattttgaaattttttaaatttttattgcattttttttaagcattctcttataaaaattttaattttcataaaatagcaatcctaaaattattttaattaccattgaaatgttcaatttcgtaaatttgtttaaatccaaaacgccgtcatttttgcgcatgatttcatagcccaatgcagaaaatccgatgactgtcttattgaaaattccaagatgttccaacatatctaaatttaagatgcaaaatattaaaattagaaaaatttgcattttattgtatttaaaaactttcataatttatatttttaaattaaaaaaatgtaaaaaaggcaagaaattatacaatatcaatacacctttttggtatataagtgtgaaaattgggttcgcgccatttgaaacgaaaagtggatttagttgaactgcgtcgatttttgccgttggtccaatttcggaaatttcctaaattaaaataagaaaatttttataggcaaatatataaaataaaaaaaacaatgtaattctgctatttatatttcaggaagtcagcagttaaaaattgattaaattactctacattttatcagaataaaccaaacaaaacatcggttttttttcactaaaatcattaccattattgaatttacggagaaattgtcccggtccgaatggtccaaaattttatatctcgtaaaagattaattacaaataaaaatttattcattaaattttacaaattcaaaaaaaaccgaaaaatcgaaataaaccgaaaaattttcttcggttttttcgatttcggtttttttcgggtttttaaccgaaaccgttcgaccgagaattttttgagtttttcggtttttttcggtttcggtttttttcggtttttaaccgaaaccgttcgacctaccctcttgtccggtctctaattacaa

SEQ ID NO: 23295 - DNA, 2030 bp, Heterodera glycines
ttttttttctccagacactgatcaatccgcctatgactccgatcactccgctgcatatcgaccacgaaccaagcggaccgcctttggcaacaattttgaagttcggatcctttctgacaattcgttggccaacattggcacgaaagcaatgccaaaattgaaagcgtttaatgaatgccgatttatggcattaatttttaaaaaatattctgcccattttcagcccggtggcatttgccaattgcgaaacatgcgcaaattgtacttaaacaaaaacggaattggccaactttcaccccaatttttcaactctttggccagcaggtgacaattggaattttatggtgatatatagtatctgagaatgcgattttgtgtatcgcaaaagataaaaaccgataattaccaaagttcaaaagggtaaagtttttaaattatgtatttaaaaaatattttaactccatttattgaatttattagcatttatttcgtaagacacgatggattttcccaaaaaaaaaaaaaatttctgtaggttgtttttaccgaaaatcactaaattatcagtatttcttccgttttttcaaaccgaagtgccaattcccttcaagggaagtgctgcaaaagttggaatttcgtggcaataaattgaccgatcagtcgctgaacgaaggcggcgcagcaggcgaaggcggccaacagcagggaatgttcggggcactgaaaaatttgcaggaattgagcctggagacgaacggactcagtgcggtgccgagcgtcgcactgagcgcacagcgcggaacactgaccaatctgaacttgggactgaatcaggtggtgatcagcagggaatagcgggcaaaagtaggcgtataaagcattgatcagagcagttgatcagaaagagaacgactgatcagaaaggcagcaactgatcagaacggaattagatcagctgatgataaaaagaataacttatcagggttagagcaactgatcagaaaaaaattagctgaccagaaagaaagtgagagggcaataggccagaaagagagcagaaagagaccagatcacatgagaaggcaagtgaacagacttagagaagctgattagaaagagagcgactgatcataaagaaaacaactgatcagaattagagggaaattgaccaaaaagagagtagaaagggaaaagtgatcagaaaagagaaacatccgatcaaagaggcaaggaattctgaatagaaaggatctgtcctcgaatgattcaaaattgaatgcctttcattcgttgtccatttgcagatcaaagaggtccccgtcggtgctctgaactttcccgagctcacttccctctccttggagttcaacggacttccgatgattgtgccgcacgcttttcagcacgtgccacgcctccaatacctttatttgacgggcaacaaattccccgcctggtcccccgacatgttccgcttcgtccccgacttgcgaacgctcggcatcggcgaaactccgatttcagtgattccggcaaacgcattcattgtctgtctgtttggccttattttgaaggatggtcattcattccagcacacgcccaatttgatgcggttggaaatgtccgaagtttgtcggcggaaggcctttcggcattttgtgcctttgcgacgaccgttcgttcacttttaggcggccgtcgattcaattgagccgggcgcctttcagcggactccgatgattcaggcgattgtgctaaacaaaaacagactgaccaggcaatggtcaatgagcattctcaatattcaacagctgttcagggtccgggccgacatattccagggactgggcgagttgtactcgttggacttgcagggcaaccgattggaggaggtggagccccgagggttcgccaatttggccgctcttcgccatttggacatcaggtcgggttttggtgtgtggccttgttaatgcgtccattgtgctttcctgcctgctccgctacaaccttccccaatcccctcccca

SEQ ID NO: 23296 - DNA, 1783 bp, Heterodera glycines
gtcattgttgtcgacagcaattgatgcgcgttgccgagcagacgcgtcgtaaattggctggatgaagcagggctcatcaatcgtgtgagggccgtcgcaccgtcgacagttcccgttgtcggcaggtcgttgacgtggacattggtgttttcccacgtaggcgatgcgcccgcaatcgtggcacactcggcgccattggcagatgggttgacggtgacgctgtccacggccatccattggagctggagcttgctcaatcaggtggtagtcgtagcagtcatcgttgggaaagatgaactggcacgcaccacaacgtcgggcagtgcttgcgccgtttagaagcttagttattattattattatgtctttctatctctttaattttatttcgaaaaatacctgttgtgcttggcacggatatccgggcccaaatcgcaaacaaaggcggcacaccaccttacaaccagagaagtggtagcgcaagtgcgctcgccgctcacagtcgatgcagtagcgctgcacatcgaacagttgttcaacgcggccaatgtagttgaaatggccgcgctccagcagcaggcacaaattgaatttggccgccatgctttaattagaccaaaatttgatatccattatttaagacagaaatttacccctgacccttatagacaataaggtattcccgctccttttcaaacaccgccaggcggatttggccaattccatttgtgttgtttaacatccgctgtagtcgagccacgtccaccagcgtgtacatccctttgtcaaggggaatgccggcacgcgtcagcagctcttctgcgtcacgcccatgttgctcctgatgacgcgcgtactccgtaaatgttgcacggccaccgccaccagccattctcgtttcgcggtcccgaagacccagaaggacggcacgcgccaggcagagacggtcgtttgggttaacgacacgcaccaatgattgcacggtgtgcgaagcatggtgttccgcctccaaatcacagccacctgtttttttttttcaacgtaatgtgcttgaaaatcgaagaacaaacctcctctttgtgggtccgcacgaattggctcgagtggccacaccgccagaactttggcgaccgttgtcccagcaaacaggtcaatgccggctgccgactgctcattgagccgctcaatggctgccgccagtgccgcagcgttgttctgctcgggcgggcgaaggcggatgacgtacggccggtcaaagcctggtgggtgcagctgcagaccaaccagggatggcggcgggtgaccgtccagcacacggtctagcagatgctggatgagcacctccatcaacaagtcgggccgctgtgtgtcctccagcggcaagaagcgcatttcacaaatttcgccacgagtgttccgtggcacattcctcatttgcgtggtgcgctcaatgacgaaactgtcctcaatcgccttaacagagaacaacaaaaaatttattcatggcaataaaaatttacaaacaggacatgagcgctgaatcctaagccatggtacaatacatggggcatggaaaatatggaaacaatgggagtgaggggggcacactccccactcacaaaaggacacatgcatatgtgacaggaaaggaatttttcaacctgaattgtcgaaaaatcaaaaggtgggcaatgcacgaattttcacggcaggaaaaggggtctttgtttttcaatacccccatttcttctaattttggaacacaatcaaatcggaccctcaa

SEQ ID NO: 23297 - DNA, 1918 bp, Heterodera glycines
ctgatttcattttccgttttatgattttctaatagacttcttttacagatcgcagcgcaaattcgttccccaaaacttttggatttagaaaaatcctccgttttgtttcttaaattgaaaaattgggttcaaaatttcggctttgacgcccccagcagttttttgtttgcttctgagtttaaaaaatttgcattttgaggttcacatttttctaagaaatttgacaaaattctcgagtcaattttaaattattattttttaaaattttttagccctttgccattttttacgtataaaaaattccgtacacaaaaaatcgccgctttttctccgcttctccgctctgctgttgttgttgtgtgtgcagtttcatgttaccattttttgcattaattggacagcgaatttgacacttttattttattcccccgcaaaaattgggggcaatgcgacaaaaaaaagcgggggaaagaaaagaaagcaatttttgctgctgtttttcccctgccggcgggggatggcatttctcccaaatttgtatccacaaatttactgctaattaacgtccactaaaacagtaaaaattgaattttaatgcattttaaatttaatgtttttattttagtaatgggataatttggggattaaaaaattgtagaaaacattttaatttttctatgttaattaagtgtctgactaattgtgtaagcccaaaaaaggattaaaattttggcatgctcaaaaagcatgaaaaatccattttaaaattttattttttaatttgaataaaatttttttatttaaatccctcatagattggatttataatttgttctttccatacatcaaaatttgtcggggatggcagtgtagaaatttaaaaatgtcgggttgtcaaatcctcgtaatggagcaaatttttataaaaagtcgaaaaatgaaaaaaaaacaaaaattttgcgaaagcaaaaatctgaaaattcttttaaagaaaatctcatctaatttggaggtaacaagaagacatttgtaatttccagaattgggtcggggcttaaccttaatataaccataaaaatttttcaaaaaaaaatgaatttttcaaaatttcatattctgaattacaaataaaaataaggctcttctcggcttattgtaaacactttctttcataagaatatactttttcaatttgtaataaatattttctatttaatttaatttccatcaaattaatttaattgaaactcaaaaattgcatttgtccgcgctttttgtccccccgggggtcggtcgccccttttggtcgtcgccaattccgttaaatgaccgccggtcaccggcgccaccattttgcgcaccaaatttggtgcttaatgtaagccaatttgcgctgctaatggtaagtgccggctgaatcggccggcgatttgggctgatcattttcttcccccggcccctccgatcagtcggtgcattttgtgcagcaatctttcgcgcatttggtcacccgtcaaaatccgattttgtaacaattttcttaaatccatgaactcatttttggggataaagcattgaaaagaggtacaaaagccgagagagtctctctcgaatgaagcttaaacccgagattctcggttcgtttacagtagttttacctctgaacttggcattctagctagagcccggtgcggacgggatcccgtacgggatttttcggggatcacagtctgcgcaaacgcattttttggaaattgcgggactgtgactggattaatcccgcgggattccgtcccgcaaaaattttttgagttacaatcacacagcgggatcagctaacttgaaatttccgagctctaactaaagccaaaattttcggcacttttgccgtcatttttccaaatttggtcatttgcca

SEQ ID NO: 23298 - DNA, 1547 bp, Heterodera glycines
aaaaaagtccacaaaagggagtaatccacttactctgcggacgtgtcatagattaaatcgtcctcgagtaatatggattaaaaattaaacaaaaataaggattcacaacaaaattaaatataagaatgaggccaatcatcaataaaaccaaatcactatataaaatatataatatctttaattaaagagataattcacttttccggtcattttatacgttaacaaataaggagtttaattttagttttaaattgatttaaagaatttattttaatgatttctttatccagctgattccacaattttgtagccctccccgcaaagggaataaattttttgcctaatttatattttgtgttaaacctataaaaggggacattaaagcgttcagaaggtttgaaaatttttaatatatctagatctgttcggccataaacaattttatgcgccatgaacagatcaaatagctttcgccttttctcaagtgttggtagttgcaggtattctaatcgattttggtatggaattggcggaaggctgcatttaaaaaacacccgtttggtgaaatatttttgacacttttcgatttttttaatattttttgaagagacggattccaaacctccggagcgtattccaataaaggcctaatataagttttatataacgtaatccaaatcttagatgatttggatttaattattcggaacaaggaacgcatacataaatacgcattccttgttatatgattaatatgatcggaaaattgtaatttgttatcaatgtttactcctaaatccctaattgtatccacagcatttattgtattcccatcaaatttacgaaattttcacgtttttgcttatttttaatataaattacccaattttcaagaaaatttaaatttaatcaatattttcgacaaaatttgctaaaaatgtctttttctgaaattttttcggtctttaggggtcaaaaatgccaatttacctgatgggggccgttataataaaggttttttggaaaaatgccaaaatatggacaaatatggaaatattgacataaatcgcgaaatatggatatagaatactctgtccaccgctctgctgctgttgaggatgaaaaattgcgcttccaattacatagttattacgataagcaagaccaatatcgcatccaattttaatcccgacaagagattcttgagtgtcgttaatccatgttaaatggttttttaaattgaatgatttatatgccggtggtcgtgtgccgaagccgagcacaatcggcacctcacaaacggacagatgcgtttttgtgatcaggaattccttctgtaaaaatgagagttatacaagaccgggacctggtactgaaataaacgtacaactgagtacctaagtcccggttttcaaagttctgactgggaccgggaaaagtccggggcctattcaaattagcatcgtatcaacgatgagatgatacgatgtgatggctcatcgtatccccgatgcgcgttcaaattaaaatcgtctcccgcatacgat

SEQ ID NO: 23299 - DNA, 1336 bp, Heterodera glycines
  unsure (1)..(1336): unsure at all n locations
atcaacaaagggtctaccgccactccctgggcgagatatgttcagtcaaagcagagtgggtctaataaaacaagaatttttaaaattttcggcatttgctcttatttcgagcctgctctacgtgtgcttcttttgccaatatggccctgctatagaaatcttgtaatggttcacgactaagtgatgaaatatttttagcccatttcttttctatccaagcatgcgaattgtttattgcattttatagccttctggaaaaagatagtcagtaaaaataaagcttgttttaggaatatttgagtatatttacaacaacaatttttcggcaatttctaaaaatgaaggaaaataatttttttatcaatattttatattaagttatgtttttgaattgattgaccctatcaaatgaacagtgatgcagttgtaaaatttttcggcttctcgcgcaaagtttttcctggactgtttctgacagattgttgagataatttttctagatgtttgttcatatctcaatacattatttatcgcttttaaattgaatggaaatgaattgtcagtaacaaaaaaaatattttgtgaacatttataacaaaaattttttaagcattttctaaagaggctttttgacttcaatcataattatattgtcaattgtttgaaacgcatctgttgccgttggaagaggccgatggaaaatttttcgcctttcgcgaaaaagttttcccagaaaatggcgtgggacaaataaaaattgtacttttattatgagcaatatatatttcctatcaatttcgggtttgctttacacgtttgccaatgaaaaaatggagttttgtgaatgcaaattttaacggattttctttcgacgtgtcataagcgggttgtttcgggacaaatgcaaaccaatttgatgctattcgaatgagctaggcgcgctctaccctttcaaatgtatcaacaaagggtctaccgccactccctggcgagatatggccagtcaaagcagagtgggtctaataaaacaagaatttttaaaattttcggcatttgcccttatttcgagcctgctctacgtgtgcttcttttgccaatatggccctgctatagaaatcttgaaatggttcacgactaagtgatgaaatatttttagcccatttcttttctatccaagcatgcgaattgtttattgcattttatagccttctggaaaaagatagtcagtaaaaataaagcttgttttaggaatatttgagtatatttacaacaacaatttttgggcaatttctaaagatgaaggaaaataatttttttatcaantattttatattaa

SEQ ID NO: 23300 - DNA, 1708 bp, Heterodera glycines
  unsure (1)..(1708): unsure at all n locations
ttctttgagtttttcatcctctttctctgtctcatcgaatctggggggagagtgaagcatttccagttcatcctcctccccaacatatcttggcggtgaaggcagcaatgatatgtcctcttcaatttttgatctcttaagacgcttagcgtgtggaggagaaccaagaatcaccggcttatgaacatgcccttcttcgtgtgcaagtggttgtagtcttactttttgctgactcttcaaggttgcttgtaaaaagtccttgagttgctcaacttttttatgtgatgcctgcgggacaggtactctgatgacacgctgtcggtcctcatcaacggaatggagattggtgaaatggatgtctatccactgctcatccaaggtaccaattgttgagtgccaggaatagggataactgatgctatgcaacccgcaaacccatgacccattaaaatgcaatggttttggaagacgcactctgaatttgttcggttgattgtccgtgtaatccgtcacattgctcggcaagaacacaaagaaactatttgctgtcatttattaaaatttcttcaatgacaaaataacaaaaataaaatgcttttatacaagctgggattcactaatccattccctttcgggatagcctatgaattttacgagcatctcagtagatccatccggttttcttctcttcttcaacactttctctattctatagcttgtctcttcatccttgcgcacgcgtgccaactcctgctcataaaaggtacccctgaacttttcgccattgtcatcgcgcagtttgtaacggatgggacgtaccgtcttcagcacttggtcaacctcaaggatttcgtcaccgtaatttggcaggtaccccttctcgaactgccccttctctctgctcatttgcacaaaatcgtctttacggaagcggggagattttttgacaaatgattgtgggccatacattcgcttccataccttctgtgcgttttgaaaattcacgccaattggtcgtatcccatgaacacgagacggtgcattgttaatcccatccacaatttgctgcacagtatccacccagttgagagtctgtttttgcgcaaaatatctgtataatcgttgctttacatttcggatggcgcgctcagcaactgacgctttcactgacgaatggacgggctcgtgcttgccaatctcttgctcctcgaaaaattctttgagtagtctgtttttgaattctgtgcctttgtcggagaatattcggtgggggaccatgggcatttggtcaataagcttcttgaatgcctccaacatctcctcggctctcttatttttcagtgggatgacaaataatctttttgagagaacatcaatcgctacgagcaggtaccggtggcctccattatgacgagaaagcgcttgaaaatcagccaaatccacttgcacatcggtcataaacccagctgcaacagttttggctctcggaaagtgcacacgccgggggcgcatcaatgtgtaagtgcggtgtccatccaagtaactctgcacttgatcttttcgtanatgcttaatctttttccgcgcctctttccacagtgcggtaacgcctgcaaacgccgctggggaggatgggtcattgtacattttgtcaagaatggtgttgatcaactccattttttcgggcgaaactccttcttgattgccc

SEQ ID NO: 23301 - DNA, 2249 bp, Heterodera glycines
tttattattgctcgaattatttcatgcagtttttattgttaagttattaagcaacataatcaatttttattgtaaaaaaagtttattaataaattaaattatagttatttctaacaaaaataaatcgaaatttacggcatcgtcttatgattatgttgattggtggaaaaaatgtctcaaatattattaattctctaattgggacatttgcggacggacacttgcgaacggacaattgcggacaatttcggaaaaaaataaaaaaatttctttaaaaaatttatgaaaacatggaatggagacgactgcaaaacaaattaaaaaattttttatttataaggcctcaatctttttttaacttttaataattaatttcaatcgtcaaaatgagatgctggtgtgtctcttaacttaattttttagaatttaaaaagatttacttcccgaagagtatttgcctacattttttaaatttctccagctatgccgacaagtcttttcgggggatttgctatctgctcccctacttttctttcccatagaatcggggaagaaccctagataaatcttgctctagggttcagcgaggataacattccgataacccaaaaattttcgtaaagaaatcggaattccgaggcccaaaaaatgacgggaatcggaatttagtacagctggtgttcagcacttatataatatgctgcacattttgaaattgcaagtaaattttgttcgcgattaagcatgtctcaaaaaattaaaatatatttctgtatatctgaaatttgaagtgatataatagcgaagccaaatcttctaatccatttttacaaaaatttttgtttaatttttcaagaaatttttttattttttcctgaaattgtccgcaaatgtctgtccgcaaacaattagaaaagaagcttaaataatgatctagcgcagctcgaataaaaccaaccttatttcaacatggtaataatagaataaaataaaaaatttttaaaattaaattttaatctttcgagtctttagcatctaaaagataaaataataaaaattacaaatcatgagcagtaacattaaaatgttccttaatggatgatatattaatatgtgtgaaaacttagaactactactgaatagaaataacaaaattaaaaattataaatatagagaaatttaatgtaattaaacctatttaaaaataacgaataaattatcattgacttacttttatggctaaatagaacttgcaatcaacataacattaaacaaaattaaattaaacttataaatattttggcattaatgtacttcaattaataaaaacgaaaagatacccacccctaagaaatgaaaaattctcaaaaatatattttacgctataaattcctaatgaattttttatgagattttttgtaataaaatataaaattaaatcattatttataactttaatttttttagggaaaattaatattttttcaacatttttttcaaaaggggtgacaatgaattttataatagtatttttactaattttgctaaagcttaaagtcgtaaaatatttttattgcattaatttcggcagaaagaccaaaaagataaaaattttaataaaatttatttgatattataaactagggttcagccccgacatgtttcgggaaatgaaattacgaaagtcgtaaattgcacttgaaataagatggaagtatctttaaatgagttttaagacttttttgttctggattttttatatattttttttagactttttatgaaaatttcctccccgacgaaggtgttgctccccgacattttttaaatttctacagccatccccgacaaattatttcggggaatttactccccgtacccgacattttgctccccgaaagcttggggctgaaccctattataaactatctgatcaatgagcatctattaatttaacttttgtgtttagaataatgaatatcattccttgtattgctttgtcctttaattaaattttcattttttctattcgtataatatggcaatataattaattaaaagaatctatttaacttatttcatgatacattttttcaatttttatatcattagctcaatatgacttacctcatgtaatgttgtaccctcactgtagttctgcccatgtttattaaggttttattagaaaaaaaacttgcaacctttagattatgcgtgtaataatggtttttctctttgtctattttagt

SEQ ID NO: 23302 - DNA, 1888 bp, Heterodera glycines
gggccctttgcaatgtatgtgatctctgcataatcctttcacatattctgaccctgaaaggcgcccggggcatataaaaaattaatgcatagaattgcaaaaattacgcgcctaaataatttcggtgatgcataaatgcatcaatttaaagcaagaaatccttcgaatggatctgcataacttttctaaaaatggcgcttgacgcaaacaaaaatactcttatggtgtttctaatccctacaggcgccccatgccgagttcgtcccaattgctgcaccacaatgccaaacagtacatgctgtgctgccttgccaccaaaacaatgctttattggcaccaccactgttagctgctgctgctggtgctgctcaacaacccattccaccgctgccgccaccgcattcatcggccatgctgttgccagtgccaatagtgccaacaacatcaacaccagtggctgccatgcctccgcttcggccgcaacaaattggtgatggtggagtcagcggtggcgattgcgaaaaatcacccattaataataataacaacaaaattggcggtaacaatggcgattgttggagcacagctgtgacaggtgtgtgtcggaggactctcccaatatttcaggcccgtaggcagaaacaacaacaacaaaaaaattcggaaggcgggaatccgaagacttttttttccccaaaaattcgtgttattttaaaatttacagcgccatgcagaaaaatcaggaattttggtcgtttttttgccaaaaaatgacaatttggccattttcgtttcaatgttcaaaaaatatgattaattgaacagctaaatttttaaaaccacaattttttaactaattataagcaaaaaatattatcaaacttttgaaaacgccgaaaaaatgataaattaagagatttttctttgtttttaacagcattaattaattctctctgtttttcaaaaaaagatttaattattttagcttattgttagatagaaaaaaaattattattagaaaattttttttttttataaatttttgtaaaaatattttaggttgggaacaggcggcgatcatcaaaaacaaaatcggtttgctgatcaacggacgctttcgcattttgcaaagcattgcctccggctcttacggcgaaatttttgcggccgaagacttacagcagcggaggcaccgagtggccgtcaaatttgacggaggtcattataatgctaatggacccaaatttagtcgcaaatttcgcgctatttttttgttgtatttagcctgccgcgacaaccacttgagatacgagtatcaggtggagttttgtgttcttcgcttgaatagggcattaaatttaaaaatgatttaatatcgcaaatcaaaggtgtacaagtctgctttgtatgaggatgggaacggcaaagtggacggctttccacaagtgtattggtacgggcacgagtatggccataacattttagtgagtcaatttgttcggcgaaattgaattgtgcatcaaaggcttgctgattcgcggaatttctcaatttttgaataatctattcccgacgcccgacatttgcggcagcggtccgacattttgcgcctttgtccaaaatcgggttcaaaattatgttttttcaatccctgatcgcataaacagcattaaataagcgattgaaaatgattgtagccgatcatttgatcttcaaaaatttttttgaaaaaataataaaattttcaaacaacaaattattgatcataattaaccaaaagaaagtgttttcttaattttaatgctgattaggccttgaaaaaaaattcaactttgagtctgattttgggtataggcgcgaatttcggggccgcaaatgtcggggctcc

SEQ ID NO: 23303 - DNA, 1422 bp, Heterodera glycines
tatggaagttttgtttctatagactgcttaatttgccttctattatgtcttcgccttgggattttaattgcaaaatcattcgatcaattagtaaaataaattttcttaattcaatcgtggattcaataggccttttcaagttacgtaattcactgtgaagattttctctgattaattcggggttaccgtaacgtgatttcagcaattttattattattgggtaatttttattaataagggggtatggggatacaattcgataaggctcatcatgtaacagtccacgaaggtacttaagtttttgtatattttccatgttcggatcattatgtactgaggatttaaaatcgtcccaaaaactgggccattgggaaaattttcccgaaaaatgagttagagtttgtgccggaagctttattcttgatcgttgatgagcaaatggtatgcgattacgatgtatttgatcacttgaatgcatttcttgtgattcgtcctcttgatcactatcatattctttttcatcttcatcttcttcttctccggcttcttcatcatcgtttaattgctcttcatcaattgattcattctcttggtcggattctgaagggaatttggtttgagcgctttcagccttctttttacctccaaatttatatccttaattgtgtcaaggatttcgtcaatttccttaattgtttttaaataattatgcttttcccggaatattttttgtagtttccattcactgttccattctgttttattcatttgcctcattaaattttgccatttttggtgcaaaatttttaatttttcaaaatttggttcaattctttgaatgatttctttagttttattaaaaattcgagaacaatcatcaaaattatttttatcatactcaaaattcccttcttctatttttgacttaattttctgtatttcttttattaacactcggttaagtaacggtatttttgctctgagttgacccgacatatttaaaaaatatacttatgagttgaaagtacaagaattggatgatagcaatatggacctcactgttttttaatctgcttagatattcgattttctattctcttgagaaattttgttaatttgatttttctttggtccgtttcgattgagtcaattatggtttgttctgttgtgtgtaaaaagtctgatagtatgctatttgttacttcttcagaaattgtttgacagaaaatttctatattacggtgtgacaaatttttgtgtacatgcacagtgagagcaatagtaattttaaatatatatttagaaggattaaatttaaattttttgactttggtaatattgtcttgattaatggtaaaataatttgacaatggttcagtgattaaagccccgtagaaattttcaaaaaataaatcgtcttga

SEQ ID NO: 23304 - DNA, 1653 bp, Heterodera glycines
aaaaattaataaaaataattttattttgtgtgggggttcattcgaaccaattcaaaaatcaaaaaacgattggagcttcagctacaaggttaatgtttctgtttgttttctattttaaaagaaatgattaaattattatttattttcaaataaattttctttttctcccaatttaaaaaaatattttctctcaccaattcacccaattgaaaaaccaattggatattttcattgctttggaaaaacctgcataggatacgtattgatttttacgtgtaaaatcgcgaaaataaattatgttattgcatttttgcctaggggtattcacaattcattcaaaaatatcttatataataaagttgagtgtctgtatcatgtgtccagtgtttgaatttgtgtggcgttttgtttgagttttgcgttagaaaatgatttgaaaaaagaaatgtttggttttgctttttaattttcgttttgtcagtttttgcaaaaagcacagttaaaataaatttctcttttttttcgtttttaatgacaaaatagtttttgtatgtttattaatgataatgaaatcgcaatgaatgctttctattgcatttcttaagagaaaaagtttttgtttttgttattatcaaaaagcgtttggaaatgaatgctcttaacacttttgtaaagaaaaagaattgtttttgtatatgcaaagtcaatggaaatgatcttacacttagttttgatattgtattgaaaaagttttggttcgagaaattgtttgaccttgaaatggagtttttttgtttttgtaattaaagcggatgtcaattatgcctcttttaatggatacggttttaattggatggatttatcgcacttattgtttgttttgacaaaaataagtttcttttaacgatataaggtcagtttatttgttctttttttgtatgtagatgtttatgtaaaagaaattattaaaatgtaagagaacaagtatttataatgaaaaggattttctacgcaaattgtatttcataatagaaatacgtttttaaaattccaaaattatgctgaacaggtctgaattaagtcccgtgattgacatgccgatgaatccgtaaaattgagttcattgtttggaatagtgaaggattgagtcctcggtgattggaatggcggagaactgagtcctcggttattacgatgccgaagaatccgtgaaaagtgaaggattgagtcccagtgattggaatgcaggagaacagagtcccagtgactggaatgctggtgggattgagtcccgggaattggaatgatggagaattgagtcccagttattggaatgtcgcagaattgagtcccggtgattggaatatcgcagaattgagtctcgatgattgcgatgccgaaggaccaggtgaggttaggtcccagtgattggaatgcaagagaattgagtcccagtgattgaaatgctggagggttgagtcccagtgattgaaatgcaggagaatgagtcacggtgattggaatgcataaaaactgagtccgggtgattgaaacgcaggagaatagagtcccagtgattgaagtcctggagatttgagtccctgtgattgaaatgcaagagaattgattcccagtgatggaatgcaggagaat

SEQ ID NO: 23305 - DNA, 1844 bp, Heterodera glycines
  unsure (1)..(1844): unsure at all n locations
ccaccgccgacagtgtcgcggttcttacgccgaccattttctgttcagcaaatacataatcgaataatattttaggacaaataaataggagagtgaaacaaaagtttcggggatctcgacaaatgataacggttatgttgtaaatttttggcactttttatccataaaccaaaaatttatatattttttgaatattattgcgcaaccgacctgcatgtggaggaggccgactggtgttgatgcgcgggatggtgtcattgtcgttgttatttggcaaaaatttctgcacacgtgtcgacgtgtactctctgatctgctccgtgctgttactgccgccggcgagcagttcgcgctcattgggcgaggaggaggactcctctggcataaacttgggcagtatggacagagaaatgtctgtggtgaggggatgaatagttttaatgttcgttgtaacggttaaaaattaacggcaatagtaattattgaattcaatattccgtattgcactctctaatagaaaaaagttttaaaatactggagggaaaaaataacaatttcaaatacatgaaaaaatatttttcaattagtttaattggaagtcaaataattcctttaagttaaaattgagttttctctatagttcatttttattcattgcattaaataccattgccagaacgctgtacgataccattattcgtttcatcatacagcgagccagtgctctgcagaaaaaaatttatttgttaaaaaatatataatattaaatgaatttgtataatttaaaagtacatttaaaaaatctatttgttatataattgtaatacataataccatgtccattttgaaggtttcgaacagttcgcccatcaactctcgcgccacgattagtcctgcatggctttcaatgaaccaaaaaagtaggagctaaaaaagagaatgatttggcatttttaggaaattaatataatttctaaatttaaatttgtaatatttaaaaaaaaaatttgagttaaaatttgccaaaaatgactgcagcactcggtggtgttggtcgaaccatttaatttttagcgaaacagaatcattaatagcttttttctcatcgccgtgcaaaaaatttaatacacatgcatccaaactgtacaacaccaccatgccacatactcactccgtccttgcgcagtgcgtgctgggaaaagcggctgaaaagtgggtgttcatggtgtttgttgttgtagaaaatttcaagatgcttgtcctgcatcaacatgtcgcggaccgagctctcctgcgtcgacggaagcagcagcagaacaaaaacatagtaggcaaaatttactgcagtaagccctncgntcnggccnnggccntncctggngnnnnggnnccggnttttttggcncttcntntggttnctctccctgctccnnnnnnntgngtttgtnttnngcntnttgnnccnttgttttgncncgtttttntnnttnntnttttnnnnnntnnntnngtnngnggnttcttnttttnnnnntcntgggcnnnctgcnnnnctnttnnnnntgnnnnnnttcttctnnntttgnctnttctttggtcngntttgncgtnngttgtcnnnntnnntttcttnttcntgntnngtcgntntttnnnncccgtnnnntnnnttttnnnntcnccnnntgnncnggtngnttgtctcgnnntnctcgttnntgcggngntgnccttggnccgtgtngcgtgttgtgcccgncaaaagatgnnttttcncgtcncncntcgtctgtcgtggaaaaaacagggagtcctaaaagcacacaaaaagggggaaggaaata

SEQ ID NO: 23306 - DNA, 675 bp, Heterodera glycines
acatttattttgttttttattgtgtctgcaggcagggccgaaacacattttctttagcattctgacagggtctgtactgatgaggcccgccctgtcataatgcaattgctttacaatttaaaagcaaagattactctattccaacaaaaaaagcaaattctttcaaagttgtcgaaatttgtccgattaaaaaaatatcggcggcgttttgtcacggcaaagttacgacggcacctttttgtcctgttccgtgttcgtcgacattatgggactattgaatgtctcgtgccacgtcttgtatagctaaatatgcaaaaatcgccctcaactttaacaaatatttcgccaccttagcgcttttagcttagtaaaaaattttttaaataaatcaacataataatagtccacaaagtgacaaccagggatgcaaaaaacgggaatcggtcgttttgtcaagaaattaaattgcatttagtataaatttatcctgaaaatttgagaaaaattcacttttccggaattgttctaatgctttgtatatgtcggcacagctaatttgtttgcaaatgccaatgaatgttatttctgccaactcttcctcgccaaaattgccacttgtcgtcttgtataatatggcatctcaaaatttgatgtgaatttcctgctggtcttatc

SEQ ID NO: 23307 - DNA, 931 bp, Heterodera glycines
taaaacaaaataaccaaaaatatacttttattgtatttttatcgttaattaaagtaaaatttactcattaacacagcaataatttctttaatcgtttaaaatattagaaaaaataaatattttttagaaaacatttttttcccgtttccggcaggattcccgttaaaattgacgggatttttacgggaacgggaaaaacacgggaatccagttcgggaatcccgtcccgttctttttcgttttcccgttcccggaaaattttttttaccggactctaccagataccatgaagcagagacctgatcaacgtggtataaatgacttttctgaccaacatgaaaagttggcttaacaagaatttttaagggctttcggtgtgctcaaatttgaggctcaaatagtgcttattaatagggatgagaatttaaatcaagaaaaatcttcaaaatatctccaaaaagtcatgaaaaaatgcaaaaattaatgaaaattagcgaaaagtaaaaaaaaaattagatagttgtccgttaccaggtcccggtcccgctcaactctaaaaaaataacctattttggaagtaattatagaaatgtatcattttataaaaatgattaatttgtgatcagcgacaccgaaaactcaagtatatttttcattatattcaagcacagaaaaaataaaaaccagtccttggcgccaaaacgtggggcaaaacgaccccgactctttttttgactataacattttatttatttttaacccgtcgacattttggctggtgagattttctcctgtttcgatttataagtgttgctccagagtccgtatacgtttcactaaatcctccattacattatgcattaaaaatagaatacggctgacctattttcaggtttttagggactcgttgcccaaatccgtatttttagac

SEQ ID NO: 23308 - DNA, 1512 bp, Heterodera glycines
  unsure (1)..(1512): unsure at all n locations
ataaaggggtcgacgatgcccatttgagaatggaaaaaaagtcgactcgcgaagcgatcggcgaacaaccaaagttttggacggaatcttctgattattgaaatttatgaaaaagcgatcaaataaaaatattaatgtaatttcattttaaattgtattgtatgggtttatttttttaaactttggttattattagggcacggatttttatgtatatccatattctttttcaacttatttcggcctaaaaatgaagtaaatagtatttttagcttggtttgatgcattggatgtctttttatttccatatttttccatctttcatattttgttcatatttccatattttacttcattatttaggcatttccacaaaaaattcgaaaaaggaactcctaacgatggaaatttttggaacgtccctaaaatcaaaaatttttgaaataaatatcaaaaattaggaaaatttttgagaaaatatcgcgaaaaaaaaatttttttttttttttacaaaaattacgtcaattttttctccgtacttaagaaataagaggtctcaattatctaattctatattcctgttttaaaatttttttttcttgacagaaattttatgggtttaggaattttttttcaaaaattcaaacctgttttcagaattttttgtccattttttcgtattttttgtccatatttcaacgttttggtccatattttggatgtccagcatataaatccgggccctagttattatccttatctcatttttaaaaaaaaatttccattaaaacttcaattatcagcgaaataaaatcacatttcattttagcagaatttcttcgtgttaccggtcctctcaggtcccggtcccgttggaataaaggacaattgaaaaaaattaattattttaaagcaaataaataaaatttgtgtttatcctagtggctagctaaacttatgtctttcatttttatttcgtttaatccccccattagaatatgagagtttttcaataaatattcaataaagtacaattgtaattaacaacgtatattatatttgaatttttttcagcttaaaaattttgaaaaattcacatgctgaatggaacccactcattgaacagcattaacaatcgttatggaactgtaatttttcatatgttaaaataaacagatatctttcatcagtagagaccggattttatgtttttacttttttttgggcttagtttggcgagagaagccaaaaaataacattttcaacgaacaattttttgatttagagcgacttataaatacataaaaacacatttttggcgctcgcacacatttgggcgattttggaattttagcacctcttttggcattttttggaaaatctataaagaaaaaacaagaaaattgaaaaatacacccctaaaaatcaatttcttgcattttcttattttgccttttttttngttttttgcacatattttattacatttttcaagattttttgggggcactg

SEQ ID NO: 23309 - DNA, 553 bp, Heterodera glycines
tactgaagtgtactttttgagcacgcttcagttgccccccctcggggccaggggtttgctcaaaaaaatttttaaaaactatcaccttgtagaggacccttaggcggagtgccctctcagcgggcactttttgattagagtttcagaaaaaaagttacgagccgtcaaacgcacgaaaaaatgagaaatcagtccctggtactcagttggcccttggaccggaaaacctatatttttcccggatgcgcctcaaaaagttgtaagacccttccaccactttcagggcgctcccggccttcggccgggagaaaatggttttagcaacgaaactccttgtcaatataacgtatatagtaactagcgggtgcgtgaaccgtcggctatttagctgggaaaaagcgcttcgcgctttgggagcttcgctacctagataagctatgggttatgaagatatttggaattttaaaagattatctgggatttttaggccgcttcgcggcctcgaacgggcgctttgcccccgtttttcatattttgttttgcttttgacggg

SEQ ID NO: 23310 - DNA, 1193 bp, Heterodera glycines
  unsure (1)..(1193): unsure at all n locations
agcgattagaagagtgattagaagaggttcaacagcgattagaagagtgattagaagaggttcaacagtgattaaaagaggtacagcagtgattaaaagaggtacagcagtgattagaagaggttcaacagtgattaaaagaggtacagcagtgattaaaagaggtacagcagtgattaaaagaggtacagcagtgattagaagaggttcaacagtgattaaaagaggtacagcagtgattaaaagaggtacagcagtgattagaagaggttcaacagtgattaaaagaggtacagcagtgattaaaagaggtacagcagtgattaaaagaggtacagcagtgattagaagaggttcaacagtgattaaaagaggtacagcagtgattaaaagaggtacagcagtgattaaaagaggtacagcagtgattaaaagaggtacagcagtgattaaaagaggtacaacggtgattagaagaggacaaaaaaaatgcattaataatttgaaaatattttttaacaaatttaattaaaaaaatagatgaaattctatcaattaaaaaaataattaatttaaacttataaaatttatttatcaaaaaaaaattaatttaaatataattttttatttattaactcaacaaaatattttaaattaattaaaagcattaaaataagcaaaaaataaatagaaaataatgtacaccgcccggattcgaacttgccccccgccccctcaaaatgatgcctcagaatccccaatcacacagggattctaaggtcttaacgatgtaacaattgaaatctgatcacgtattcgtgatcagcggcccaaataaccactaatgacatgtttttggaagatttttggtgaaaaaaattttccactcaaaaatcctggtcacccccctttggtctggaatcccaaaatcacttttatttttataacatttttcaaaaaagtgataaaaatgtgaaataaaatttatataatagagcaaaaaattgcggatttttgtagtattttacttttagagtatgacttttcagaaccgagttatgaatttttttctgaaaattcgaatttttccagaaattctggaatactntttttctttttgacatttatanaccannataatctcataaanttctcccgattttttgctatttttaaagctttaattcacttaa

SEQ ID NO: 23311 - DNA, 2901 bp, Heterodera glycines
cagtgtcaccgggactaagtgaccaggcacagaaatggttgttgtccgaagcggagaaatattcttcactgctaatgaatattgtacaggtggcagtataaaatatttgagattaattataagtaatttatgataaacagtgatcctcaggttgatttatttattttttaatggattttgtttttatattcatctgaaaaaatttaatgggtaactgatatctcgagataaaaattgaaaatttctgactgacatgaatcccgagagattttgccgtgactcccgaccttgttttttttgagaaaagggcaggaccgagagttacgtgagaaaggaactaatccaggatgtctataagatctgaaagttggaattttcaattaaatttaaaaatatcaattgagggtatgtgattagtatatttgaattggtgaattattattcattgttaaatcttttttctctatttattcctatcagatcaattacggtgccgcggcgggtgccctacggtacgtggaactgatgggactgatcaacttcgctttcatctctggcacaaaacaccgccattttctcacttacatttcaaatgtgttggatccgaattttgacagagtgatgcctcccgtgctggccaaaatatgcaccaaaggcccagtggaattacaccaattgttaccctattaaaaatggcatttatctgctgcacgcattttctatgataaaaatgaggcaatttgcgcgattgatattttgaaatgcgacttcattttgattttaaaaaaaagtcggttttaaatagagcccggcggaaacgaattcccgcgggaaaactcgggaattccctcacagaatcgggaccccttatgttctattgtatggagaaatttctgagaaaaattatttagttaatttctgcaatagaacaatgtcctgttgtccttcaccagtttttttatgttaaattattggtaaattttccagacttaaatatttaaacaattaatttacatttctttactttttaaaacaaactaaaattgaaaatcgaccctatgattctttaatttttatttggacattttttggagaaaatctaatcaaatttagcaaaactttcattcatttttttaatgtgtgttattttttgatatttggcgttttttttttttttgctttcattatgatgtccttagagagcgtgattttgagaaaatacggatcaggactaggattacggactagccattcatacggattacggacttacggactaaaaatccgtaaaatccgtatccaggaaaaatacggatccgtatacggataaggatttttttaatttttttttctttttcaataaaaaatgatttataaatacgaatctcggtcttaattttacgaaataaaaaatgctcaatttttgcttttcatcccacttttttgcggcgcgcttttcccaaaaagatttttgaggaacggggggggggggggggggcggccgtttccccctagacgccgccgggaaaaattttaaaatgcaatttattgacagattttatcggccaaatttgcgctttttaaccgatttcatgaatttttatcagatttcattaaaactatctataattttgaaaaatttacaaaacgaacttatgtaaaacttcataaaaatttccaagaaatctaaatcaatattgtaaagatttcgagtttttaacataaaacgtttgcttttttccaatttagtaaaattttccaattgactgcacaaaatttattaaatttcaccttaaaaatgttagaaaaaaaaaatccgtaatccgtatcataatttatacggatcagtatcaggattacggacttgcatagatacggattacggatttaaaaatctgtaaaatccgtagtcagtaaaaatctgtatcgacccaaaaaaacagggattacggactacggatccgtaaaaatccgtatacggatccggtccgtacacgatctctactgtcccttcttaattttgtcgcattgtccattccttcccagcagaaaatgttcccccgtcgttcgttcaatgcattcctttttcagtgtaacatcatatatttgtatttggtgatttttgagttttatttttaaaactttcttcaaaaaagagataaaaatataaaataaaatacctcttataattcaaaaaattgaatgatttttctaatattttaatatatgaaaactccctttcagaatggagttctgtattttttctaaagaatcggaaattttcagaatttcctgtaaatttttttttcatctttacgctagaaaaaccaaataaaacacataaaattctcccgatctttctttattttttaagctttattccactaacattttccaaacccttcgccgtcattgaaatatttgtacaacgaagaaaagcagtgcatttccccgacaaccagcttgttttacacgaaagttatctcaaaagcacaaaactgttgacatttttggacaaattctttaactaattaaaatgtatattcaataaatagtttttgagcccatcattagagaatgtgtttttcacgttgaaaaatttcaaataaaatgttgaaaacaaaaaaatattttatatttttatccccttttattattgcattaaaacaactaaatttctcgcttatggaaaattgttcatttttaagatatgtttttaaaaacatttggttttatgctgcaatataaaaaaaatttttgataataaaaagtagtaataaaataataatttcgctgaatattgattttaaaaaatgtttaaaataaagctaataatattgatccaaatggatttcaaagaaaatcaacatcacttatccatcatgttttatttcattcatt

SEQ ID NO: 23312 - DNA, 987 bp, Heterodera glycines
atttaagcctaaaaaatttgtctgattattttaaatagtttttcaaaaaatcgcccttataaattgcattggatattttcaagacaatttagtcctgtactggggagtatccctgcaaaaattcccgaagggttctgatcgcttttccaaaaattacttggaattaaatttttactaaaattataagcctaaaaataagtctgattattttaaatattttttcaaaaaatcgcccttataaattgcattggatattttcaagacaatttagtcctgtactggggagtatccctgcaaaaattggtggggttctgatcgcttttccaaaaattacttggaattaaatttttactaaaattataagcctaaaaaataaggttaattattttgaatattttttcaataaatcgcccatttccggcactatgccaagtttgggcgggacagacctaacggggagatataaagtatagggaatatcaaatctattcccgaaggattcatcctcccgaaactgtctgactgttcgaaaaaattttttaatttaagcctaaaaaatttgtctgattattttaaatagtttttcaaaaaatcgcccttataaattagcattggaatattttcaagagaattgagtcatgtactggggagtatccctgcaaaaattggtggggttctgatcgcttttccaaaaattacttggaattaaatttttactaaaattataagcctaaaaaataaggttaattattttgaatattttttcaataaatcgcccatttccggcactatgccaagtttgggcgggacagacctaacggggagatataaagtatagggaatatcaaatctattcccgaaggattcatcctcccgaaactgtctgactgttcgaaaataaaaatttttactaaattaagcctaaaaaatttgtctaataattttgaatattttttcaaaaaatcgcccttataaattgcattggat

SEQ ID NO: 23313 - DNA, 1274 bp, Heterodera glycines
caaaatatcgaatcgccttaaatacatgaaaatacgaaccgcgaaatgtcatcatccctgggatatagtatgtaacattctatgtaagaggaaagttatttttatttaaaaatttttgtctttttacttaatgataaaaatgccagtttgcaacaaaaatcttaaaaaatgttcaaaaaagaccgatatgtgaaaagaattgaatgagaaaagaaggaaataaatcacataagaatatccagtagaccaggccacaggagtgataaatagggacggccaatatagctaggctttagactctaaaaaccccaaaaataggcactaaaaagtctcaaatttaggggtgtaaaatgaacaaaatttattgaaaaacgaaaaaaaattaagccaaatcagtattgagttacattgtttttttttttttgaattcttctggccccttttttgaatctaaacgaaatttttgaaatttgcaggctactaggtgacacttagggctaccgaatgataccaagattgttggatttggttggcaaagaaaaaaattatagccaaaaacttgtgctcgtatgaaaacgaccccgacccaaattaaatgcattaacattaaattgtacgccaaaaacaaaaaaaccaaccaaaaattggacttttcttgaccaaagttggcaccaaaaagccatcaaatttggcctcaaattgagctccacaattgatttcgccttgcaccattgacgcgtattcgttggtcttaaaatttgcatttatgaatttaaaattattttcaattttaaattgagaaaatgaataaaaatattttttttaattaccgcttccggcgactgacactcgcgcggaatgggcgaaattggccaggcgggcaatttgttggcgaaatgtctaaggaaaacaacgccaaaaacccataaaaaatggtggcgcccaattaatttaccgtaatggcaccaaatttccgttgttggcatgcgcaaccgtagccgacgattggctgttgagcattaggggcgtctgtgcgtctaaattttaaaatattataaaacttttgaaaaacaaaaaaaggaataattaatcaaaaaacaaacaaacaattgaaacagaaatatttcaaaaaaaactttttaaatttttcataataaaattttaaggaaaatttttttgtgaccatagtaattttcatcggtaatttagaaaaatcgttagaaaatttcaaaatcttttgttttttgaacattaaaaaatgtcggagggggggg

SEQ ID NO: 23314 - DNA, 2987 bp, Heterodera glycines
  unsure (1)..(2987): unsure at all n locations
atcanncggtcactgattcacggtaccannattcacggttccttcacttgaaaaatttacactggataaaaccgaaaaattttaccaattacatattgttttcatatagaaatttaaagccttttttggcatgatgatattttttcattctattttaatattttttcatttttttagtggatttttgaacctggaatttaattacacttttagaaatatggattttgatgacgaagtttttgatccaaatttaaacatcgatgagcaaaacaacactgaagcggaaggacaaattgttgagagggaaagaaaattggaaattactgaacccccatcatcgcttagacactattttgtctatgtaaaaggacaaaatgatgccaaatgtcgaatctgttcaaaaaaactaggccggaaggatgggacaacgggaggaatgcttcgtcatttgaaaagtgcacataattcattgttcaaaaaatacgaaaaagctaaatcaacaaaaactgagacaaaaaaacaaacaagaacgagttcatcattcgcagggccaccaccaaaacaactccgcatggacgaattgcatgtagtgaatttatttactttttccattttccatttatttttagggaaagaaagcggaaaaaacggaaaaatcgccagaaataattgacgatctgcttttgcgcttcatttgtttgagctgtcagcctttgagttttaccgaacaaaatggattttcggattttttaaaagcagtctgtccaaggtaatcaaatttaaatctcaaaacccaaaataaattttagttatgaattgaaaaaacgggatttttttacgcgtaaaatggaagaaaaatatggccaagtcttttctggtatcaaagagttgatgaaaaatgtcaattatttttctttttccactgatatttggtcaaataagcgaaagcggaacagttttttgaggtattttaaagtaaatattagccaataaaattcttgaatagtttgacagtacattatattgatgaatcgatgactcgccgtttttttgtgcttgccactgaaccatttgacaatgcacacacaggccaaaatattgctgaatgtttcagacaattgttaaatcaattcgaaattcctaatgacaaggtgcatttggtggctacatgtcgtttcaatatatgtcatttcaatactcagtgaaaatgtgtcatttcaatactaaatcgtttcgattcgattcgtcgctcaattataacgtcttttcgtgactgccttatgttaaccgaaaattttaataaataacaaaaaatgataaggacaaaggtgagaaattgattttgaactgggctttttgagcaagaaaagaaagaatcgataaatcggtagaaatgcaaaaaaagaagacataaatctagggatttggcttttgttttgaaagaggcaaaatttgtatcactgatcatctgattcattatcaccatcattttcgtgacgaagaacgggaattgcttgtacatatgtctgcatatggtgcgataatgtctttaaaacccctcctagactgggggataattgtagattgggggattaatggagattgggggataattagagcaaatacggtatgtcaaatccaataaaaatatcgaaaatggagcattttaactgagtattgaaacgatttagtattgaaatgacatatattgaaacgacttagtattgaaatgacatatattgaaatgacgtatattgaaacgaagtgcaccggcatttggtgcttagagatgcacagtcttctatgatttctgggatggaatcgcttgaatttgagcattttgattgcatgatccataaaatgcaattggtaagacttcctatctaatttttactgtcctaattaattttaatttatttttttcttaggcaattcgagacggaattgatcatcctaaaaagggcgttaaatcaatttgtgaaatgttacaaaaggcgcgtaatgattgtcgctgcaaaacaataagaatttaaccgaagtgccaatttccgagtctttttgtgaacaacaaaaagcccttggcatggcttcaaacgttttgttgcaggtgtcaactatttttatttaatccattttttataacaaggatgtctgcacgcgttggaattcatcatacattatgcttgaacgtttgtatgaacagcgccgcccgcttatgcttattaacgaagaatacaatgatctttctttacctgattttgagcttgtaaaaaacatttgccaggtcctttataataattagtcttattgatttatctaatttttaggttttaaaacccttccttatatttacaaatcaattatcacaacgtgactaatcgctttcgtcagttatttcggtctacaaatgccttcaaaattatctccgtgttaatggcgaagaaaatgagcccattctgagtttaaaaaatgtcataaaagatggattagaatcccgtatgcgagaacaccaatctaaaatgtaaattttggattcttatttgtcatatttgctaattataatagtttaagctttttgcgcatggccactctcgttgaccctcgtttcaaaaacaatcctaacattttctcgacaaaagaacgagctcaaaatgaagtgttattgcttgaaacagtaaaaatggtaacgaatccatcacgtcgagggtctgattcggaacaaccgaaaataaatagcgactcgcctaatttgttggcattttttattggcgccactcagtcgattgagtttgctgattctcnaacaaacaaaattcctgatganatgatgctctaccttcaggcacaaattaaatttttttaataaatagaaaatttagtcgatacttcaaccgttgtaatcggacccactgcttttttggaaggaaactcgcaattccctacataaaaagcttgtcccaaaatttttatgtcaccctccagcagcg

SEQ ID NO: 23315 - DNA, 960 bp, Heterodera glycines
  unsure (1)..(960): unsure at all n locations
ttgatattggtggcaacttcacaaaaactccgtcgctttcaacgaattctcacactcatcgcaaattcactcgtcggaaaagcgacgcgcgacccgccggccaacaaatcctccattgttttttgtctgcctgtcacttatttttgtgtgtgtgccaacgacagccttaggccttggcattcattgccttcggtgctgccgctgctgactgaggtggtgctgttgctgccggtgcccgtggaatgttcggtggcggcggttccgggaagggccgtggctccttccgcaagtcaatttacaagcagctgacgcggcctaacacggccagcagcaacaacgacaatagcaacaacaacaccgcttcgtctccctcctcctcttcctccgtgtcctcctccatcgaagcccaaagaatgacgggggtcgcaactccgaggcatcgtccgcccgcgctcactttcagcggtccgtccagcaccatgcaacaacaaaatgctgtggggatggccagcattgctgactcaaaacatgccttggccaagtctagccccgcggcgctcacgggcacggacggcggcggtaatggcacaacaatgtccccgctgttgcccccggtttgccccacggcgccgaagactcgctccgcaccggccgactccaaattgaccaacgctccgtccggtcgtcctcggtgtgtgagtgcgtggagttactaccaacagccgttccacccggcctcgtccgcgttcgccaacgcgcctctcctggagaacatcactctggtggttgatgtcaaccaaacccgtggcggttctcagtctggtccgccctcctcgcgctcggtcggccggagcaacgccgcgcgtcgaatggtcggncaagaaacaatggngcatcaccnacagcagcaacaacagacgcagcagcagcaccatcgcagtatcagcgcatcgccacact

SEQ ID NO: 23316 - DNA, 855 bp, Heterodera glycines
tgttgacgccacaaagccaaaatagtcagaaaaaaacggataaacaatgaccaaaaggtctccaagaggatttgctgcgaaaatggcacattccgccgacgctgccattcggggatcggatttaaagcggattttgttaaggaatagccacaaattttcaaaaatctcccggcatttaacagtcgctttaatatccgtataaaacgaaaattcggccccgaatttgcttggaattcatttactttgctcgcttccttttcagccttcacaaagctgcgcaacttttgtgcgaacacaaaatccatcggttgcccgttttggagcattcaaccggaaacattttgtacattctgacgcacaaacggttgatcaaattcctctatctttatgtgagtgaggggcgctgcccaattatttcctaaattattatttttttccctaattaccactaattccccccccccccccattccgctgctgcttcttcagatcaacgatttgccacggcctccgtttatggacaaaacgccgaaggaattgggcatcggttcatggggccacatttgcacgattagcaaagatacgccgctgatcgaggcgatgaaaatctttctcgccaagagagtgtccgcgttgcctttgctcgactcggacggacgggtaaaacaaataattggcatttgagaaaattaaatttaaattatggaacgaaataggtaattatgtcatgatgaaaaatcgaattaaacaaaatggtcaatttatgaatgggtttttttctccggcgcaaaattaaagggaaattgttgtaggtgggagacttttttgaattttcccctgttttttttgttttgt

SEQ ID NO: 23317 - DNA, 2825 bp, Heterodera glycines
tttcattaaaactaaattaggattaaatttggtttcgttaaaataataaagacttttatgaacgggatattcaacacctgtatattctttgtccttcgcaagtgcatttttgcaaatcatggtaaaatataagcgaataaattttttttaaaaaatgataataacaaaataggtcttcacaattgccgttttagaaaaaaaaatgacgaaatgattttgcaatttgttaaagttcttaaaatttttttaagattttacattttttgacaaattttattccttctttaattttaaattaattattttcatgaagagaggtcattaaaagttaaaaaaaacccttctaaaataataatttttgtaacagaattcatacatattcatggtcagcgaccccaaaatcccttaaattttttatggcattatattttctgttactagatttttgcatcgggcaacctaaactggaaaagtgccaaatttcaattggaagttttaaatagaattttctaaaaatggactctgatttatacgatgaatttggaaattacatcggtccggagctcgatagtgacgacgatgaagaaatacaaccagtgggtggtaatgaggaggaggaggagcagaaagatgacattatggagcaggtcaatttgattgttcaaaccaaaaatcacttccacaaaaggaggatgaggaagaggacggagaatcgccagttgttcctggcagtcaaattgtgctgcacgaggacaagaaatattatgccactgccttggaagtttatggggaggaagtggagacattggtccaggaggaggacgcccaacctttgacagagccaatcgtcaaacccgtcaaactgcggcgatttcaggtggccggcattacttttccgcagaaagacaattaatgtaagcaaatgccaggcgcaagaacaccttcttcccgagactgtctacaagaaagattttctggtcgatatgacgaaccatcccgaactcatccgaaacattgccattgctgggaactttcaccacgggaagaccgcgttcatcgactgcatggtggagcagacccacccggacttctttcgttatgaggaccgagacgttcgcttcaccgacactttgttcattgagcagcagcgcgggtgctccatcaaagctctgccgataacacttgtcatgcaaaactctcggaacaagtccttcctgctgaacatttttgacactcccggacatgtcaatttttctgatgaatgcactgctgcttttcgtcttgttgatggggtggttataatggtggacgtgcacgagggattaatgatgaacacagaacgattgttgcgacatgccatccaagaacatcttccgatcaccatttgtctaaacaaaatcgaccgattgatcttggaactgaaattgccgcctgctgatgcctatgcaaaactgaaattcacacttgaccaaatcaacaattttgtacagtaagttcaaaaactcagtttctttccccaacaaaagcttttaatttatttccatcatttaaaaactttcagtcgcttgtttcgaaatgctttttcagaacattcggcgaggatgacatacccctcttctcccctctgatgggcaatgtgattttcgcaagcggtcgctatagcatttgcttctctttggaaagttttgctaatatttacgctgccaaacatagccaattaaatgccgagaaattttcgcgtcgcctttggggcgatatgtttttcgacacggcgctcaaaaagttcaccaaaaagccacaattgggcggagcaacgccaacgccgcgttcatttgtgcatttcatactggagcctatgtacaaactgttctctcaggtcccccctccttcactgtttgaccgtcgtttcgcttttttaggttgtgggcgacgtcgacacgtgtctgcccaaattgcaacaacatttgggcataaagttgaacaaagaagagcagagaatgaatgttcgtcctctcatcactttgatttgtcaacgttttttcggctcattcacctgtattttagtagcgaaaattaaaaaataagcttttgcactttagcatttgtcgatttggttgtcaacaatatcaaatctccgattgaaaatgggccgagaaaggtgcaacattgttacagcggagacgccaccagtcaattgccaacggaattggccaattgtagcccaaatgtgagtcgaaatgcgaaggaaacaaacggacaaaacattgcaataattcccacttttagggtccgctatacattcacacgactaaaaattatgccacgcaggacactacggcatttcatgtgctcggaagagtgttcagtggcacaagtgggcaaacggcgggggaagtgcaaaacaggcattttgatgtcaatttccagttcattctggcgacgaggtgaaaatattgggcgaaaactacagcatccaggacgaagaagactgtagggttatgacagttgggagactgtggctgcccgtggcaaggttggcattgagcttttccattgttttttcttttgggtttcttatttatttccacatttaggtacactgttgaagtgaacagcgtcggcgcgggctgtttagttttgatggaaggcatcgatcagcctgtgacaaaaacgtgcaccatcgttgaaaaggactacgaccaggacgaggtgagccgaatggacacgaacattgggtttaaccaaccaaaggacccacaatttggacccttcgcagcgggaaaaaaagagggggggggggggggtgaagcgaggaaatttcgaat

SEQ ID NO: 23318 - DNA, 1540 bp, Heterodera glycines
cgaaattaatctgaaggcattcacaaaagggaccaccacccaccgggcaccaaaactataaataaaaaaccttatgacccccccatcattaactcacttttccacgtgaagaaatttctttattttgggatggggtttagctaacatacataaaacaaaatttttttgttaattaatgagccctctgtaatagactcatttgtcagttaggtaattagactcaaccgactgagccctgctgctgattttcatttgaattcaatagcagaattgcattcaacaaaaacaaaaataatttgtttggacccgggacttttcgtttaggctcactttgagacaccgacaaaaaggaacaaaattctattttcctaaaaattagtaggaaaaggggaagatgttattcagtctttcaaaatcgaaattttaaaagcagccgatgtaaggtactgattagctgattacccacggttgtgttctttcacactcacctttatcttcgtttggtcattttagttcgaatgatttccaaacttttacattcaaccaattccaattctaatgaaccaattaaacatcgccatattttttttcttctttttgttgtgaatcctttttgtgctttatttttttttacactttttttagattataaagcaatggaaaacgaggaggagcctcagcttcatattgacgtgttgcttaacgttgcagaaaagctaattttctcggtaattgtcgagaacacttatcgttagctaagctgacaaatgcttcacttttagcctgacaatgactttcgtcttgatttgagagacccaaacgccgacatcgtcaattttatggtattctttcccgcatttgtaaatgctttgttcaaatgttttagttgaagagggtctcttccttttcagttcgctgggcccgcctgtcgttggtcctttttctcgcagtttcggaagctcacccaagtcagtgtcaactcggccgaactccaactgtacgcgccgaagccgattcagggcattcgcggcactctttccaacaacaaagaggcgagtggaccaatggcaaatggtgtcacctttgtccggccccccccccctccctttgcagttcttccaagggcccttcgtcgtcaccgatcagttcttttacacccttttctgtcgtggcattctccgacccaccgtcgtggacactttcttcatcttcggcaatgacgtcgtcaccttcgacagcgttccgtcttcttcggcctccataatgatgaacgattggagggaacaattggaggacggagaagaaacggaagagggagagattgtcgagccgatgcacggagacagccaatggcatgaagagaagtgcgaaagcaacttcggcccttgcgaaatatctttcactgacggagagtcgccggccgagtcgttggttcgtctgtttctggtcagaggtcggcaccatggcaaataatgaacattacacctttcttaggcaaagcaaattcagattcgccagattgtttggaggattgtccagc

SEQ ID NO: 23319 - DNA, 949 bp, Heterodera glycines
  unsure (1)..(949): unsure at all n locations
aatcgcattctcaatttgacgcgaaggangtcctctgggagattcgaccgaactgcggcgacantgtcaccaccgttgccgaatatcacttcccgtgggtacatttcacccgtcccaattcgccgtccatcgctttcgcgtcccattgttttcagagtcattgctgaccgcacttccaaattggtgttcgcctacacaattgacgttatcaacccggaacgcgactgcgcctttcacttccctaccaatgaattcgtcgcacttttatgttacatcgccgcttgttgtcccaatttggacactttttcgttgtcctttttgttgcaaggcgagttctctgacgaagacttcaagcagctctcttcatggctgtaccgcaccatccaaagtgttctttcgcttcgttgctccattctctgcatcgattgcaatttgaccatcgaattccgtgcttttttccctgaggctacacttatggcacacttttaattggccatccgagtaaagctctctctttgcatttaggaggccaataagacgggacacggtttggcaacgatgggcgagcaacggcgcacggatgacagcgaaacgacggaaatggacgacacgccggacacttattcaatttcgagaaagattcaaatgcgcgacgagccgcccattcaggtgagtctaaaagaggaggaaattagcaattggtattattttgttttaggtgctgtattcattggttgggctcgaggaggacagtgtgaacgacggatggaacggctattaatttgttggattgtctgcttccgctgtctttctccgtcttgtcgcagtctttcctattttgcttctctctaaccaaggctgcctttggacgttccgttgtatctgtccctccattcccttcgctctgtgagggcgctcgtcatttttaaatgaatcgttctaaaaacga

SEQ ID NO: 23320 - DNA, 2112 bp, Heterodera glycines
  unsure (1)..(2112): unsure at all n locations
taggaggacattttagaatatcgaaaataacatcaatttgccaaccccattgttaagggattgaatattcgggagagacaaattgagacactgcgcgcgctgctgattaaacaccacgagttggcccgggaccaagaaaaagaccatttccacgccctgcaacagctgaagcaacggaacttggaggagcagcactagttggagctgaacagccaaaaggacttcaaccgaagggcgttggagcagaagacgaaagagcacgcgatgcagtccaagcagcagccacgggaattgaaagtagaaaatgggtggaataatacattaattgcttgttttgggatgctttttttacttaaaatcgacgacattcgtcttttaaggccaaggaaacgatcatccgaaaacagtttcgacaagcggtcaaaattcaaacgcgccaattcaaagcgtaccaatcccaaatgctccaaatggcgccccgggaggagcacagagaactgctgaaccgactgaaggatgaacagagtcggaagatcgcctcccttgcggaccaatacgaagcgaccattgaaacgatggtcacggaacaaacggtgggaatcttgtacaattatcacgcatttgaaagggggtgggattttgccggtggattacgccgagattagggccatgatggcataccatactttccaaaatttactgataatataaaactgggtcaatctgaaaaaaaattcgcttttcactaaagatttacattttaagatcaaattggacgcccaacaggaggaggacttgcgacagctgaccgaaaaactgaacagggagctgagcatgttgacggagtaccaggagaaacagcgggttgaactgagcgcacaaattgagcgcgagcgagtgcaactgcaggaccgcgtcaaccttcggcttgctgtgctgaaacagaaagtgggaccacaagacaatttagcctataattagttaattaaatgacattggaatccgttccattttttcgaatcatttttttgtaaaaataaatgttttttatcgcagatgaacgaagaaaaggtccattttgagcggaacagagagcgacagttggcgcagttgcacgaccgacaggcgcaagcgttgagtgccttctccgtcgatgagagacggaagaaaagttccatgggaagtgacggggggcggaacgacgcgtcgtccacaaatttgtgaattgggcccagcgggcattcgttgccttttctctccttttgtcgccttcaattttcaattgtttcgacaatttttacttatctttttctttctccaacgaatttttgtatgtttttgtctttacttatccgctttttctcctcttttttttgtatgtgagtcatcatttgtgctcctctaaacacttttgttacacttatttcaattcgatcgcactaacgggtatcgccggatcagtcaccagcctctccttctctttatccgtttttaaccaagaattttacagattgtcaaacccattcattcattcatttgcactcccaacgcacgcacaatttttgtttttttttattattattggatttgtcaattctgctggatttgctgctctcctttttaaaacaccaacaaaaaatgatacattttttgtgcagcttttgctaattaatgtacacttttttccattgtcactcatttcattcactgctcattgtcgtacaatttggaaaagtccacgcaacaactcagttcaaattgataaatttgatttcacctccaattgtctgctccactttatcgttacgatttccgtttacattttcacttttaagttagaaattatttatttcccattcattcattggaaacagggaatacatactgtatttattttattgtacggtatctttgaggcaataaaaaaacaattccacaggacaatgcctaacataaatcatttagatttttacaaaaatacacatttaattgaattggcaaatgtcccttcgcttcttcggtttccacgattcggtcagcgaagggaaatttctgtgggagattctcacgcaactgagagggctcggagttggancggtgtgtgaccaaaag

SEQ ID NO: 23321 - DNA, 3041 bp, Heterodera glycines
  unsure (1)..(3041): unsure at all n locations
tgtttttaggtgcatcgcctaacttttgttctctgtccccacaccctaggactttcgacttcctcacccatggaaagttttttctttggaaaaatttgattgttaaagatntaggaanaaaaaggttattttatgagnttgaaagaaanattgattatttagattattgatttngttttgtgatgagtaaagntatagttatgaggaggattggntgatttgttaaaatgtggnaagatttttgggggtatttttcgcgcgtcaaaaaaaggaaattcgttggtgaagacagcgcaggcaatcgcttttacgaaattttggagggaaaccgaagaggaaatgtgaacaggtaggaaatgttttttttgctttcatattttttattttaccataaatctgacggaattgtccagggaatgacggcatttggttatttttgtcaaactatcgcctatttttcaatcatttaatttttatgggaatggtccgcagtaccagagaaatatgtgattttgtttacagaacaataggactaaagcatcacacacactgagaaccccgcttttcgtttaggggttttgagccgcccccggacgtcgaagttccgtcagaaccaccggtggaatggcgcgcgtggctcaacaaaagcaggcgtttccctccgtcggaagaagaaattcagctgaacctactcaaacaacaagtaaaaaagcacagaataaacaatgtaacctctgcgccattctaaaattgcgacaattgcaattcaaaatttaaaaaaaatcgttgaaattatcttttttttaattgctcatttcccaatagcaatgtttatttgttactttttaggctcaattggtacaaaacacagaaacggaaaagaaagcgccaatgattgtgtcgacgggccctggggcagcggaaactgacaaaaggcgaaataaggcagggaaagaataccctaagtacaccgaagaagagtacgagggaattgcgggggcaaagacgagagagcaattggagagggagcagaaggagggcaagtggaagtacaaaaaattctttttcgagaaataattggctggcaaaaccatcatgtttattgttttagctgttgtttttaataggaatattgataaaaacaaatgaaagaatattgatgattatcaaacattaaaattgttttattatttggattgtgcaattaaagaacaatgaaagaaagaagtcgaatccgacataaaaggcagtgaaaatgaaagacaaattctctcgaaagactaaaggaaagtcgaaggttcaaaaaatagattaattgctaatccgaaacgtctttttcaaccttattggttggtcatcacttttatttttttttgcaaaacgaagaaaccctgctttattcggtgctttcgcttttgttgaaggagttcgcgttgctgtccacgatcatgtccctgacggaagtgcccactgaccaaacgaattccgggtcgtcggcacattttaacgcggtgacgcgactgtcctcgtaataggcaccctcacagagatcgtcggagaaagcgacgtccaacacgcgagtcgcggccaacagcggcgacctgcgaaatttaagaggaaaagcaaactaaagaaattggcaaaagaccaaagcaccaacctcaaaaatggtctcaaaaatccgttgatgaataatcggaagggccaaaaaacatttcggtacaatttgccaggcacaacgccgggatggacactgacaacggcgattttactctgtcgaattctaaaatacggcataaaatagaaaacgaatctaaaatactttaaaacatggctcaaatgtttgacgtaaatgccgagcaacaattttgagtcggcgtacgatttatagtcgttgatgcgacggcaccaaaacttttctaaaaaaatctcggtgaaattaaattaaaataattcaagcgggtaaatttcattttttaatttgttaaataatgatgccatttgcccttcattcgccgtgccttcgttctccaaaagtagtgacagttcgccggcatgcgcagtgcacgaggaaaggaaaacggcgcggggcgaacggaagcgactgcactccaaccgaccggcaaaggaggcgaaaagctgcgcatttgccagcacattcaccgcgagatggggctcaatgatggaacagccgaagcgaccgatgcgaaagggaagccaaccaaaaagagagggggggggggaagaagtaaatgtgggaaaagcgaaagcaccggcatccggacaaagcatcatcgccgcattcagcaccaaaaggtcgacgtgggaacagcaaagcaaaacggactcaaccgcctcgaaaacctaaaaatggagacacattatcattttggatgcaaatataattcagactattaaaatgaaatatccaaggcaattttagttataacgcataaatctgtctaagcgatttgtgagacaataaacaaaaggtatgctaataaaactacgccaccaaaaatctaaaatgtttctgaataataaactgttgccatggcggatacaaacaaataatgcacctttcctttggtgtgagaaaacaaaggcagttaaacagttcattttcgatactaggaaattaaaaattaagctcgcctgatttttgtcgctcagatcacacgaaacaaaaagcatctgatcagaggccaattgaggagcattcattccgatgacaaacacaaaaaaatccaatgagagcaaatagtcgagaatctgaagaggcaaaaaaaccaaaaaatattttttatttatggaattctgtttaatgatgaagacgaaatagcactcgcctcacttccaattgtcccatcgcctcccgtcaaaactgcaactagtgaatttttttgctggtcattttgttgaacttcttcgccttcattcctcttgggtttgcgttcaatatctacaggtaattgcaacagacttttcttccattctgccacttagaaggaaaaaaatgtttttggaacaaatttcagatt

SEQ ID NO: 23322 - DNA, 2206 bp, Heterodera glycines
  unsure (1)..(2206): unsure at all n locations
tttaatttttgatattttttaaatataattttttaaattttattttaatttttattaatttttaaatttattttcttaagtttattttagtttttaataatttaaatataaataattttcttaattttattttaattttaacaattattaaatataattttattattttaatttttaatttttaataatttacctttccaatttgtcaatgccaatgggatttgcttcaaatatttttttgcatccaaaagccctgtcaatttctttcttgacaacccttcaccaccattatcagcagcaacaacaacaatagcttttgattcatccgagttttcaaaaatttaataatcaaaattaaaatttttccaaaatatatttttttaattttctgttttttaagaactaaagtttaaatttttgaaaattatatgagaacaaatggcaaattaagaagggaaaattatatacaaaaatatgtaaatacaaattttaatagtaattttggacgataaagtaataaaaagcataaaacatgtaaaagatgctgcaaaaaagaaatattcaataaaaatttattttgacagtttttcaattttgattttttgggaatatttttcatattttttttttttgcaatataatattcttgcactctcaaaagttgccgaataaaaaaaggtgccaaaaagtgggaaaatatgcacaaaatataaacatattttttaagtagaaaaatttctaaatatataaaaattatattctatgggaactttgttttacactatgacaaaaaatgccaatgggtaaaaataataaataaatttaccctttgtttccaaactgcccgaatttgtgccaatgtcggattccgatgccacggatgatctgttgcttctggattttttgatccctcctgtttttaaaattttataaattttctttttgtttttctttttattttttggcaccggcacagcttggcaatgccggcggcatttgcttcaaatatttttttgtatccaaaagagcggacaatttattttttggcgcttcttcgccgctaccaccagcagcagcagcatttgattcgttcgtatcttctaaatacggggaaaaaaaatttgattttatggcaaaataagtcggacttttagtctggaaatttattttttttgagtcgaatatattttcttggcttatttatattttattgaattttttatttattaattttttgtcattattaaaacttcaaaatttgtccaaagtaaagccctgaaacccgaataatggcaaaaatatttgtctgttgattattactgtaaaaatgccaaaatttaaagttgaattcatttaccctgtttttcagtattgctagagttggttgtgcccaagtcggattccgatgccgttgatgaattattcttattgcttttggagtaagcaatgccggccaatgtctcacacaaaaaataggcaaaaaatgcgcaaatggcaaagtcggctctcatttaattttggataaaaactagtctttaaacatgcaatacatattattctcaagtctttttagctttttttagtcaacaaagttttttaagttatttaaatttatttagaaatgaacaaaaaaaaaattgtttaataattttgaggagaatttgaaaatttaaattgtatttattatgaagtaataaaagaaataagaatatttatttatttttcttcacttttctgacaaatccaatcaatttcttatacaatttattgatggaatgacgacaatttgtaaacatttacgtaacattttttaattaaaaaataattaattgcccggaattccgcttttaaaaaatttagaaatatttttttacagttatctattacaacaatcttccccctttttttactttgagcctttccgaggtgctgttatcagccgattatgtgtcatcaaattcgtgtgagccgaacctaaaatgaacataacttaactcaaacttaatcaaattaaccaatcttggtattaaacgatagctctacgtgtcttctattgttatgccagaaggaagcggagtgtgggagaaagtgggaaaaggagcgcccgtagctcagtcagagcacggcacggattgctgnggtcatgtgttcgagtcccaccggcgagttacctttatattctgctctgggtggatccctgcacact

SEQ ID NO: 23323 - DNA, 1910 bp, Heterodera glycines
atgaggatccggagagcattcgacagttttgtcaggcgcactttttgctgaaggccaaaatgagtccccgtcggactgtttttgtttgcaaatttaataggtgaacaatggaaatttgaccataaattgggcaatttaaaatattgtttgattgatctttagccttaagtaaagcgacactttccgggtcttttttgtcgctgatcaaaaaatggccaattccgggcccgaattcgaacaaaaagacgaaattggcaatctttcggttcattggtcccgatttttttttaataaaattttggaaacacatttctaaagctaatttgagccgctgtgtacgaatctgaccaccttttgaccaacttcaaatcccggacccgaattcgaacattttttaaattttaatttcatcaaatacgcctaatgtccgggaaaacgcaccaattgttgcccagttatttggacgaattatatgtatgtggcggcgatagattaactgaaaaaagacactggcatcgtttgataaaatattggatcatatttcagaatttacctcgtcaatgcttattcttaggcgtatttgaggaaattgaaatttttgaatttaaaaaaaaaaatcgggaccaacgaaccgtaagattgcctcgaaattctatttgatttcgaccttttattttaatccgtgcatttgttcaaatttagcagaatgaattccataggcgtggtcagcgaacacggaaactcgcgggaaaacacgacattcaaattagacaattttatgccaaaagggagggagggtcgtgagaattttattttcaggggtccggcggtgccgattggcgccatcgggataaattttttaatgattttttaaaagaaaatgtatttggaatttcactaactttctcccctttcatcccttagccggcgacccgccccccgcccacctctttcacaccggcccccctcactgcgaagggatcccccattttgggggcctttgcgggcgaaagagggtgggagggttggggctacccgactttttgggacaaaatgacattttgatgattttaaaaataaaattttattaataaaacaaaaaaaaagaatgctactttctatctgttgagtccggaaacagagttaattttaaatatttttatttttcacaaatggaaattaactttggtaactttgggctggctgaatacttaattattaattatttataatatttttttccattaaaatcctaaaatgtcggattccctaagtgtcgagtccccaaatttcaaaccaaaaagtcgcgccacgatgggtcgatctccccttattttttgcttgtcgaaatcctttgcttatttttgaaaaattagtccaatcccgtcgtggtaaattttactgtttttagcgagaattagttttttagtttttcgccaattgccaattttgttgaatcttttgttcctgcacagacgcagttccattcgtgccattgtccggtgcccttatcgtgccgtgtttgtggcggaacgatgcgcgatgttcgctcttcagtcgcacaaccatccgccgccggatgaggagggcaacgacaccacggcaaacgaagccgctggctgtttcctgccatgccaaccgcagcagcagctacaacagcatattattgtgacagaggggaaggggggtgtctcgggacattttgcatacgaaggtccaacttttttctccggcggcgacccttttttcaacccatctttttttgcgcaggggcgtccggcggtgccgataggcatcgccgggggaaaaatttataatttttgatggaaattgttaaggagtttgttaaaatttaaaatttcttcctcttttcccccctttcggtacagtgcaccccgccaacccccctc

SEQ ID NO: 23324 - DNA, 1407 bp, Heterodera glycines
tggaattttttttcagcgcatttgatcgtgaaaatttggaaaaaaggctttctctttttttggtctacagtcaagggaattccaaccgcactctcagcataagacgccgatactaattgttctggaattattttctcagcgcatttgatcgtgaaaattttggaaaaatggctatctctttttctggtctacagtcaagggaattccaaccgcactctcagcataatgacgccgatactaattgttctggaattattttctcagcgcatttgatcgtgaaaattttggaaaaatggctatctctttttctggctacagtcaagggaattccaaccgcactctcagcataatgacgccgatactaattgttctggaatttttttctcagcgcatttgatcgtgaaaattttggaaaactggctatctctttttctggtctacagtcaagggaattccaaccgcattctcagcataatgacgccgatactaattgttctggaatttttttctcagcgcatttgatcgtgaaaaatttggaaaaatggctatctctttttctggtctacagtcaagggaattccaaccgcattctcagcataatgacgccgatactaattgttctggaatttttttctcagcgcatttgatcgtgaaaattttggaaaaatggctatctctttttctggtctacagtcaagggaattccaaccgcactctcagcataatgacgccgatactaattgttctggaatttttttctcagcgcatttgatcgtgaaaattttggaaaaatggctatctctttttctggtctacagtcaagggaattccaaccgcattctcagcataatgacgccgatagaaaaaaaccgcggccgcgcattcttttctccgcggatcgcggatcgcgaatttattaaaaatttttccaatttttaaccattaaaaaaaaatttttttttggggggggggggcccggaataagcaattcgtaacctcagcgcattttttttacggcgaatgtttccaaaaagttttgtccagcggtgccggtaggcgccgccgggaaaattttttaatttttaatgcgatttgttaacagatttttgtccaaaatgaccaaattttgccacaaagctatattttcttcgtaaaatatcgatattctgacaaaaaatttcaaaagtatcttgctttttacataaaaaatacttatttttaaattatatgtattaaaaataaaaaacaatcgcttcgaaaaataattttttaaattagtccaaaattgcggcggagtctcaaattccgcgcatcgcgcaaaaaaaaaaccgcgcccgagcatttaatttgccgcggatcgcgcaaaaaaaatgccgcgaatcgcacatcgcggcgcggccccagccc

SEQ ID NO: 23325 - DNA, 653 bp, Heterodera glycines
ctcttattatctgttctcttttccacacactctcactgtctccctttttttctctagtcagttctctaattgtctgttctcttttccacacactctcactgtcttccttttttctctaaattgtttttctctagtcagttctctaattgtctgtttaattttccacacactctcgctgtctcccttttttctctaatttagttttgtcgttttagcgtgcccacttttccactattgcattgatttaagcaaaaaattctataattctgtttaaaaaaaacaatattttataaaatttaattaaattattttttaattttaattttctaaaaaatatatttaagagaaataaggcaacgttcaaattaaattattttttctttttaaaggactccctgctgttgctggacggctcacctcctccgaccaactcgtcgtcggacaattccgcgtccgccgatgagtccgaaactgaggctcagttggccgagcagcaagaatgcctggaacgcccccactgctttgtgaaggtgaagaaccgcacaaaggagttcatcggatgtaccagcatgagcgaagcattccaccggttggacttggccagggcaatcaaagacatccgacgcttcaattacatatgcaaagtgaggagg

SEQ ID NO: 23326 - DNA, 1241 bp, Heterodera glycines
  unsure (1)..(1241): unsure at all n locations
taatgtaaaaattgaaaaatctaataaattggaagcccttagaggggggccggngnaaaacaggggaggggaggggacttgccgcgacgnaggaaaannnnaaaannngaataaatttttaaacaaaattcattaaaaattccaaaatttctccccggcgtcgccttcgtcaccccccccccctgttgcctaaaaattttctggaaaaaatgagccgcaaaaaaatggtttgaaaaataaaaaagaaggacaccgatttacatggccggacctcttctcaaaactcccgctcgacctccctcccacctgagactccaaaaatttcggtagcccccccctcccccgttttttcacatatgtcatccatataaattgcatccatactctctaattatataaaattttaatttttacacattttgccttttcagcatcaccttcctggacatgccaaaggaggtgcttcgacaaatcttggccaaactgcccgaccacgtgtccatgttggaagtggccaaggccaacgagacattccaagcactggtcgactgtgagcagaagcaatggcgaagcctgtgcatgtgccacttcacacaagcacaaattgacaaacacaaggcgggaaatggggaaacattttttttgacaaattttaattaatttgaaattaataaataaaagcgggggggggggggggaaattatagggccctaaaaattcaaattaataacgtccggcatctatcgggcaccaggggtgggatgcacactaaaaatgtcgcggtcggcatttttgcaaaattttcatttacctccaaaaaatgaaaaatagacaaaatttgattaatgaaaattataattattaatacaattaattttcagagtttcgacccattcacatggcgtcaactgtttttttcgctcaaaaaatactacgggctcaaagaagtttatgcggatctcattcacatttgttgccattgcaaggctttattttggaaggtgcctttttagcaaataatattaaattaattttgaattttatattttaaaacattatttaaggaccatggccatccgtgtgtttccaaggaaactgctccatccgtgcgggtaactccacaacaatttgttgacagtaagcaattcatacattatttttaaacaattatttaaattaaaataattatttatttagtgcaattatttctctgatcgaacaacgaaaaaacaattaaaaca

SEQ ID NO: 23327 - DNA, 1398 bp, Heterodera glycines
caggacaataattcgtaaggagttaatcttagttacccgtaattgaataattttgtcattataaatatgtaatgtgtcaaaaaaaattccattattagtcaatccattttctagtcaaatcccactggcggagcttcgtagtccttcggcatattgttgctgaaattattttaaaaattttaaaatgctttttaattagctaattttttcaaaatttatataataaagctaaatttttataaaacttttgtcccacccattgtaaattttccactgtattattaaaatcactgttctttttttgaacccacatgcactgttccggcttcgtcgccccacacttttggcatgcaatggcacagttttgtgccatccaatgcgggttccgctgacattcgttcggcgtgccaacagccttttcatggtaatgggcccatctttggcattccgaataaagattttgacaacctgaaacttttgttataggtaattctgtccacacatttatttgggcatgcgaaattgagtgcccagcccttgctggacacgtgtcgtgccattctttcccacttgcccggtttgccctgctctggatggggtcggcacccgtcgaaacggcactgggccgggcaccacgtgttcatgaagcgcggtgcggtgcggcacgcatcgctggccgcccagtgggcacagcactcgtgtgtgtcgtggcagacgcgctcctcctccagcgatggggaagactaatgaaaaaccaaattatagtaaatttgatatttccgtgtttttccaatttgggaaaatggaaagccggcggaatcaattggcacatcgccggaaaaaattggaataaatacgaaatcgaaaaattcggcatcggaaacgaaactttttgacggactgaaaaagaaacataaaaatgtacgaaaaggggggaggacactagaattttttcaaaaaaaatcttaggaatttttttaatttttcgggggggggggggggggtgggacgacctgctccgtcaggtacggtacgaaggtaaaaatcttcatgtacacaggtgccgtttcattttttacttacagtaggcaatggagtggtcaacagcacgccccaggcagacgctgttgccttctcggtggcggaggtggcacgcggcggcatcggaatggtttcgactacggtgggatattggtggtaggcgtactgtggcagcagatgttgaggctgctacagaattttggtaaataaatcacatcaatcatttaccggatagttttttaaagaaaagttcgaaaaactagaaatttttttataaggaagtttcaggaaaaaatttttgaaaattttttcagtgaattttaagaaaattttgagaaaaacagtaatcatcataaa

SEQ ID NO: 23328 - DNA, 1212 bp, Heterodera glycines
agtatcgtttctattagggaaataatgacaaggatttcgggttaaaacggggtttgatcttttttagcgctttttaggtatacatttgagacattggggcaggacaagaaaagaatgaagttgatgcctcatgaaactcggattggacacgttttgtcgaaaatatccttacataatatcataaaaaatacaaataattcaacccacctattctatgaccacattctgaaaaaaatcccagaaatacgaggaaagatatgcttggtcacaataaaataaaaaatggctagtatgtaaaatttgcggtcaaataaaataaaaattggctaatatgtaaaattggcgtccagaaatttttagactaatccgaagcaaagcacgaatgaattaaagaggcgaaagaattcacagtatcgtttctaatagggaaatattgacaggatattcggctaaaaacgggtttgatcatttttagcgcatttttaggtatacatttgagacaattgggcaggacaagaaaagaatgaagttgatgcctcatgaaactcggaattggttatgtttagtcgaaaatatccttacataatactcataaaaaatacaaataattcaacccacctattctatgaccacattctgaaaaaaatcccagaaatacgaggaaagatatgcttggtcacaataaaataaaaaatggctagtatgtaaaaatttgcggtcactaataaaataaaaaatggctaatatgtaaaattggcgtccagaaatttttagactaatccgaagcaaagcacgaatgaattaaagaggcgaaagaattcacagtatcgtttctaatagggaaatattgacaggatattcggctaaaaacgggtttgatcatttttagcgcatttttaggtatacatttgagacaattgggcaggacaagaaaagaatgaagttgatgcctcatgaaactcggaattggttatgtttagtcgaaaatatgcttacataatactcataaaaaatacaaataattcaacccacctattctatgaccacattctgaaaaaaatcccagaaatacgaggaaagatatgcttggtcacaataaaataaaaaatggctagtatgtaaaaatttgcggtcactaataaaataaaaaatggctaatatgtaaaattggcgtccagaaatttttagactaatccgaagcaaagcacgaat

SEQ ID NO: 23329 - DNA, 1396 bp, Heterodera glycines
cgatcagcaaatgtcaaaatttcaaatattttcattctttaatgtaaatttcaaattaaagaaagcaataaaaaggactctgatagtgtgataaagtgataggattaagtgaaagatgtgagtttaattacttcaattcatttaatttgtatttgatgaataaatatttttcgcagataatttaacgttgggtgctttttcttattttgaatttttaggggtttttctttctttttttttgccccaatttggaaaaattttcgagattttgttgagaaatatgcaaaaaaaaagaagaaaaaataataccatcttatccgatcagcaaactttgtgaagaaacggcacagaaaaagccaagaaatgaatgaatcatccattcacgtacacaaatgtgtaaattcattcataaaacaaacaaaaatggagttgaaaagggaaagaatgaagaaagaaagcatttgtctccataaaagtgtttagccatgagatttaggcacacatttggcgaaaagtctttcactattaaatgccaaaatcagtcgacaaaatgcaacccttattttattatttaaataatttttattaaaattatttatttttactgttcttggtgtggtaatgttgtgcaaatttttagtcatttcatactttggcatttttctattgtaaaaacagaaacattttgcgcaatgctttttcctcaattctttctttcatttttgttcattttgttattagcggacggaatggcgcaacaatcgaacaaagtgacagggccaaggcaacaatttatcattcaattaattaattatttttaatttgatttcaaatgctaaatgctacacattttgcatttgcatttcaggtgcttttcctgtgcgtcgtcggcactcaaatcgcaatggcaagtgaccggtaggtaaatgtaccgtattatctctaattattaggaagcaacttttagtgacgaaaaaccccaaaatagttaactaaaatagtgagtagaaatgccaaaatagtgaagaatagtgacaaaacgtccgaaaaagtgacaaatagtcacataattttcagccaaaaattgagcaaaaataatttttattcactgattgcagttgcaaatgagtaggactgggatttgtaagaccaaaaaacccaaaagagttacctaaaaaaaattttttaaattaaaaatttttgccaagaaagtaaatttttgagaaaatttttttttcatttcataggagtatattttgaaaaatcttagctcgattcttaggggtgtatttttttgaaatttttttaggtcgattcttatgggtgtattttttggttttattgcatttttgttaaggaattttccaaaaaatgtcgaaatagtgacaaaacccca

SEQ ID NO: 23330 - DNA, 914 bp, Heterodera glycines
ggattttttctcccccaaaatttgtttgagtccccccaaacgatccggaatagctccctaatagcctgtcttttattttgcgtgggattttgcccccccataattgtttgagtcccccaaacgggcccctgaaaaaaaacgttttttttgtttttgggggcagtccccccgaaccgatgcgcccagatttatggggagaccgaatccttcgggaatagcttccctatagcctgtactttaattctgcgtgggatttttgctccccataattgtttgagtaccccaaacggacacttgaaaaaatcgatttttttgttttcggggcagtccccccgaaccgatgcgcccagatttatggggagaccgaatccttccggaatagcttccctatagcctgtactttaattctgcgttggatttttgctccccataattgtttgagtaccccaaacggacacttgaaaaaatcgatttttttgttttcggggcagtccccccgaaccgatgcgcccagatttatggggagaccgaatccttcgggaatagcttccctatagcctgtactttaattctgcgttggatttttgctccccataattgtttgagtaccccaaacggacacttgaaaaaatcgatttttttgttttcggggcagtccccccgaaccgatgcgcccagatttatggggagaccgaatccttcgggaatagcttccctatagcctgtactttaattctgcgttggatttttgctccccataattgtttgagtaccccaaacggacacttgaaaaaatcgatttttttgttttcggggcagtccccccgaaccgatgcgcccagatttatggggagaccgaatccttcgggaatagcttccctatagcctgtactttaattctgcgttggattttt

SEQ ID NO: 23331 - DNA, 663 bp, Heterodera glycines
ctcatttgccccccaccaacagggctccgatcactcatttgttcagcgacttcggtggcactcacgacgatctcttgactttccgttgcgcctttttttcctgtccatggcgaccaattccatgagtttacatcacttcgattaggtgcacagagaattggagcgtcagaccaaaatgggcacagtgacccttgtgttggtgggcaaaacggtcaacggcaaatcgtacagtgatctacgctatccacctttacgcacatttttatttcttccccccccccctcaacattttgctctttttcttccccccctcccctcaacattttgctctttttcttcccctcccctcccctccactcaacattttgatttacaaggtagtattaaggttagtttatttttgatcattatgaaaaaattatattggaattttgaacgaacaaataattatagggggggggggggtgtaatttttttaaatatgtaattgtttctgttgcagtatttttcaaaattggatgagctcccagcacttgaagacgcctgccttctcgaatccgctttcaagagagctgtaaaagtgtgactaatgcagttgggggaaacgatggtaattaaaatatcgaattaataaaaaactgaggggagggggggggggaagaa

SEQ ID NO: 23332 - DNA, 1862 bp, Heterodera glycines
gttgggcgccagcacaggtttttccactataacttttttctttctcatccaaatccaacaatcttggtatcattcgaaagctcttcagatgctctactagcctgcaaaattccgaaaaattttgttaattttgaaccaatttatggccaaaaaaaaatttggttttttgaattcttctggctataacttttttgaacctaaactaatttttttaaaattttgcaggctaatattcgggacaagtaaaaaaaaatccacttttatttccatggcttttttcgtagcccagggatttttacaatttttgaaaaattttatttaggattatatttgcttgctttataaaaatccttacaatctgtaatttttacaacaaaactaaaaatttacagctcgcgctccttgacatccacaggcagaccggagacgaacaaagtgcgaacctgaaaaatcgtaaaatttttcactgaaattcattcataattttcattatttctgaattttcaatttcctataaattgcattaatcttagaatttatcgctttttaacatagaagctctgaactctcctagaaaaatgcataaaattttcgaatatctcatcatttcttgaaaaaaaaaacaattttttttttcaattacacgacaactctcaattttgctaattcccattaaatttttcgtaaaacgtccctgcccgtgtctttagcattgacaatttgtctgtctttttttccagtgccattaatacgcggcgcacctgtgcttgcgcatcgccaccgcccgccacgcttccaccactgccaccgccgttggtggcggacgcggacgagtcaagcgactccatggaaacggcattgaccaacattgtcgtcttggcgcttccaccaccaccaccactgttgttattgctgttcattgttgttgtcgatgatgccattgtttggtgggtggtgccgttggtgaaaaaacagtcatcattgctgctggtgctgttactttttgtcattcgttgttgctgttgcagttttgttgtcaccaaacacgtaggtatttaaccaccaatttgtgtgtgtgtgtgtttattatgcgtgtggtgtgttgtttttgtgccgtttttttggggggggggggttaaatttttgggtggccaagaaaaaaaaaatttgtgctccggcagaaaaatttattgtgcaacaacaattttttttgtgatgtgatgatgtggtgtgccgagatcagaaaaaaaaaagaaatcaaatttaattgctaaaatatcaaatgtcaactcaaagcattttgatgtgttcgttggtgagtgggtgggtgaattgaatggtttagcaaaatgacacaatgcacaaaacatagggaaaaaaacaatggtccactaaatcagggatgctctgggtcgagaaaaaaaagtcggatttcgtgtctcggtaatccggaacatctctacgccatatagaaatgctcgtatgaaataaaaatttcaggaaacgtggaagaacaatagtgaaaattgagcaatggtaaaaattgcggtccctaatttaatgtttttattttgtatttaagatcagtttacggggggttttcgaacgctctgatcacgaactgaattcagctttccccaattccgaactccggattcgaactcgaataaaaaatcaaaacaaaaaaaaattagggaccacaaattctttatcaatacgaaaaattggaaataatgaaattgtagcaataaaaatatttttggaaaaaaaaatttttttttttttgtttcaggcgcgggggggggcggttttagtgcgaatttaatgctggacaataaaaaatgcgaaggaaaggacacggc

SEQ ID NO: 23333 - DNA, 1104 bp, Heterodera glycines
tagagcatttttcatggtatttcaagaaaattgtgcaatgtgggcgacccggaacattttagacagtttccaaaccaaacactcatagtaaaaaattatttcgttagaatacgagaaataatttgaaacgaaacactggttactaatttgcatatatctctgcgaaaattccagatccaaaaaaatcagctataccattcgaaagctgctttcaggcgctctcagaaaacagtaaaaacgctcctattcatgcactaggcgctgagatatatgcacttgactttctgcatataattgccattctccgcagcaaacttcgcgttctcaagcgtgaatagttaatttttttgtgctgaactgtgttagggttctccttgcagtgcgctcaactaagtctcttggagttagagcatttttcatggtattttcaagaaaattgtgcaatgtgggcgacccggaacattttagacagtttccaaaccaaacactcatagtaaaaaattatttcgttagaatacgagaaataatttgaaacgaaacactggttactaatttgcatatatctctgcgaaaattccagatccaaaaaaatcagctataccattcgaaagctgctttcaggcgctctcagaaaacagtaaaaacgctcctattcatgcactaggcgctgagatatatgcacttgactttctgcatataattgccattctccgcagcaaacttcgcgttctcaagcgtgaatagttaatttttttgtgctgaactgtgttagggttctccttgcagtgcgctcaactaagtctcttggagttagagcatttttcatggtattttcaagaaaattgtgcaatgtgggcgacccggaacattttagacagtttccaaaccaaacactcatagtaaaaaattatttcgttagaatacgagaaataatttgaaacgaaacactggttactaatttgcatatatctctgcgaaaattccagatccaaaaaaatcagctataccattcgaaagctgctttcaggcgctctcagaaaacagtaaaaacgctcctattcatgcactacgcgctgagatatatgcacttgactttctgcatat

SEQ ID NO: 23334 - DNA, 3007 bp, Heterodera glycines
tttaaattttcaatgatagggcaacgccgaattttgtctttgcgatttataatatttaacttacaggctataataattactttaaatttggcattttctacctttttgatcaggcacttttttggcgtgacaagtcttcttacttcatcctccgcttctgctaacaccgcatcttcattaccttccgttatatcggcaatcttaattttaatatttaaacaaaattagcttccaaatatcaaaagtctaattgtaagagattagtttgaggcacatgttttttttgttgcaaaatgcatattacgatttacgcactaaaaataatttatttcaagagttgtttcgaaagaattttaggcaaataaaaatcacggagtttaaaaaggctggttttttcatttcgtactgaaccggttcctagccatttgctcttcaaaatctctgatgcaataagaaatttttaaaatagggttaagacataaaataattcaatatttagcccaataatgcatttgaaaattcatctgctgcatttaacataccgatgtaaattcactcgcatattctaaaaaccaatagcatatgatatggcctgattcgtgcacgctgtcgcggctcgtgccattcgtatgttggtttttttcaaaatccattgcctcgctgaactctctgtttctgttccatcgcttgatagctgcacatcttgcatgtctcgttttgttcaattttttctgaattgaaactatatttatgtaataatcatatggaatagtgaatgaaataaacttggttcggagcgtgattgtgtggtgcggtttcatgaagcgttctcgatcgaccttcagactcagctctcccgtcacaatttcgtgtcgtacacgcccatacctgctcaaattgttttttaaacaaatgcttcatactcaaattgttttttaaatatttaattacttgaatattcccatttggtcttccctgcttttgcattctgtatccattaaaatagattattctttcattgtaagaaatgacatctgtcacttgcagaaacagaattattatgaaaaaaaagtcaagtccggtgctcaggtgcctgatcgaatggcttggagccggacgatttcggtgcaaaaatacttgggccattgtgccaaaatagatttattgatttaacctataattaattacaaagttggaatcagttattttttgacaaaacttattattagctcaaacataaaatttcggactggaaaaaattccgccagtttattttaaaaaaactcggcctaaatattttgcaaaggtcagaaatggttagatacggcaaaatcttggttaggtttaatgaataatataagtgatcggttgccagtggaatgtgacaaaacctaatttccaccgctttaaataggcacaacaaaggccagatgaaaccaaataggagttgttacacaaaagaatatgattgttgtaatcattttgttgacaatttgttcattttggttttagcttcgaccatcgttaaaattattacatttttcttcacaggaaacgatttatttttgccatcaaattgtgcgcaaaagcactggtttagacctgttcactcatttcattttttccccgtcccaaatttgcgcaaaagcactggtttttgctgtctttacatttaattttggccgtcacaaaattgcaaaaaattatttttcattttacgcaaaaaataatgcaaacaatatgtgatagaaatataaaaaatcatataaaattaaatagatatatttttaattttcattttttaaaatgctacctaaatccatgatgccatttagtcccgccgggaccgggactggcaaaaccgggactgggattcctgtttttccaaaaaccgggaccgggaccgggaattgttaaataatggaaatatttaaattattttaaacatattatcgttattatcgttaataattaataggtatttaaaatgaaatttaatcaattcaccaaatcatatttttttgaatcttttcttctttcttgcttaactttttattttatcttattaagtttttcaataattatttttctttttctctgttctttctttcttttttctttaatattttcttcgtctttttctgcccattttctccaaatatctcatcaaatgattttatttcaattttttcttttctgagccaatttttatttatttggatggacaaacaccaaattaaaatcatgcagtgtaatccaatctattactattcatgaaaaatcagagctttcaattgaaaatttcaaaattgcaaaagcatgttttaacagatgttgaccaaaaaatgaccagcgaaaaacaaacggagcggcaaaaccctcgcccgtcaaaccaatgccccagggcaaaagtgacaggggcagcgaaccgccaccccgccagcgcaaaaagaaaaataacgaaaaaaattgttataaaattttaaaaaccgggctttttataatattaaatattaaatcattgcatcgcccaaggcactgaaacagcaaatttagtagcaaatgcattaaaaatcctaccattaaaatttggattggtgggtattcaatttaagttaaaaatttattttctgaaaattcttgtaaaagccttatttaaattaaacaatcaattaaaatgagaaaagtctcattttaaaagttttatttaaattaaacaaccaattaaaataatcaaattttgaattttccatcacccatagttgcttttctctcagttttcaaaaataattttgattattctttgcttttttatgtgaataaatgcataaataattatgcaattttactccgtaattggccaactcacaaaccagcaaaagcaatggctaaagagtgtcttagctatttttagaataaaagcaaaagacaaagtcaacagtggatcaaatggccaaaagtggccacatttcgcgaagtgattgtgttcaaaaaaaagcggcattaa

SEQ ID NO: 23335 - DNA, 1680 bp, Heterodera glycines
cttaaggagtggtggaatgattgcctgttaaatttgaagtcaatcgtacaaggggtgagcgagttttggtgcgcgagtctcggtgtgcgcgagggggcggggcgtcgggacagtactgcttgaaatggtgcctgaggcgaaattctttcgccgttcagcttaggtggtggtgctatgacggcctgtgaaatttgaagtcaatcggacaagggctatgcgagttttagcgctcagacccccccccccagttctgtactttgctaaacgttaaaattttttttatcataatttaaattgcaaaaatgaaaaaaaaaaacatacgaaaatgataactgattggtcctcccttttcattgctgattctctgcgtattggcgcaaaatttcggcctcgcgttcggcgcgctgaagaagcgctgttcgattcgacggtgtccaaaaagaaacgaatctgaaaaaatgtgatgaaatttaaaaaatgctaaattgaaaaaaaaacaagcttacaattgtcgggtcttcacgccaccaattcaagagcaaatcctcttgagtctttttcgattttgtcatactgaagagagatttcattgtcagttttctctaattttgcatcattttgttgcgaaaaatattggtggttgtcgagggatatttttcatctcttccattactgtctcggcctcgctgggcgagaggtgaccgtgacttttaagccaccgaattaaaacgaaccaaaaaagcaaaaacacaggaaatgcaagaagataatgagaaaaaagcagtacatgcaaaagagtttcattaggctcttctggggaattcaaaatttgtatgtcaggttttgttgtgttggtgttattcattttaacattacataatattttttttatttatttatattttatccaagctttgagtcggtcacaatgtgccgattataatcaaccataatcatttggtcaaattcacccaagacaatcatctccacaccgccaagcggaattggtgaattgaatgtggcccgtacgtttgtcgtaccgcttctcatcagctcaaatccacagctgtcgtcaagcgtggatgtcaatggaatgacaaaaaaggtccaccctttcttgaactgggccattgaaatgtcaaatgaacgttccgagtttgccatgcccaatgcctcatacatgtcaacaaaggcgctgacaaagtgatcctttgaaaaattgtttataaggaacagctgggtaaactacgccacctgcatgtatcgaaatttcacgcaaatcaaacggctcaaagaggaagggactcaatttgtagtcaccatgaaatgctgagtttccaaccaactctattgtcacacgtcgaggaatggttgcgctgaagacattgtactcaaattcgtatcgaccaacactgatgaatgacgatttgatttcggttttgcgtactgcgtacgtcgcgggttgtttttcaagtgttttgtaaaggctcatgttcagggagggttggacctcaaccattttggcataaatcttgacatcgtgaactgtcaaacgatatttggttgcatcatttgcttttaaagtttgcaaaagaaagacatctttggctttgtaaattgtgaacagcaaatccaaattgttttaaagataaagctcctgggtttcccaatcaaagtcga

SEQ ID NO: 23336 - DNA, 965 bp, Heterodera glycines
ggttgccaacggcaacagagtgacgattcaaatcaatggatggggcaaatcgagagaaagtcatttaacatttataataattttaaatattaattcatgaaaaattcaatttatcaatgactcacttatttctcttcctcatttttctcctcttttcatttttctttactaacttcttttctctttctcttcctccttttccttctctttttcttccttcttttcctcctcactttgttcttccaattccaacgcaattctcacaatcggataggtcggattggtcaaatactgttcaggggcaaaattcgattttcggtctgtccgatttgtgcttacgtcgaactcctcgtcctgcaaattgtgcccttctcgtgcgcccattatcggcaccactcggctgtgaacgcccgcttgaatgctgacattcacctgacaacatttgctaattggttggccaacccaccgattgattgatggcctttgtttgctttgtcccctccctccatttccccgtccccatttttaattttttttattccccccccccctccatcgctccctcccctttccaccggccgaccattcgttcggcactttccattcgtgctgccaactcggccattttttccaactgctgcttttgcctctccaattcgtccaattcgcgcctccgttctcgcaagaattcggcgatgcttctcaacgacacatcgtacagagaattgggctgttttttgtccctggccaactccaaaaggttctcaatccattgccttttatttttcgattttcaattgtttattaattataatgacaaatcgacctgaaataatgcaattggctttggcctaattgtggtgggccgggcgcaattggccacggctgaatgcccaacggctgagcagttatgaccgcttcattcccttccgatatattgatcaatgtgataatccttatgctac

SEQ ID NO: 23337 - DNA, 1171 bp, Heterodera glycines
  unsure (1)..(1171): unsure at all n locations
tcttgcttcttccgtccgntctttcgttgcctttcggtttggtttgnttcttgctcngtttcgcttttggttttcgtttttcgtccggttccttttntgctgntggcctgctcggcttcttctcttcctttcgtctcctgttgntttcttgttttttccttgctttgtctgccgctcgttggttctttttctttcgggtctgtttcgttcctctgttgctctttttcttcgtttgcctcnctttccttttcggntttccgtctcatctgctgctctatttccgtttccttgtcagtttcttcttttgatttcattgcttcttcactcccccttttggcctgctgatcaatttcacctttcagtttggttagctgatcagtcccccttttcacctgatgatcagtttcttgtttggtcttcatttcctgatcagtctcccttttcatctgctgatcagtttttatttctttcttggtcttaatctgcggatcagttccccttttcatctgctgatcagtttctgtttcttccatgctcttcatttcctgatcagttccccttttcatctgctgatcagtctctgtttcttcattggtcttcctttcctgatcagtgccctttttcatcagctgatcagtttctgtttctttcttggtggtcttcgttttctgatcagtcccccttttcacctgctgatcagtttcttgtttggtgttcatttcctgatcaatctcacttttcacctgctgatcagtttctgtttcttctttggtcttcgtttcctggtcagtattttcctgctcattctctccgatttgttggattgtttgttttctcttctgctgcgtttgcttcttcattttttccttggaagatgatgttacttcttcgtttctgctgaatttgcatttttctctgtgtgtcactgtgttttcttatttgtttttacctctttccactctctccgtccattgctgtctttggtctttctctgtccctcttccccctccaaattgccacaactctttccacaattctctgccccctttttgacttctcttcctcttctttcgttgccttttcctccttttcgtccatttgtccttcagtttgtgtccgtttgtcccatttgatgatgtttaaatttgtccttctcacttcatcgaactgt

SEQ ID NO: 23338 - DNA, 2184 bp, Heterodera glycines
gctgaacgagcatttggcacccatcaaaacaacagcaacaccaccgattgactgacgcacagcaacaacaaaatccaatggccccttcaagcagtacaacaggtggaacgatatcgtcatccttgctgacgatgatgccaacttcagctactgcgcaacaacttttcacttctgctggtggttgtggtgactttcatcctgaaacaatttcgaccgtctcttcctcgtccacttttccaccattttcaccggcaacaacagaagctgatcagtttattaaagatctgccaactgatcaacgaaaacagcagcagcagaaacggcatctgaatcggctgtcaacaatgcttccgtttccgctcaaatggcctcataatgccagcaaatgaacaacgttcacacgggtagcggaatgccctcccaagaattccccgctttcgattaatcaacaggactatcctctatttcttctagtctgattatcgctgacttctagtctcttttcatataaatctaaatatattttgtcgcttttatggttaggtactttaaccttaagggacatactgtaatcgcccccgccccgaaaaaaacttaaacagaatttttaaaaattcaagaaactggctatttttcaatctttatgaagattacttgtttttgaaaaaaatttcttgaaacttcttattaataaaactaagatttttttttgaaaaataagtttcaaattttttgaatttttctggtgacaagctgtgagcggaacataatgactgcacccaaaaaagcactggtaagaattcgagacagctaaatattaaggaggtatgttgttgttcgaatgcaaaattttcagaatttctgacaccggtttttctgtttccggtcaatctggtcctggttttaacaaaaatcaaccgaacggtttcgtttaacacttaaatacaataacaaataaatgaataaatcggctagtctaacttcgtcactcacaaaaacccggtcttcgctatgaattccctcattagtaaatggccatttttatttgccttaaattttgataattggttaacaaatatattcccattaaccaatttccaatcgatttcttaatttgccttaaacaattataatttttcttatcattctgaacactactgtgaacattcgtttgattttatgttctgtttatttgtttgaaatttgtttggaataaatttatcattttttgctttttgggactctctttcatttttaattcttatggccatataattacattataattatcgggtctttcagctcccagtacctgttcaaaaaagtaaaagatcgctatcggattttcaattcgacggcaccggtactaaagaatcactggtaagaaaactgtagtccgtgcggaaaattattgaaaaaattgtggaaaatagaaaaaaaaacaatatttaatgtgcctgctgcggattgtgagccacaaatgtccgaaaatgccctagccttggccgtaacggattttaaatatgcaattgcaattttttgtttctcctaatgtcaaataaaagcaatttgctgcttccggccatggcaaaactcgtggccatttttctaccgactttggtcgtcgtcagcgcagcaactgtgcccattctgccacaacaattgctcagtgccaatgatcaaaattcaaattcattaccaaatttaacaaatgttcttgctgatgaaatttcgctgagtgccattgattgtgccgcgttgccaccggcactttggtgtaccaaatttgtccgttataaatgcggcaccagtaatttgtgcagaaagcatgacgatgccgtgcgttacaaaccgttgcacatcactttgctttacgaaagcttatgtggggttttattacatgcttttacatcagttaattaattaattaataggcgaaaattgattaaatcgatattttaaatttggttagcattcaaatgaccaataagctacagtacccctttaatatttaggccctttttgccaacggttcatcagagacacactgttcaatgtgtacaatcgcttcagaacacacattaaattggagctggtcccttatggaaacgcaaaaacagtgagcaaaaattttgtgttttaaatttatgccttttttaatttaagtgattttttcagaatggt

SEQ ID NO: 23339 - DNA, 2238 bp, Heterodera glycines
taacgcatttttgagttgtaaaattttattgttatacatagaatagaagaatttgcttttttaattttgtctttggattcttagttcttacaatttgagaaatgtctgcgagaccaaaggtttttttcgatgttatggttggcggaaaatcgacaggttataaactcggacaacaaatcgccctcattctctgttcaaaataggtttaggtcgaattgtgatggaattgtttagtgacatcgttccgaagactgccgaaaattttagggctctgtgtactggcgagaaagggatgggcaaaagtggtaattaaaaagtcttgaccgtgaccgttattgattttactttaggcaaaccgttgcactacaaagggtcgaagttccaccgcgtcattccgagtttcatgcttcaggtataaagttgtggcacttccgcgaaaaggaatccattaacggactccgttttcacattttagggtggcgattttactcgaggcaatgggaccggcggcgagtcgatctatggcaagtgttcggacgaaatgcgaatgaatcggtcctttaggcgagaaattccccgacgagaatttcaaagagaagcataccgtcccgggactattggtaacgtttctggaaatttaaggaatggaacactcgtagcccatgggccaaaaaagcgtcatttttcaacttatttttaaattcagtcgatggccaatgccggccccaacactaacggctcgcagtttttcatcaccacagtgaaaacggaggttggacgaaaggcgtatttagccattttcgagattcatttttaacacaaattaatctagcgaattcaagaaatactggaaaatgcctatacttggaaaattcttttttccgctctcctattcccggaaattgcttttgttattttcggtttagggtttttgatgattgttttcattgcagtggcttgacggcaaacacgtggtgtttgggcgagtcgttgagggcatggacgtggtgaagcaagtcgaagcccagggcaatcagagcggaaagacagcgaacgaagtttgcccatcctttcgctgttcatttcgccgtgactttgcctccattttcagattaccatcgccgattgtggccagctttcgtgaaagcgacaaatttgtgcatcgttacagctcagttttcgaaatattaggtattgttttctcagtttttggattctgttgttcaagctttggctcgttaatataataaaatatttttcatgtcccttaattctttaattttcgcctaaaagtaaatgaatgaatgaaatatcaaaactgacttttatgaagcaataaattatgaaaacaactgacagagagtcatcacattaatgggtaccaatctttgttaagaagtgtggggaatggtttcgcttaaggggggggggggatatgcaaaagcaatttggtaattgtgggttgaacaagcgaaacatgggaaggtctgtcccccgtggtcgtaagttttgtcgatggttcgtccgaatgtccgctgctatttgccgtcgctgttcgcctccaattcggtccattcgtccgactttggcttttggttgcggatgatcaccgacccgtcgtcctcgtcgctcccttccgactctcccaaaaacgccccctcccgcgcctcggagtgtccgttgcgcgtctccgcccggtcggcttcttttccggtgccgttgccttgcttttgctggtgtccttcggcattgtttgtttccgcttgtgcctccgtttgctgtgccaatgaatgccttcgatttgcccctcccctcccaattttacctggcgcccctccaattgcgcttcgttcgccctttccccttctccgatttcccctcggcccttttgcattttcggactgtccaaatttgccttaaaaagtgttcaggaggttccttttttatttctcctccgtttttacctcaacagaaccgccatgttcagaggcagaagtgatttggatgtgtggctgactgatcagctgattggcaccgattgtctcaccaaaactttgacgaatttcctcggctgtggccggacgagtgccatcatcggactgtctgggggaaatgccgttttcggcagaggagtgatgacttgggcggcgttccaaatcttccattcctgctacgccttcgtgtcccattttcgccgcttcattaacattctggtccaattcgcgtccactcgcttca

SEQ ID NO: 23340 - DNA, 3482 bp, Heterodera glycines
  unsure (1)..(3482): unsure at all n locations
tcccttgtctgtggtcttttgtctgtggtctttcgtctgtggtccctttgtcactgcaccatttcgtccatattttggatttttttgtccatataaatccgggccctataaattaaaattcaaaagtttaaataagcccgggacgtggattttcgatcaaaccggaattttttgcaagaaaaattcaaaaaatgaattaattattttttcaattgaaaataccatattgaaaagttaaatttttttaaaatgcgtcagtgatataaatattttaaaattaattctgtatcaaaactacatattggagtataaaagtaaatttatataggaagttcgttctgaattctgaaccttggacccgaattcaaacaaaaagtcgaaaatctaaatgttctaattattcgcgtccggggtttggaattggccgaaattgatatcggattcgttgatcagtgatctcgaaaacccagggaacttgtttttatgacattaaaattttcactgacgcctttccgggagcggataaatgtgatttgaaactaaaactctgccgttcacttctgaaattctcgaaacatcgtctaaatttccgaggaaaaaatcgaaaaatttttaacattcaaaatgctgccgatatttactttcgaggtattgttttactaaacccattttccactgacgcattttcgtgaaccaaatttttttaaattcattcagatttatgcaaaacaattttgataagaaggtcaattcgctctgactgatctgactaataatttccaccgaatttacttcgtaaattttcacaaacagaacattcgtcgggcaacatttggcatttcagtttctcacagtaattctcaataccatatccatagcttaattgaaaatacagagtaattaatatttaattattattatattaaataatttcagtgtcatcttcaccatggcacattgtttcctatgcattcacaacgtttgtgttgaacattgaccacattgtgctccatatagcactcatcgactgctttttccacttccttttcacttgctttgacggcacagcttaaattagcagtttaaaattaatttagcgattaatcatttggcttatgcaattactttttgtcggcaaaacatctcaatttcgactgtttgtcaaaggcacacactttggccgtgtcgtgccatttttggtccaatttcacaagcgtatggttgtcaagtgctgtgtgaattttaataatttattagtaagatgtatttaaaatgaaaaattgccataaagtcaaataatattcaaaatggtttcctctctctgtttagttaatttcaaattcaaaaagaattcgccaaataatttcactattagagcccgcccggacggaaccgggggcccgccgggattcccggccccggtcccctttttttggacaaaccaccggaaccggtagtgccggaaaaacggagttccctccgtccattttccaagtgccggatccagtcccggccatttcaaaatttcgggcctattcactaccatagagagggtccattcgctgtgcaacattttcgccgacactttttacgaatatttccaagaaatcattcgatgttattttaacatataattttgtgggcaaacaactaaaaattaaagcattaaaatttaaaaaatattaaaaattaacttaattgtttgaccaatttcgcattaacacaagaaagccaatcttttacaaaatttgtgaatttgtaaaaacacggcgcagttttgttcgggtccgcatgcttaaaaatttttttaaaataaataaaaatttaatacggacaaatctctccaaaaatttgtcaattttattcttcaatttcatctagaaaaataatcccaaaatttaataggctaaaatatttattcacacaattttaaaactaaggagagatttgttagcctgcaaaagttttaattcaaaaatattctttaatatttggcaattagtaccgcttttattaaatccgccttcacttcatcgtatgccacttcaaagcattttgccgtctcgtcaattagtactccaaaacattgattctgttcatcacaagaacactaaaatattgagaattaattagacaacaaaaaaaaaataaattttctttacttaattacctgacgatatatgcaatcgccggatccttcctgaacganaatgcgaggaagaacaaaatgtagattatcatttaactaaaaacaatttntaatttctatttcttaattgaacttatggccaatttttcatgaaattatcgctaataaataaacaaggaaatactaatttgtaacaaatgccacttttccatttaaaagaatttttcattgggaatttaagtaatgtcatgaaaaaagtaatatttgttaaatgtaagagttttaattatcatcatcaataggatgaggatttatatttataaaaaaataatcccgaaatatttaaataaatatttaagaaaaaatgccaaaatatttaagaaaatattgaccaaaaatgagaaatttggagcaacaaaacaaaaatttatcaaaatattgattaaaaaaatgcaaaataaagtctaaaatatttttttatatttatggatattgacgttaaaactaaacattttcggcggctaaaagtgatatttttcgtgcatttctcatcaaaataaagcagttatttaaataaacaaaaaccctcaccctaatcatcatcattgtattttaacttttaaaattttggataatttatgaaaaatgttaagggaaaaattttaatgaatttttcattggaacagaaaatgctaaaaaagcaatcatttttttacttcttgataatcattcgatgctccaagtgttctttaacctttttcgtcctcgccaggctctcgccgttgcgcttaaatactccgccggccgccgctctctccacccgcttatcaattagcggtgatcatacacaacgccatcaaccaacaaaaattatcatcaaatttgttccattttgccccaaaaagtgtcttcccaatggctcgctcctgtcgcggacaaattcgccatgtcaacgacatccaaagcgatggcgaagaaaaagcgattgttttacggcggtggaccaaatattcacctgctgttgcagcagaaaaatattacaaataaatgtgccccactcaaatcacgcgcggacttctttcgtagtctcgcgcacctactggccgccgtagtggaaatgcgctggcttttagcacataattaaaacctaaaccggaaattatgtaatgtttcaagttacaattattttaatggtttcatataatgttcttcggggttttgagccgtgttgcgatttttgcgccgcgacacttgcgacgcgaaatttgcgctgcggacatttgcgccacgacacttgcgccgccaagcaataatggacttttgggccgctcag

SEQ ID NO: 23341 - DNA, 981 bp, Heterodera glycines
cttcttcttcttctttttcttcttccgttggtggcaacaatggcctaaaattaattaaatattttatttttcgataaaattcaaatgctattgctgctgctcactcaatggatttatcgaaactccacagatcaaatctgatactgttcaaattggcactcggatttaagctgtctccccatttaattgctggcaccctcgccgtctccccaattgggcaccgttgcaacagccaattatacacatttacgtcgaattcgtcgatctcctgtttcagtgtcagcttttcattcgtccgtttgttcaccaattcaaatggttcagttggaattgtgttcacatgaaaataaagttgaatattgtaactgacagaagtggtggcactgataaatgtctaaacaaatttggaaaaacaaaaacaatttatagaaaatatggctagacacacctctttgaagttgttgacccattcgagattctgtggaccaaaataattattgcgatacaatcgcttcggttggccatttttgctcggagtgtgaagccatttgaccaaagcttggccagcagttgcatttggtccatcgtcagcaattccatcggggaacagttcattggaatcaattgaattcaattggtcaagaccagtgagaattgtcggcgagatcagacgacgcaaattgtcaaaggcatcgccactggtaaagcccaactggcgaatgcttttcgcaaaaaactcaaatttggtgcccattctgtcccaaattggcttgtttgaacggataaatgtgagcacagaatggtcaatgtagctgaaaagggggaacaatgatgaagatgaccaaccatattaattggtttctgtatagtttttgatctactgaatctgaaggaaacgaaaacggattttgtttggcagcgaatggtccggcaatggaaatcccacaaatttgccatcgatcgccacagacagtttcgctt

SEQ ID NO: 23342 - DNA, 1178 bp, Heterodera glycines
aaaatttttaaaatttattcacctcccttattgatagaaaaagcatcagagaatcttattaacttgtaaataaaatttggtgtgtttcagaaccctttctgaaaaaatatttatgaattaattttgcaaaaaataaataaaaacgaaagactcagatttccgaaaaattttttagagcaagctagctcggcgctcatttcagtgtaagttagtcctttaccggggagtatccctgcaaagtttagtatgcttctgctcaattagcaaaaaatatgagtgatcgaattttcactaaaaaagttaagcctaaattttttggcatatttaaaaagcaattaaaaaatttttaaaattttattcacctcccttattgatagaaaaagcatcagagaatcttattaacttgtaaataaaatttggtgtgtttcagaaccctttctgaaaaaatatttatgaattaattttgcaaaaaataaataaaaacgaaagactcagattttcgaaaaattttttagagcaagctagctcggcgctcatttcagtgtaagttagtcctttaccggggagtatccctgcaaagtttagtatgcttctgctcaattagcaaaaaatatgagtgatcgaattttcactaaaaaagttaagcctaaattttttggcatatttaaaaagcaattaaaaaatttttaaaattttattcacctccctttttgatagaaaaagcatcagagaatcttattaacttgtaaataaaatttggtgtgtttcagaaccctttctgaaaaaatatttatgaattaattttgcaaaaaataaataaaaacgaaagactcagatttccgaaaaattttttagagcaagctagctcggcgctcatttcagtgtaagttagtcctttaccggggagtatccctgtaaagtttggtatgcttctgctcaattagcaaaaaatatgagtgatcgaattttcactaaaaaagttaagcctaaattttttggcatatttaaaaagcaattaaaaaatttttaaaattttattcacctcactttttgatagaaaaagcatcagagaatcttattaacttgtaaataaaatttggtgtgtttcagacccctttctgaaaaaatatttatgaattaattttgcaaaaaataaataaaaacgaaagactcagatt

SEQ ID NO: 23343 - DNA, 1618 bp, Heterodera glycines
  unsure (1)..(1618): unsure at all n locations
ctttttatttattttttaataatattaaatttcacaaaatcaaacataaatgaatattttaatttgattttttggtgttgaaaatcaaatttaaataactgtttttcagttattttttaattattttaaacaataaatttttacttcatttccttcagaattcattcataagtgcccgttcaacttgaaaacaaacacaatggtgattttcatttttgtcatgaattttattttgtttttacaattctaatttttttttaactatttagaatcaataaatattaattttgaatattaatctgcaaatattaatatttcaattatatggattttgaagtcatttcttttgggtaacataaaattttttaatattcttttataataaaattaattattttgcgtttgtaagtagcatatatgaaataaaattattttattttgaagaattaaaaaaaaatttattctcacctaaataacatattttttaattttcaatttttaaaatagggtttccgtattttattaaaataatttatgcgtaaataaacttgtcaatattcctctcaagtccgtcgattttcttgttgattcttttactaatattcgaagaaaagagaaacatttgttatttgttgaaacacactttttaattgtacgtttttcattaataaagttttattgaatgtttagtatgattgattgctgctgcaagccattaactgataaaactcactaatttcccttagaagcgtaaaagcattctgtgtcgcaaccgtcgttcccggcaagtccaggaaaacctctatttccgtttcaacattatctgaatttctttttttaattttggttttgtaatgtatatgcgagcacactcgaaatctttattttattgattaaaaaatggtattataacaaaacattaattattaaattgtataacctaggctgataaaataagaaaattctaaataaaaaaatacaagttttataatattttcgccgatttatatatgtacaattgtaccttttttgttatgaactatttttcttgcattttcgaccagctaaatcttagtgaattaaattaatttaatttatttatttgattggcatttacggttttttttctcatatagatatttattttagataaaagaatcattaaatgtatgatgctttaaattatcaagccattctagagaattatattaattaaggaaattaattttttcttattttatataaaaatattattttatttcagaatcgttattgctaaactatttattttatagagttaattcgatgaaaatttttaatcataaaatatatcaattatatggattttgaagtcatttcttttgggtaacataaaattttttaatattcttttataataaaattaattattttgcgtttgtaagtagcatatatgaaataaaattattttattttgaagaattaatttagaccattttttaaaattaaattttcttggatttatgactctcagtaatttaatcagtttgtattacgtacgcttgctgngcagctttttcgatcaggtccacgtgcgacaacacatccanaggcagcagtagtgacgcagcccccactg

SEQ ID NO: 23344 - DNA, 1397 bp, Heterodera glycines
  unsure (1)..(1397): unsure at all n locations
ttttgaccctaacttttttgaaactcaataaaattttttgaaatttatcagaataatagagaaatcttttggctatctaactatataaacaaaattaaaattggttgtttcagaaaaaagttatgaaggaattaatagtgtcatatttttatggctatccaaaaaatgtatggtcgtttaaatgcatgaaattgtttaaagatcaattaattcacactgcactttatatgaaaagatagcccaaagatttctctattattttgctaaatttcaaaaaattttattgtttcaaaaaagttacggtaaaattgttgagcccaaacttttcgagcttttttgtttacaactttttgtaaatttctattaaatttttaaaaattacatacctccatttagaccatttcaatcccggacccgaattcgaaaattttcttaaaattcataaaaaatttgttgtagtgttgcttatgcattgatgctaagaaaataaatcgatgtcacgcattcacgagtagaacacataaacagcaacaaaatagtgacaaaaaggccgaaacagtgacgaatagtaagggcggggaccggtaaactggacaccagaaaattggacaccaagcggaaaactggtcaccgttggaattttggacaccgaaggaaaattggacaccggaaaactggacaccaagttcctaaaataaagccaggaattggggtgaaaaataaatttatgaagggtaaatggattaatgaattaaggcacttagactaaatcaggcattcaacatgcacgatgattgatcaatagtagagaccggaccgggccgggcccggtaccggtttttaccgggcccggaaaccggaaccggtgatttttggaaaaatccggtttgaccggtttttgagagaccgggcccggaaaccggtcgttttttaaaatgcaacccggcccggaaaccggccttttggaccggttttgaccggttttataatcaagccaaaaatgtttctttttgttcatttttctttgaaaatgtctttttggcataatgtttttaattttttttttgtcagtgttcaagttgaattttttaattctaatgtttgcttctagagtagagcgggaccgggaccaaaacacggacaactgagtacaactgagtaccgaggtcccggttttgaccggaccgggaccagtcccgggttttttcccggttttcccagccaaaaattcccggtttttcaacccgaaaaggtcccggtcccgggtttgcccaaaattcccggtcccgctctactctatttgcttctttataattatgaaataatgtcttttttgtttagattttatgcaaatgagtatgatttggcaaattggcctnnatttaaaaaaancgtcc

SEQ ID NO: 23345 - DNA, 2553 bp, Heterodera glycines
  unsure (1)..(2553): unsure at all n locations
cttgctttcattctcatttctcctccgctccttcatttttttcatttttccatttcctttttcaattttcaatttttctttttttagatgcaaaaacctactccttctaaccgccccaattcctctgtctccaaaacccttgcctgcgggcttgaaaaaattgtgaatttgagtggaaatgagccactctcggtgccggtgctggcggatcggagtgatccgctggggctcaagtcggtccaacccgacccggtgccaatggaaagtgccgaggctggcacaaaagaattggaagtgatggaagtggatgaaatgagcggagaaaaagggaaaaagggagaaatgggtaaagaaaaggtgaaaagtggtggaattgaagaggaggaagaaagtgagtgcagtgagggtgaactgctaggagacggtggatttggcaatttgcaactaaaccccagcctgagggcgggaaataaagcagttgaaaaggaagataaggggaaaccctatctggtcgcccaagtgagaagcgacggtgtgatcgcggcacggatgaaacttttctgggatttcccggaattggtctttgtcccttttagcctcttcgacaacgcccagccgatcgaaatcggcgatttgttccgcttacataagtgtgagtggacgaagagcgaaacaggatgggaagagcgcggagattggctgtatgaagcaaccggacggctgaactaccaagccacggcaacggacgtgagccaattgcgccagcgcatccccactcaggccgtcggcattttggtcgatgtgcaaagagcccgtgaccgacacgtcaaagtggccatggtgtcagcacctgagctgagctgcgtgatgcgcgcctaccgtcgccacttcccggccgatttcacggataccgacatccgctaccgctctgttgttcgtcttcaacttcggcagatcaacagtccgccatgggtgctgtattcacagcagtttgcgtatgttttgccatctgattttggtaaaaaaaaggggcgatgaactgctcgttcatcacgcaaacgtcattgctggcgttgagcctgagccaatgggctatgagttccctttcagtgccgaactgagctgggcgaaggtccagctgggtgagaaggtcatggcggcggctgtcgcagcgcagtcgttcgatgtgaaggctgatctgcggaagcacactctgttcgtcgagccggtcgtcatcaatgagatctcgacaagaagcgtgatcatccagttcgtcatgccggtgccgagcatcgaagagctcaccgaattgtgcaaaatctgggaggtcgatttggcggtgggttgcaaagtcaatccggcagccaaggcaaagccttgtgcgcatgggtatgtgctaagcatcgaaaagcgggcattctgtgtaggatacgagatcgatgtaaaagtgatcctttcctatcaggcagcgaaggagcaggatgcccaggaggaattcgatcagctgcgcaccggcgaactcgacggatgcgttgaactcatcccgcagacgtccgtcagggccctacaggaacggatgttcacgctgcggtccaatgactgctcgaaagtggcgaaggatgaggcaaaggtgggccgaatcatgtcgattttattgggccgaccggtaaaaccggaaagcccaaaggccaataacccattaatgacttttggggctctttcaaaattgaaagagggacagatcgacaccgcgctgtgcatgctcgacgaggtgccgcgcctggtcttccaacaggctgggcccggcaccggcaagacgttcagcgcggcgtcgatcgtggccacggtcctggccacggatcccacggctcgtgtgttggcgctggccccgccgaatgtcgccgtcgtcaagctggtgctggagatgcaggatgccctggccgccggaaaccacgtggagccaatgcttgccttgttctcggggacaggtaagttgagatatgccaaggaagttgagcggatttcccccacctgctcgccaccgcggtggaggcacaggactttcaggaactcctacagaaggaccaagaacgcgtcaaggtggagcggtacctggacgcctgcgagcggaacccacgcctggcccaggaaatggcagtggcgaaaattgtgcaggagcacaaaaatcgccgcttgtgcttcgccaccttgtccttctgtgagcagctgccggcactgttcggggagacgacccatttgatcatcgacgaggccggacaggcgccatacgtccaaatcctcaacttggtaagccaactcccctgcctaaccaaggtgctgatcaccggtgatcgccgccaactgcgtgtccatttgccctccctgccgatcgcaatccgtgaggacttcggcatggacacggtcatccaaaacctggatgtggcgcgaggggacggacgtcacancattgggtcggtctgttttcgctcgcattctgctctcgtcgctgcacggagggccggctttacaaccgcacggtgagctgctgactcc

SEQ ID NO: 23346 - DNA, 1322 bp, Heterodera glycines
agtccttctcccttcctactcgcagctaccattagtcatcatttatccgttaatccctccccactttagaatgaaattcaggaaaatatttatgttgataacttacttctctcttcaaataatcccatagaagcacagaccaaatgtttggattcaattgagctttttgcaaaagcatcaatgcctcttagagaattttgcagtaactccaacgaagcgctttccctactccctcgtatcattaaactgaatggccctgatcaaaaattcctcggaatcaagtggaacaccgattcggattgcttaattttatcccatcaacccccttcaacctttaaccccacaaaaagggcggttttgtcctttattgcagcatgttatgaccctctcgggcttatctcaccagttttagtgcctcttaaattatttttccaatcgatttgcaaagaaaattataattgggaccaaccattaccatttaatttaaccgatcaatggcaaaatttgtttaaaaattggtcctttgccgattcaatttctgttccccgctatcaatgttttcttcctgaccttaatcggaaataccaattacactgttttgttgatgcctcgtgcttagctatgtgtactgcattatatctaagaattacccatccatcttcccaaaattctgtaattgtattaatttttgccaaaactaaagtcaaaccaatgcataagggccaaaatttaaccatcccccgcctcgaattaatagaacactgattcagtttatatttcgcgaagaatgagctgtaattttgcgaattagacaaaaatgatcataaagtaacaaatgagagaatttcacattctgctaattaggctttaaatataaactgtttaagtgttgcagacggatcaggttgataagcgccaataacctcagatttactattttcgcgaccccactttttgaattctgtcagctcattacgctctaaatataaacagcatcagtgttccggaaggatcgatttgaaatcgccaataacccccaaattacaatttcctactgtaaacttatacagtttacatttggatataagaaattgaaatattgagaatatcacaaaagtgatcatgaaaattgtaaattggagattattgggacttatcagctcggtcctccgcaaacactgattcagtttatatttagaggataaggagttgaaatggtggaattccaaaaaggtgacaaagaaaattgtaatcgaagattattgacgattatcagctcggtcattccgcaaacactgattcagtttatatttcgcgaagaa

SEQ ID NO: 23347 - DNA, 1234 bp, Heterodera glycines
ttaaatttttattttttcgtgccaatcagcagaagcgggacgtacttcgcctgtgtccctattcctgcatttgaacacgacgccgtacgacccctcgccgattttgccaattttctcgtatttgtccaacatcaaaggcattttcgacggttgttccgcgtggtgttgtgccgtacttacgcctcccaccggcggttgttgatggcttttgctgttggcatttgccttcaatggcaccggtgaacgatacgaatggaatggacgtctttgctccccggcgggggacgatgacgacgccgcgggcgcgcattgcccggcgccatacccggccccgccgcagttgtcctcctccgtgtccgccgtcagtgacggcgagtgaccccccgtgccatttccgtcacccaccgccgccgtcgccgcggcggtggtaaattggtgaaaattttgtgccggcaattcatccgtgccaccttctgcagccccttctctgtcgcttatgccagcactgtccatttgcggaaagggcgaggggaggggagggggagggattgttgtcggcaattaatggtcgttggaccaaaaaagcaaattgttgacgaggaataatgaggcgattatttccgcaatttagtaaaattactataaattctctgtttttaatgtgtaatatttattaaacattgcatttcatttcattaaattgtgattttattattcttttttttccattaggcacaaaattaaatgaggccaattggccctcattaggcgggggaaatgcgactgacctcgaaaaatcaaaaggcaccttattataattacaattttcatttatgccgtgtctctctctcaaagtgcccaaatttgttgcccattcacttcagacagcggctggttttgaagcgtatccatggaaatggaagggaaaagcgggcaaattcactccctcccccaggtcacagacaaaagcaaactcaaagaaagcatcagaaacatttggacacgaaggaaaagccgaaaccaaaaaacagcgaagcagacaaaaaatgatttttatttcgacaattttcaaaagtttataaatacaaatttacaaaaaaagaaagaaaggataaaagattgcttgagtagtgaataaaagtgaacagaaagggaaaaacaataaaataattaataaatatgctgcaaaaaagcaggatggtagatcaaatcatgtccagatcgaatagtggag

SEQ ID NO: 23348 - DNA, 2261 bp, Heterodera glycines
ccaataaattctcacattttcctcaaaattcgcttattcattttcatgccacgcggagactttgtcgttttccaaatgtcataagtgaaccgaacgattgctgctgttcattttcaccaatttctgcagaagaaatggggcaatggtcggcggaggaatgttttttcttctttttgacgggcgatgccattgaaaaataataatttgccgaaatgaaaatttttgtatgaaaagaaatgagcaaaatttattctagatgtgaaatattttaaccataaattttaaaattcaattaacaaaacccatttatgtgtcactaaatgatcaaaaatttgtcaaagactttcggcacggatagaaatgaaaaataataattcaatcaaaaattgttaaaaataacattttcacgctcaccgaaggaagtgccaataactaaaaaaacaaaattttcaattttttggtgcaatattttaaaattaaatgatgctataacaaaaaccgcacagaaattaccaacgataaggataccaatggtgaaaagaaaggattttgggtttttcacatgaaaaatttgaaaatattataaagctcaaacgaaccttcagcatacaaacgaaaataaatcgacataaaaaatttcaaaaaatacacccctatgaattgacccgaaatttttcaaaatgcaaccctaagaaacgaaaaatttctcaaaatttttctccaaattttttttatttgttttttggcaaatctttgattttaaaaattatttatctcaattttgatttggcataattttgttgctttttgtataaaattttatgattttacaccccaaaatttgaaagtttttacaaacacttttctcatttttagcacctattttggggttttcagaaactaaaaactaactattttggcagtttttagcaactataaataccatccttaataataatgaatgaataaatggatgtgaatttttcctgaaatgtgggagggttgaaatgcacgaaaaacatgtttttagcttggtttgaagcttctagaatggctttatatatccatatttaccatatttcgctatttatgtccatattttgcaattttatgaccatattttgtgatttttggtccatattttatggctatttcgcaattttttatgcatatttttccgagccctaatgataagacagagacagcgattatagactgtgaagaaagagaaagagagacagacagacaccaaaagaaataacaaaagaaacaattaatgccttctttttggcactttggtgttaccatccgccgaacaaaacacacaatggcaagtgcttatcttattctcatttacggcatgtcttcttcccatgcttcttctgttacagctttttcagtttttataaatatttcctctaaattttcttcaaatttttgtcgctttaaaaatttcatttatttgccattcattcgctgtgccaattaattgtcatttcaaaataattccgttaattagcaattaagcataaaatatttttaatttcaacttcagtaattccataattttttttaatgcgaattttggattcactgtgtgaaattcggcatattccctaacaaatattcattacaaatgtcaaatttttttcattttatgatttttatttatttgatttgaatttattttaataatttttcgtttttatgaaaaattctttcattaattcaatgtgaatttcataatgtgtttgagaaaacaaaattcaaaaaacccatattcaccatttttttatcacaaaaaaacaaatcgtgaaaaagtttattatgcaaaatgcttttatcactgaatgcaattcacatgtttcaaccattttataaggcttttctttttcatctctctgttcacattattttcattaatcgctcaatacttattttgtgccgctccatcgttggcattttcgcttcctccgctgccaaaagtgtcatcatcatttgcggatgggccaaacccggcttgacgtttgccataccacacataggagggataggcgtaggcgtaattgttgtaaacgccccaccacttaagagacataaatttaaaaaaatataaaataataattaaggcgatgattttcaatttttgaattctttaatttatttatcaggttatatgtcggagagaaaaaaacgcatttttaggccggaaagaattgctagaagtatttttcattacaaaacactatttaaaaacaatt

SEQ ID NO: 23349 - DNA, 997 bp, Heterodera glycines
atgactttttaagcccgactaattttcttaaaattttggaaaaaaatcaattagttgataaaaaatcatagataaaaatcaatgatttcaaaatctgagttcacattaatgatcagcgcattttttaagcctagaaaaaatacatccgaaatttttgacattttttttcgtcgggacaccaattcttgaccattgccgtgtttcatattgtgccaatttctcaacgctgcatttacttgttgacgtgccaagccgcgtactgctccgccttcacgacgtcctcaacatgctgcttcagcatttccgtgttcgccaactctctcccacgttcaatgcgagtcgaccccaaattttagtgaactctaaacgaaaacgtaatagtaaaaagcactaaaaactgaaactttggttgacgatcttcgccaaaatgattttgcgcttcaattgctccctttggttaactaaaattgggtttgttattaaattaattcaattcaaaattcattaatttggacttttcaattcattcacaattaaaactttctgataatctcactcgcttccttgacacttcgtacaagttgttcttcgtcttgtttttgcatctgttgactttgaatgtttgtattgaaaaccaatttggtaaatttataatttgtgctgtttttaattgattgaaattaaaaaagagaaaaggaacttttttttggtgtacggacatttcgcctactcgacatctcgcctaccgacatcttgcctactgacatttcgcctactaacccaaaaacattcatttcgcctactaagccaaaaacattcatttcgcctactaagcaaaaaacattcatttcgcctactaagcaaaaaacattcatttcgcctactaacctaaaatttatattttgacaacgagtatcaccgaaaatatatattctaaattggtttatatttagcaaatgttattataataataattaaatttaacctaaaaatacac

SEQ ID NO: 23350 - DNA, 1800 bp, Heterodera glycines
tgaaaatcggcgcgagagtgaaagaatcgggagggaagaaggggatctattactctttgattgatattgtcagcctttaaatctataaataaacttgttaattttttcaaataaaaaatgttttacttaaaattatttctagtttggttcttgttggtcggaacggaaagttgttgcctttcaaaagaagaaaaagagcaatttaccagtgcccgaagaactgtagaaggcgtatttagagacataattaggttagataacgaagcaaaagaattttctttttctgcacataataccatggttgaagcccaaaatataaaaaataaaaaccctgataaacctggtgtaaatttttggcatagcaaattattagatggagttttaaaaattcatgccctatttgacaaaataaaaaaagaagaaaaaaatatgaaaaatattaaaaaaggtatggaaaaatgtctagacagaaaagatttaactatgtgtcaagaattagcagaagaggccaaacaatcaatcgaaatagccaaaaattatcggcaagaaattgggcatatttatcggaccgcttactcgcagccagatttaggtattggagatttggcaaataaactaaaagaaacaatgcgcgaaaaccaaatacggtttgaaaggcaaagacctcaggaagaatttagggatgaatgggtgacaacaagaaatcgttgatgatgctaagaaaaatccgagactccaaactgaatttagagatgaatttattgtttgtaaactataaataggatcaagaaaaaaataccaattaaataaaaatgaattctgaaaaatcagaaaaagctaattctatattattggaagctgcaaaaaaagagacagaaagagcatggcaggatgtagctgcgctaacggatgaagtaagcgattttgccaaatcttctcgcgaaacacttaatcgtgcaataaaatctagagaaaaggctccttactaatggtattcgagaattatatcttaaaatgtccgattcaatttgggaaatcttcacaatcctggacaaaatcaatttggagtcagaaaaagccgaatctacgtggcgtgatttcgagagatgcaaaacttttgaccaggcaacaaagctcgaggaacaatcgcaaaattcattaatggaagcccgaagattacatttcgagtcccgaagggttcagagccaaatgttaaattatgaaaataggctcaaaacaattgtttgggagcacgttggtatataagaacaaaaaactaaaagggcaacagccaaaatggaagggtgttctgtaattgagtcactatgtcatgagggcttaaaatttggctttaaaaaatataaaaccaaattttattttaaaaatcctttcctaattaatgcggaggaaaattttaaactaatactcgcatcaataatcgaaaaaatttataaaaaggaacagggaaaattcaaaagcattctgaagctttcctttgggtttgaatcattttattgccctcttagatgccctagcgaaaacacagccaaggctttgttccaacatgtcatattaaaagaagaattatattcgcttttctatcctttggatgatgtcataacactagaagtaactataatcccagatgtcgacaatagaccaggaaattaattttataaaaaacaaaattacgagaaattagaaaatttctggaaaaagacttaaacgatcaaataatctcgaaatttttgcaagtagagagtttaaacgggtgaaaattttctacatagcggcatttag

SEQ ID NO: 23351 - DNA, 1796 bp, Heterodera glycines
  unsure (1)..(1796): unsure at all n locations
ccccccccccccccaaaaaaaaaatttttttttttatggggggtaaaaggaaaaaaagaacccaaaaaatttttccgcgtgagnaagtctgtaaaggggtgccancaagggtttggcactgattaccagcaatatttcaatttgttttgctcattcgatttccctncagggcaccttccaacaagcggtgctgtgcaacacgtgcggtgagaagttggacacgtgcgtcggccatttcggcttcatcgacctcgagtacccggtgttccatgtcggcttcttccgtctcgtcatccaaacattgcagtgcatttgcaaggtttgcgagcagcaccatggaaaatgaaaagtggcatttcagcaataaaaaattccaaaaattttaacaaaaaaaaaaaatccgcgattcatccaaggaattttgtgggtgaaaatatcggtatgagagtaaaggcgatgtcgtcggtgccgacaaatgtcggggctccaatgaattctttacttttgaaaattttttcttaaaaaaccctcgtacggtgacgctttactctgccgtaaaaacaaagttgttatctacaaaaaagacctgacatcttttccctatcatcccacccttaatcccctcgctttttaatggcaaaatttcccatttttgccgtcaaaataaatttaaaaaaaaaaatttttgccacaattttaaggcctgcagccgcacgctgttgcagggcgagccgaaggaggcgttgttgcgccaagcgttgacgcccaacttggactatttgcgcaagaaggcgttgcacaaacgcatgttggcactgagcaaaaagtgctcactgtgcacccattgcggctttctcaacggtgcgcaattttgatgttttaaggtttcctaccaaaagtgctccaaatttactaataaattgaattttgctaacaaaaaaccgtgaaaccaaaatccttatggtctccccgaaaatttaaaaaaaaactttcaattctaaggctttttcctagtaaataaatttaaaaaaaggctatatttttatttaaaaaaacaaatatttcaaaaattataaaacaaaaacgcttccccccccccccctagagtcaatcttgttgataatttttttggtcccgtcattattttaattttattgatcattttttgaaggcgtcgtcaagaaggcggtgggtgccattctgaaaattgcccacgtggagcccatcgacgcggagagtgtgaccgattttgtgaacgcgcagcagcggggcggcgtcctcggggggacggaaagcgaacgccaaagagaggcagggaaaatgggagggggcgggggtggaaaacggcgattttttgaacgaattttggggactttcatacctataaccggggagcggaacaggacaacaaaacacagccgccgaaacacagccgggaataaattaaaaaaaattttcaaacttagaaaaaatcttagaaaaatttttctttgaaaattctataagaaaaaaacattcaagtgagaaacccattgcaccaaccctgggcttgtccgatttggtgtccatccaatatttatggaacttgacaagatttgggtgctccagacggactaagttgtcgaacacagcgcgaatcttctcctaaacgattcggataaatgttagattagtcaaaataggtgggaattaaccatttctaattgtaatttctggatttgtttggttttgcgggaatgaaaatcaaccaatcaattaattttaaggggtctgtgaaactgcattttctgtgaatt

SEQ ID NO: 23352 - DNA, 1323 bp, Heterodera glycines
ttcagacggctccgccgtctctccaggggccgccctccccacaagcgctttcttctcagtccaactttcaacagctccccctgcaagcacaacaaacggtaccgtaccaaccatcagtctgctgaattggcatgattccctctgtcttttcagcctggtcctcactttcctcatcagccttcgcttttggggccgtccgccgcttctgtgccttcactttcactgaacgcgatggttcagcagcagcaaccctttgccacggtaccaacaaaactaatccccttttacccccttcaaattgccatttcagcctgccaataatgagtccttcggcgatgccctccaacaaatttcgcccactccgccgcgtccgtcaccgacgcgggagcaaagcgacgcgttcaacatcaaccaaatgctcgaacaaatcacgcaacaatcgtcggaccaattcaaaagaccgaacatggaggacccaatggatttgctttcgaaggccgtcgaaggtggcgccgtttttgtttcgttttgctcgatttgtccaattgctgttgcccttctcagaatcgcccgcatcgcctccgatgtttggctcttctgaaatgggtgccgcggggagtgccgacgacgccaaactgattccgatggtgagggagtggcgactgtacgccgtggacattccgacagaaaccgaaggccttccaatgaatttcgacatgaaattgattcaggtcgaattgggaaaggggggaatttgaggaatgttttgagatttcagcagatttcttcttctaattctgacccgcggcttcgaaaattggccgaaaaacaattcgacttggtttccaaaacctttgagaagaagcagcaacagaaaaagtggcattttgaaaacatttcttttttttactttggtttaagtgccgtcgaattgaccgacgaaaacgcaaaaaaagagacagaagaaaatgctaacagcacggaaaaagcaaagaaagaagcggcgacgggcgacccgcgcaaagacccgcgacgcaaagggcgagcgacggagcaacaccagcaccagtgagaagggcacatggacattggcagtacgtcttggctttcccgtttcagcccttctacttcgtcagctgccattgcctctccgtcaatgtctgtggacgttccccccttcaaaatggcaccgtcttccccaaattcggccccctcgtcggatggcactttctcttttcaccaacagagtattattttatccattgcccgtggctaaccaggggaacattccccaactgtaagtcggaaaacatatataatttg

SEQ ID NO: 23353 - DNA, 1358 bp, Heterodera glycines
atatatatatatatatatctatatatatatatatatctataaccgctaataaagcattctctcgattaataaagcattcttagttgttattctgcttacataagattattatcactctgttaaaagaatttagtaggggaaattaactttttcaaatattatcactcagtattttttctattataaataaagaagctggttgagtctttcgcacaacttaagtttgattctcagctcttaaataattcccattcaataactttattttaatgaaggtataagtatatctcattcatgtattgaatatccatttctgaggttataaaaatgtatttcaagttttaattaatgaaagtaatttaaaaacaatcaaatgtaaaggttggagaattaaacgaaagtgaacaaagctggaaatgtgccctttggccaaattttcgatttttgagaccccataactttttcatttcttgatatgggcatgtaaaattaaaaattcgcgacagaagtcgaccctgctcgatccaatgattccaaattatatatgtttccgacttacagttgggaatgttcccttgtaagtaaaatttcccttcgttttcagttgctgcttcgtctgacaacgcaaatgccgagggaccgaagcgaacgcagcaaaaagacggggcaatgggaaaaaaagcatacggacgaacggcggaagggatgggacaaccgacggacggacaatttcagtcgcacggaggagggggaccattcttcggctttcaccaccaccaacacccttcggcaccgccagtccatccttccatggaccatcatcattccgcaagtgttcccccgcctttcatgactcatctccatcccccgcccttcggtggacctttgcctttctgtccttttacaattggatttcgtttaggccaccaaatccattcctccgctgtcggagggggccctttcaacgtccctccgcccgtttttccgatgtccgccgctgcttccgtcgctcccaatgccgccccttccttccaacaacaactcggttcccatgcctttaatgtcggtggcttttcctcgtcctccgattccgtcggtgggccgccccgaccgcagccgtctcagatcagcagcctgcgcgagaagcggaagaacaacgagtacgagtcgccattggcacgcattggctcctcctcggggggtgccggggcattggggcggagaggcgcccgctattgaagagagacagagagagtcactcactgccgatgccccccccccttctccccctcttccgttctctgctcaatttgtcgtcttcccttttatcatatccaccaaaacacaaatttctcgca

SEQ ID NO: 23354 - DNA, 1807 bp, Heterodera glycines
  unsure (1)..(1807): unsure at all n locations
tagagtcacaataaantggctttttaaaaaataattaaaaagtgattcttttattgttttagtaataaattccaaagattttcgcattgcaaattctttacattttttactaattcactaagaatgagtaaaaagtgaaaaatgataagggaaaggggagacactttcaatgatttgatttggcactgccaaagacaactgacaaaactgacaaatgatcatttcccgagaccaaaaggccgacacttttctcgggttaaccccaactttgacaaatgatccgcgctctagaaatatttttggagaacaaaaacattattaaaactcaaccgaaggcccaaattgatgaatacttgggcaagagggacgcaatgaaaaatataacgaaaaccaaaataaacaatggcaaaaccaatgatcggataataaaaaacaataaataaaaaacaccaaaacaacgaatcttggacaaaaatgagttaattttgtcaattaaaggcggagtcacaaaatcatttgggccttttaatagcaaaaaatgtgcaattaattgccggttaattaattaattggtttcgcttaacgtttgtttgtcctttcccccatttttaattatatttttttccaattttgctttaatttttcccatttgctcagcttgaaatgccattttccccacttggcgattgcttcgcgccgctttttccccctgaaaatgtgccgtcttttttggaaaataattccgtcgagggttaggacaaacatttaaaatttgaaccaattagactgataaaatgataagctaattgattgtttattcttcccattcccttattaaagggttcaccaaagtgttccacacgaggacccgttttcttctgattgtcctttgccttttgtgtttggccagcgtttgggccaacattttatgtaagaacaaattaattaaaatatattaacaaatgaaataaattaggttttaactttgccatcatttgcattgatcacaacgaaaaaagtgccaatgaaagaaaacaaacggacgaattggcaaatttattgaatgaaaacggcacagatcaaaatgggtaattttgtggaggtattcgaaatatcgttattttttttctaaatttccagaaacggcactttctccgcttttgccaatgccaatgtaaattcaaatggctccgccgtccccgcaaaaacttcgaaaagttttacgccgcgacaaaaactgtacctcacctcggcggtcgctgcggccgccttagtcgccaattttgcggttgtcactttggtgagtttcggcatttgtattttatctaattggctaccataattctaccgtatccgttttcctttgtttttaattacttttgctttgccaggtgaacaattacggcattcgcacagtgttcgttttgctcggctttctctccgccgtggccacttgcttgctgccaacggccattgaactcggctttttctatgttttggcttgccgaatgctccagggtattattcttccttcactaattagtcccattttccttttaattaccctaatttgtccacaggggtcactttttcctgcacttttcccgtcatcggcgcgttcacttccaaatggacatattacaagcagaatggactgttcgtctccgtgttggtcgcttatgtgcaatttgcgccggcggttacggtagaaattggtttattccctgtaaaattacggtatttataaaaaaagaataaataattatttttaattctcaaaatccacttttaaagttgcctatcagcg

SEQ ID NO: 23355 - DNA, 1862 bp, Heterodera glycines
ccctttccccattcagtcgccggtgtctttgtgcagcgtcgtcgtgcctccaccatcgtcaccaattccttgctgttggcgctggacaagcctctcgacctgagcatcaagagcacggtcattctgcgtgacgaatggcttctgctcggtgcccaggagggactgttcgccactccgatgagtccgcaacagttgcgcgcccccttccgaattgcgggcgtctgctgcgtctatgatgatttaatcaaaaaaaaatttaagttcagaaaaattattttgttgttacaatttttatttttgatgattaaatttagttgttttatgtgtttaattttttacacataatttgttgacatgcgaatgtgatcaaaaaatatgtcagaaagtctaatttgtatagtaaaataattttatccaatttaattaggtatataatatttttattgctggagaatgtcttcgtctgcgatgggaactcaacccggtgagcttttatacttccttcccactcccattggatactttcaaacaaaaaaagtgatggagtctaatttgtgtgcgtcggaattgagtcgatttcatttttattaagctctcttcgaccgttccaacatttccgttgcggtgtcctttttggccgggggtttggccattggctatttgctcggctggcgaaccacggcttcaaaattggcccgatgcaacacgcgagtgcagttgagcaaggacatggaacactacgaacaggaactgcagaaggtgcattattttgaacgagcaaattatattttaaaaaatcaatattagaaatccagcaaattttcggtttttaaaacatttcatgatatttagttgctgttcaacagatcccttaatttttttctaatttttatacattcaatgcaattaaaattcaacctggatctgggttttttcaggattttaaaatgccgagctctacgcgtaatatgatgcatttttgcccataaaattttttttgttacttctaggtcaaaaattgccccaagaaatttgaaactaacaaaaattaattgtttacaatacaatttgtttttccctttccaggaggcggtacgcattgttgagcaaaagtaaataaattcatttttttttggaattttttggccaatttttctctgtctctttccccatagattccccagcaaagtggtcgagttcaacgagttgctcaagaaccccaaataccagtacgagcgcttgcccgagatcactgtgttgtccgatgtcaattcaatgtaaagtttttttttgactccaaattatgccgagtctatgagtttaaagccccctagtgatttcttttcaaaatatcatttgccatttcatactgaattatgccataattgtccagacccttggattcgtggggctgaagtcaaaaccccaatttttaggggtattttttgttttttgaaatcccgaattagggggggggcgtgtcttttacaaaatttttagcggtttttcgccaagaaattactattcccccctggctacgcccttgccacttagtacaaattttaatgaaaatattacattgagattatccatcttttttcagtttgccagtgccatgtggtggtgagcaatcgagcggcgagggagtaaatttttgattaaactatatagcgattcatttagtctttaaaatttgaaaatttcaacctaaaacggaaaaaaattttaaaactgaaattttgggtattttttctaaattcatcccactcattgtcaaattgaaattttttctacgcttttccctccttttgtagcatgccgaacagttcgtctgttgtcccaaagggtcggtgaattgcaat

SEQ ID NO: 23356 - DNA, 964 bp, Heterodera glycines
aatggcaataaacaatgtccgtcaccgcccccccccccccgacattccgacaattccccgtcccaatcaatccgtcctaaacgattggacccaattaatccaatcagtggcagaagagagaatccaacgaagggaggacaactgtcggatcagcagcagcagcagagagcagtgcttgatcacttgtcttattgctatgtaacaattaaattttgctgaggaaaggccgagggttaaaatggaccgcccgagggccaaaggatgagtcatagggagaggagaaagaaacgaaataaataaacaaaataaatattaaaaataaatacatacatatatcatttgtagggaatttaattccaaattatttatgggtctcaagacttggaattttaaactgcgaacccttcgagagctctggcttgagctaacaataagtctaaaaatcaaaggatgaaagtgatcagagtttgaccagttaaattttaaaaattacgtaaaaattattagttcatagtttttaaatcatgctgaccacgaatcttgagttcataaatatattcgaaaaaattatttgtaatttttttcttcatgtcaatatttactcgagttatttttataattttccgatactttaagctttcaattgggcaaaggtaaagaacattggtccccacaaaaaatttttttttaaattttttaaaatgatttttaggggtaatcctaggcgctgaacatgaatctgaccttatttttgctcaatttcgaaccccggacccggagttgttgaaaacaattaagcgtggttaaagtcgtaaacaaaagttatgaatcgggcggaaccattgaataagaaggaacaataagaatagacggcagaaactggagcacatagactgacccctagaaaatttgagctaagaaacaagcaatttagccataggatatttgtactttttgtgaacaa

SEQ ID NO: 23357 - DNA, 2225 bp, Heterodera glycines
tttttcaagatttaattctgcaacttttttcaacaatacatattaaactctcacgatatttgaaaatgaataagtgctcaaaatacaccaaagagaataaaaacatattttttatttttacaaaataaaaataattaatcttttaaagccaatatgtataggattatttatgtttatttataaaatatttttattttttcattctgctataaaaaaaagttttttacattaaactaattttgaattcgaaattaaatactttatctttaatttatcatcagaatagttttaatcggtaaaaataattccttattttttcatgtaataaatggtattaaaaattaattattattatttttcagtagaattacttttacgtatgtaatttgtaattaagatacaaaacagtaaaattcctttttaagtatattctcatgtgctatattctcttgtgctttgaaatttttttttggagttatgcatgtatagttttacactaatttttattggtgtttaaacttattatttgcatttttatgatatgggtatcaggttttatttaatatttttctcttaggctttgttaactttaattttatgatatattcattaaccaaatatatattttaattataattttttctcaagcttttaagagtataaatatgagtaagtaattttaatatacctaactattttcacaaatatggggtcaacagttataacggccatttttcagagaaccgatcataactcaatggatattattaactgattagaaaacaaccaaaattgtacagatagttcaaaaatatttaactgaatactgaagcctgtaaattaataattgaaaatagggaaataaaatttattatgaaatgcaaaacatctgcaacaaaaattaatctaaaatatgataattggttaattttttattatttagacaatattagaaactaatttaatttcacgatttttaagcagaatgtaacataaatatctaaatgttagatcttatcaagttaaagaaatttgttaactcgaataaataaaaaattaacaaatcgttcatgagtctaatctcctttttaagtatttatctaaacataaagcgatgaacaagccacagaaaagacaaatttcttttaaatagaaaattgtcattgctcaaatattagaatttatttattgaaaataattataaaaacaacaagaaaaaaatatttttaaatataatcctgaaattaatcaaaaaaataagacggattaaaatcatatctattcatctttcttcaattttttaaatagctttgtttttgtcaatcaaaagctaaacatttaataattataccgtgaatattgaaacattaaattttcttctaaaaaataaaattcataataataaaaaagatattagaaaataaaacctgttctataatgaaaataataaatcattaaaactgaatatttaaaaaatatttcatgttttaatgcttcttaataatcttataaaatatgagatattaattagtttcttaataaaattaacttgttatagtaccttaatataataatgaacgttccagaatttttatataaaaaatctaaaagcgtaaattcgcaaacgaattatgcaaaaagttctaaattgcttgttatttttattatgattaagaataaaatttttttgtaccaaaattagtgaacaattttaatcgtttattagatggaaaaatattttaaaaagcttagttttgttactgtcacaattaaatgaatgaatatattcaagaataggttttcaaaaaccaaacttattgagataaattaaaagcgtcaaatttcaactaacacataaaaaaatttattgtgctaaaaagggttaaaacacattagaaaaacaaaaataataaaatcatatgggaccattagtctttgaacactaatacaggaaatacggtaacctttcaatggagaacattgaataactcgatttaactgtctcagtttttctaggcaaaatttaatttaattaaaatccatactataataattttataaataaataaataatgattttttcttatttcaaaatgatttaagaaatttgaatattttccgaaatcgaactaacaccgaaaaggacgcgataagctatttcaaggataaaatgagaaattattttcttaattataacccgtaataataaaactaaaaattaatat

SEQ ID NO: 23358 - DNA, 2395 bp, Heterodera glycines
  unsure (1)..(2395): unsure at all n locations
tttttttttatcattcagctgactacactcaaattgattgcaattggatagaagaagcgacaaatggagaagtgaagtgcatagaataatgaacgaagttgatatatttgattgaactgaaacttttttaatgcttttaaatgcactaaaatattctatttaaataatttttcaattctttcaaaaagcatatttaaaataaaaacgaaactacatgtaatactctctattttaaattattgagcagagggcaaaccgtttattattttaattaattttgtcacatttttattttaacagttaattttcattccttaaaaatggaggaatgtttttttattttaaaaatttttaataataatatttatttagagattttcaaaccgccaacgaaatttttgaattttattgtacatgaaaaaaacatgagaaaacataatctttgaattgatcaacggattaaggatttgcagaactttgatgtgaagggtgtcttctcagatcagaccaaagtggttcgaagtgatcggcaaatatgaggacgaccaaagaaagtggaccaatgatcagccaaatggtgatcagctgatcagaaagaacagcttagatagaaaattgttgatcatttgattagcattgtgttttctgttttaccacttttctttttcatgggatgcaaatgatgctgataattcgtaagactgggcacacatttgggttttggccctaaaaatggcgacacgaaattttgttctcctggaaaaatgaatccaaagaatttttattggatgatcctataaaatcatttcctgaattttttttcattactcaaaaaaacccttaaattacagttttctaaattcgattagcatcatttgtgtgtgggtaaactgtcttagtattagatttatttatgtaatttttctttgcaatgttattgttttgcattttcggtttttttattaaactttttttctgtcttatttattatttaaaaacacaaaaataaaaatagtatttaaaaaaaaaattattggcaaacagttaaaaaaccaaatttgaaaaaaggcgatggccttatctaaaaaaactaaatttttaaatatcttgagaaaaaatcaggttggtcttgatcaaaatacttgaagaggattgggatttcaaagatggactcgtattgtatttccataattttatttgcgttaaaaatattatgaccgaaataatacaaataaaaatgttatttgcacaaccaattcacatttcaaaatattacaccattttcttcacaaaatttttgctatttaaacggacccatttttggccacttttaatcattgctcacaaataattaattgaataaggcaattcgtctctgatgttgccaattgccactctgttcgtcgtgctcattgcgatccaattttacgcatccgagcaaaattcaatcagcgtggacctaacggtgatgaaaattttaaattaaaaattcttttattgtatttatcttcctcatttcgatttaaacgaattaccaaaaagttccaggtgtatttgcccgattgctccatcaaatgcttgaacagttcgaccccaaaaatggtcacagtgtattgggcaattgaatattcgttctgcaccaaatccgtccactttttcgtttttgcttcctccaattgttcttctgtttctttgaattgttttgactttccgtacgaatcgcaaaatgccgaaataagcgcttgtcgaatggcctcggacggcaaaacattttctgtcgatgctttccagcgaaaggcgcaagccatgctcaaattgaaaataatattttaacggataatggggattagaatgaataggcaatgggatttagttaagacatgacatcctataattgatgcctgtaactcatttggttattatacactttaacaataattttagcagatttaattaatttttttgttggtaatttttaggtctgaaaaagtgagcagaagaaaatacaaattgtaaggcaaatatacctaaaagcgcgcatacgatctgcatacattggaggcggaatcggtccaaacgtttcctaaaaattataaataatttgatttatttttcttattagaattaatttactactgatttacccaaattctccccgtcttcacatatgccatcnaatccttagcatcctttgtttccacattaatataatttttaagaccaccaatatatttttgtttccgagttccactgaatgncatgaaaatgcccacaatgccaaatgtaaggcgcaacttttggttatacaaaaatgcctctgatttcggatggtttctgcactgattacaagtggcattgaaaaatgcattttgtcactaaattttaagggatttaa

SEQ ID NO: 23359 - DNA, 1687 bp, Heterodera glycines
ctaatcaagaatgcttaaattagtcatttttaatttttgaaagtttcttcgtacaattaaataattattttttgttttttcaaaaaaaggcgcaatggaaattaattttaattttcttttcatatattttttaaaaataataattattttttaatttgaaattaattatttttttcccatttttcgcaaattaaattttcatttctcacaatttttctaaaaatactcagaagcgcattaaattttagtggaataatagggaaataaatagaagctaagctaatggacaaaagatgaagctacaacagcgatttaaatttttcattttttaaattaattaattttttttttaaaaaattcgatttttagccgccgcattgaactgcgattttgaggggcagccctgttgctgggccaatgtgccaacaccgactgacgatcaaattgattgggttcaggtggagggccaacctcgcagctccattttgccgaggaatttcacggcggacggaaaatatttggtgaaaaatttatttattatttttaaaatttaaattaaatcgtttttttattttgattaatttactgctaagatattataattttaaaactacagttggccacaacatttttgttttctaaagctttaaattaaaaaaaaaattctataaatttttttgaatttttatacttaaatcaattttttaattggttatttcaagtttcaaaaaatagttttaagattttttcataaaaaaaacttgttatcatttgttttttatcttttgcatgacatcattctaacaccttatatacctttacctaatcagcacattcagatcaaaaataattttgcgagattctaataaattttagggctaattaggcccccctccccctcatttcgagatataattttcaaatttgatcacagattgcttatgccacttccgcgtctccgtctgacgaggctcagctgtcctcatgtgccatcgcctgtgccagctcatcaatccgcgttcgggctaggtaggtatgggttttggagaaaattttcaaaaaattctcaaaatttcaaaaattttcaaggcatatgcaaacaacgaacgtgctgctccaagtgtgccagcgcgagtgagaattttgtttttcgatgcaaaaattaaaattttaaaaaaattttcaaggtcctttccgccttcgctcgggttcaacccgttgctgaactgccaagaatttccgacctcttccgaccgtatgatcaacactgagctggtgttaccaaaagcctcctacgtggatgtttgtttgaattttaaatttggcgcacttttttggcgttacgttttttaattttaagatcatcattgttgcctccaatttcataaatgaacggggcgacatcgctctcctagacgatatccaagtaaactacagcatactgtagttgaatacgtaatggggtttgcattacaaatcaactagattactgtagattgctttacaaatactgtaatggtttcgtgctcaatgcaatataatatagacggcgtacaaaaggcatactgtatgaaatagtatattatacggttcacacttttagatactgtatgaaagtgatccgcccgattgcggagcaccaccacgacgacacaaacacactgaaattgtgccaatgacaatcatg

SEQ ID NO: 23360 - DNA, 1731 bp, Heterodera glycines
tttgtggaaaattgtgccaaataaattattaaaaaaattatattttccccttgacaacataaatggagactggtagactattttttaccattctcagaagggggtatataattggagttcggcaggattaatggagactggcatataaaaagagtatatatggtatttctacaatagacagtccgtcgttcatcgcagtttgtcatttgtggatttttctttgccgtttctctctcgctttttgccatttatttattattaattatctccgttttaagtttcaaaatgttccacgtcacttgggaagtgctagcaaattgcaaaattgcttgcgcttttccgaatcgttacatgggaagcattgcatttagacaactttaacatccgcttgggggtttcggtggacgctaatagtttcaccaattatgttttgctttcggcctttcaattcatacagaatatgcggcgcacaaaagtcatgctgtgtcacttggtttattccacggctagcgaatttagatacgtaatgaactagagaaaatcgaatggtacaaaccaatcactggcgacaacaacaacaactgaatttgtgccaatgacaatcatgccaaaaaagaagaataaagcgggaacaaaaacgtaatgaaataataaattaaattttcaaatacagtaagacatatttacctgagtacagtaagcatctgagcaaaacgatcatggaagttgacagtcacggacaagaggttgacgagaacggcaccgatggtgatgatgtggaggatggtcccgacaaagtgagacgtgccgaaatcatcccacaggtggacggaggccgaaacgcggcacaatcgagtacgagcaatttgagtactgtacagcgagagggagggggcagggaactcgagagtcgagacaataggatgccgagaataaatttgaattatccaatctaatccgatctaatgtatgatgtcaactgaattttttggcgagggggcgggtagaaaatttaaaaggggtgaaaaattaaatattttggaattattccaatacaataggaggccggcaataaatttaaaaactttatagggaaggaaaaaaatcttaactttataccagcagggatggaagctgatcccagtttccgatttacaacatcggttaaagccttgaattttttcattatttaaaaaaagttcctctgaatttttttgaagcctcgaaattaccgtttcaaaaattttagccagtggcacaaatctgcataaatttataccagtgtaccatggataaattgagatttgaacatttcaaatgcttaataccatcaggtccatccgcttcattgcctgccccacgaggcccgcccatttcggcatcaaaagcatgcccggaggtgcaatgctcttttgaagatggtaaatgggtcattaaacataatgcctaattaattagttaattaactaattcggtaattaattaattaataactttataattgattttgattaattttcgattaattaaattttaaatatggattttgaattccataattaaataccattttttggcataataaatgttaggcacaatttggcatttattccaaagatggcacaaaaatttgttcggctcaatttggcatttattaattgctttaggcacaatttgccattattccaattcgtttgacaccggctcaccagcgcatgggctgaacgcacg

SEQ ID NO: 23361 - DNA, 1307 bp, Heterodera glycines
gccactcattgtccaccttagaaaactgctattatctgctctcataataaagaagcattgggtgacattttctccaaaaaaacatacggcgagcgcgaacaacgacgaggtcaggctgaacagcagcaacatcgggacggagagcgacttggctgtctttgctttcctcgccattggccagccccaaattgttgaagctgaacatggcacagatcagcagcagaacggcgagaaaacgaagaggggacattttgttaatttaataatttggtaaaaaatggagtaattaatgaaaagtgggcccaattcgggtggacttttatagtcaaattattttgccttgggtcggtgttttgacagacaaaggcaatcattaattaattaacatccactctaattactggcgaatcggctgacattttaatattctcgataactttttatttcttttaatttattctttcccatgagaaaattaatttttctaaatttgtgcccaaataatgttttgacagccaaacccaaacaaacaattaaaacctgttttaattaataatgagcattttcattcagtcttaattgaaaatacctttagttgatttggttgtccgttcgcattttaattttaataacattattaaaggaaaataaatttagaattataattatttgataaaattatttgattataatttacaaattagcaattttgcaaattaaaacactaaaaagagtttacttttctaaaatgaatatgcatttccaaaatgaaatggaatcggaataattgtttttttgtttttttgtttgtttgtccgttaatgaaccattttaatacttctgtcacagtcatcgtcgcctcatcaggtgttcgttcacatgttcactttaaaatgcaccgccattgccattgccatcatcatcatcttaatgagaattcggcacaatttgaaggcttagaactgttaattaattagcagcagactatttattactatattattatatttaattcttgaataataggcgttttttaaatttgcatttgtcgcaccattttgaatgattgctgctggcgctgagtcggcaccgtcttctccattaaccttcgattggccaagctcagaatctgatggctcttcttcatcatgatcagctggattttctgtttcggcaaatggccggggtcagcaaaaacattgtttaataatgcgcaaaaaacacctgttgtttgagtgagttcttcgtctccatttggttcctcagcaagtgcattggcattggcattttcattctcttcatcgtta

SEQ ID NO: 23362 - DNA, 2460 bp, Heterodera glycines
  unsure (1)..(2460): unsure at all n locations
cgtgcggaggaaggtgaaggccggcagctgagaatccctttgcgatcctacagctattacaatgatacatgggaattggaatctgatatagcaagggtaacatttttttaaatttgtccacaaaaagtaagcattgaataaaataaaataaaaaaatcaggaagctcctctcattcatgctgagtggttgcaacagcacgacgcaggacatacgccgccgcacaatatcgaaatgcccatacggcctgcgccttggatgagcacggttcgcagtgggcgtcatctgcctgaggtggagtctggtttttttgtttttttattttatttgaagaatttagaagtttttaatctttttattttttgttttggttttttggttaataaaaaattttatttaagtttanattaacccagggcggaatcctgcgcgacgacgagttttgtaaaaaaaaaatttaaatttaaatttaaaaaaaaaaaataaaaaattataagagaagaataaaagaaatcaaatgaaaggtgtaccagcggaagaagaagaagcagtgacggcaccaccaccagcagcagcagaaaatttgccggaggcagaagaagaagaagcaccatttgttgttgtggaggacgaagaagtgcgaatggcagcagcagcagcagcagaagaagcagttgtggtggagaatgaagaattaggagtggcaccactaccacccccagcagaagaagaagaagaagcagttgtggttgtggaggacgaaggaatggaagtggcatcagcagaagaagcagcagcagtgattgatgaggaagcggtaccaccccctgcagcagcagcagcagcaacggaacacattttggatggagatgagggagcggatgcaatggataccgttttaggtagaaaatatcataaatcaataacaaaataaatacaatattaaatttatttattcatttccagttttggacgatgggtcacctggacaaccgggacaacccggacagccgtcgcataagcggcataagaggggcaaagtgagtgcccaattttttatcattcacctaaatataatttattcttattatagaatgtggcaggatctgagcgacgccgaagacggattgccagggaagccgccgcccaaaatcaatgattttttgagatgaattgttgcatttaattttttaaattgttgacaaaaaataaataatttacatataatgggttaacaatttaattgaaaaaattaacaattaaaaaaaaatggagtaaaatcaataggaaaatagtcacagcaaatgctaaaaaactgattaatttgtaatttttcgtctaaattttctgcttttcagctacatcgatcaaaatgtcatcgcatttcttcgccgttttcaccgttttttcgccatttgtgccatcgatttggacattaccactggcaatgaccgcattttggaatttattttgctcaacatttggccaatgcttcgccattctatgcatctgatgatgtttttgaataccatcgtttttcgccgtttgcgccaattggccccgtcacttctcaacgattgtccatcccttcactatgtttctttcggtgacgtcattctccccgaatttccgcccgatgaaagtgccaatgcgtcggatggacaagcggtgaccaaatggttgttcacgtctcgtccggatggtccgcccaagtggctcagatgctttgcgaattcaccggatcaatggtcgtcaacgatggaacagctcaaagcggtgattatccctatttaattggtttttctatgcttttttgtcccatttttaggcattttccaatgcttcttctccggtttcttttcgcatttgttttcactttccgccgtcttttccgcttgactccgttgtgccatttgatcggatcaacgaagtgactggagagaaattgtatcttctgcaatcagcaaatgacttttggctcacccgttgtccaattggatgggatggaagaaagtgggaaaatatgacggatgcattcaaagctcgacagaacccaattgacattgtgatcagcgatggcggatacgacgatgggtgaacaattttaaatgtttttttttggcttttgagtccaatcgacaattgcttagtctttgtgcttttaaatgataccaaaaatgtacggttaatggacagtattgtgataattaaggagtttagttgtttggactcataaaataccattgaacctataaaaattggtcgctttttcagtcttctcgacgacgcttctcccgggtcgagtgatcactctgatcagcagcagaagaaatgaattagnggtttggtcaaaattagtgtcagattcatgatccgcgaccctgaaaacccctgtaaacgattttttatgacaaaaaaaatttgcaaaacaaaagggtcccccctttggttttttataaaat

SEQ ID NO: 23363 - DNA, 1244 bp, Heterodera glycines
actttttttcatttcaagatataaatttcaatctaatcccataaaattctcctgatttttctctatttttagagctttaattcacttaaattgaccaaaccttaactgagcaatgaattttcaaaatttaacccaaatttccaaggaccaaaaaaattaaaaatattttcgaatttttaaaaaattccaaaaattatgaaacttaaaatagacatcatattcgtactcaacacctcaaaataccccagaaaaatatttttcacaccctttttcgaccccaaaaaaatttttgaaaatttctagggggcctagctcgaaaatttttgaaaattttacatcatttagtacaccattcgatagcatttaaaatgctctacaaaaatgttctaagacaatttttcgctaaaatcaacccctgacgagttatgggcccaggactcaaatgtcccgcttaggccaaaaattttttctatttccggaaaaaaatcgaaaattttccaaaaaaattactaatcgatagagctcgaaaaactatgttttggaagtggtcttcgtttttctgggaaaattcgttaaaaaatcataaaattcaaaaacccgaaaaccgttttttaggcctaactcgaaaaattttgaaaattttcgaaattttaaaatttggaaaaatcgggcttttaaagctctacaataagtctgctggccaccccccgctcagatcaaaccctggcgcggtattcacctggtactgaagtgtactttttgagcacgcttcagttgccattttttgcaggccaggggtttgctcaaaaaaaatttaaaaaaataccagcatttagaggacactttggcggagtgccctcacagcgggcactttttgattcgagttttacaaaaaaagttaggggccttcaaatgcaaacaaaagtgagaaattagccgccgggactcagttggccctcggagaaaaaaacctatagttttcccgaattctcctcaaaaagttgtaagacccttccactactttcagacccgtcccattagccgttaagctcaaattagtttttgaaacgaaactcaaaacctatataacatatatataactagcgggtgcgtgaaccgccggatctgggcttgggataatgcgcttcgcgcttcttgagcttcgctacctaggctgtaaagagactcaaattgatcgaattggaaggagagatttttttgaatttttagaaaattataatggg

SEQ ID NO: 23364 - DNA, 1959 bp, Heterodera glycines
  unsure (1)..(1959): unsure at all n locations
cgccgggaaaaatttttgaaaatttgattaaaatttgttgacagattttcactaaaaaatgatcaaattttgcaattttgtgccatgaaaaaataggagttttgggggcgcggcggtgccgataggcgccggggaaaaaaattggaaattttgatcatttttttagattttttttttaaattttttttttagatttttttatttttctgtttttttttatttttttccctcctttgatgtaattcattcctgaacttttaaaaaaaaagaaaaaaaaaacaaaaaaacatacaggttttcattgaaaattagccaatttataggtaaaattttgaaaaattttatgggaatttaatccaattcttaggggtgtaaaagtcgcttttcgcaccaaaaagcgaaatgcgaaacgccaaaaaatgcgaataatgcgaaatgcgaaaagcgaaacctaggcacatccctgggtttgcacatgttttttactttcattttcaaattgtctttttattttttataaaaattacaaatattttacaactatctcaattattcaataatatttttatttttttacatacaaatatttatttttttttaatttttataattttttatttgtttgttatatatattttttctaatttgtatgtgttatttttttccattcctctgttgacgtcttgtaccgtccaagagtttggtataacgataattatgtttttattaaaagtttcacatgaataattagtaaaaaatttaatttgattaattttgctagtgaaatttttattttttaagctaatgactttgataatttgtgttagaagaatatactctcttgtcattattgaaaaataaatattatattttacgttttgaaatgttctttgcacaccaaaatttatcaaatgcaataaaatgagtaaagcagcgatgacacagccggggaaatttttcaactattttaatggaaaaaatagactatgagccaaaaaatttgcaaaaaaaaatattcaaaattttgcaaagaagaagaaactcaacattattttaataaatatttaaatttggtgatattcattgattaaatgcctgatttaaaggaacgaaatcggtgtacctatatttcgccaaagtgacatctcgccaactgacatttcgccaactgacaattcgccaactcagccaaaaacattcatttcgccaactcagccaaaatcagacattttgccaactgacatttcgccaagtagtcaaaaaaaagtaaagaaaaaaagtagagtcaggtaaaaaaatttccgggagcagcatcgggagttcaaaattttccgggacgggagtcccgaacgggaatcccgtaaaaataccgcgggagtcccggttccgccgatctccaaaaaaaagtaaaaagactaaaaaaagctgttttggtatcaaatacagccctattccagtttacatgtccaataagtgatagtgtaaagcgctttaattttgcagaataatttttatattatttctaacaaattaatttaaattatgtttagaaaataataataaatattatttatatttgttttctttttgtctcatttttaaaataaattcaattactctaaatatgctttaaacctaagctatggtaattataaaaacttaaataattttttaaaattaatattataaagcataaactaaaacaaaatgcactccgatcccagtcataatggcaaataaatattaaatgaattaaatttttaatgtgttggcttaacactcgtttacataattaaaggaaaattcgtcaattcgttagaatgatagtatttattgaaacagcttaattntcactaatttcggcaaacagttgngaaagtttttaaattaagcggaaatgttgacgactttgacacttttcaccattaacgtggaaaaatgaaaaactattagtttgtt

SEQ ID NO: 23365 - DNA, 1079 bp, Heterodera glycines
gttggaattgtctagagtgttgagcagaaaaagagataggcgttttccaaaattttcacaatcaaactcgcccagaaagaaattccggaaaaattagggttggcgctatcattccgtaaatggggttggaattgtctagagtgttgagcagaaaaagagataggcgtttttccaaaattttcacaatcaaactcgcccagaaagaaattccggaaaaattagggttggcgctatcattccgtaaatggggttggaattgtctagagtgttgagcagaaaaagagataggcgtttttccaaaattttcacaatcaaactcgcccagaaagaaattccggaaaaattagggttggcgctatcattccgtaaatggggttggaattgtctagagtgttgagcagaaaaagagataggcgtttttccaaaattttcacaatcaaactcgcccagaaagaaattccggaaaaattagggttggcgctattattccgtaaatggggttggaattgtctagagtgttgagcagaaaaagagataggcgtttttccaaaattttcacaatcaaactcgcccagaaagaaattccggaaaaattagggttggcgctatcattccgtaaatggggttggaattgtctagagtgttgagcagaaaaagagataggcgtttttccaaaattttcacaatcaaactcgcccagaaagaaattccggaaaaattagggttggcgctatcattccgtaaatggggttggaattgtctagagtgttgagcagaaaaagagataggcgtttttccaaaattttcacaatcaaactcgcccagaaagaaattccggaaaaattagggttggcgctatcattccgtaaatggggttggaattgtctagagtgttgagcagaaaaagagataggcgtttttccaaaattttcacaatcaaactcgcccagaaagaaattccggaaaaattagggttggtgctatcattccgtaaatggggttggaattgtctagagtgttgagcagaaaaagagataggcgtttttccaaattttcacaatcaactcgcccagaaagaa

SEQ ID NO: 23366 - DNA, 2320 bp, Heterodera glycines
cccccccccccttcaaaagaattttcagattccccattcacacaggggattctggaggtcttaactatgtcaaatgtaaattccgatcacgtattcgtgatcagcggcccaaataacccctaaaatcatatttttcgaagatttttcggtgaaaaaaattttccactcaaaaatcctcggtcaacacccctgtggtcccgaatctcaaaatcacttttatttttataaaaattctttaaaaagtgataaaaatgtaaaataaaatttatattatagagaaaaaaattgcggatttttgtagtattttacttttcccgaatagcttttcagaaggcagctacgaatttttttctgaaaaatcgaaaatttccagaaattctggaataactttttttgtttttgtggtataaatttcaaataaatctcataaaattctcccgattttttgctattttttatgctttaaatgagctgaattggaccattttgaggcgagttatgaatttttaaaatttaggttgaattttcaagggccaaaaattattgaattttcaaaatttttttaccaccctccaaaaaatccaaaacgcaatataaagtgcatattcgtgttcagcccctcaaattaccccagaaaagtattttttggcaattttaggagcaaaaaaatttctcacgaaatgcaaatccatggggtcccccctttggttttgcgtttcaaaatcacaattaattttataactttttttaaactcatggtaaaaacatgagataaagcacattaaatagagctcgaaattctctacaaaaaagctcttggacgatttttcgttaaaatcaacccctgacgagttacaggcccgggactgaaatgtcccggtcaggccaaaaaatttttctatttccggacaaaaatggaatttttttcaaaaatgccaccaatcgatagagctcgaaaaacggttgcttgaaagtggtctccgttttcctgggaaaaatcggcaaaaaataataaaattcaaaaacgaaaaattttcgagggggcctagctcgaaaaattttgaaaattttcaaaatctgaaaacgccatcggatgcagctttaaaaactgcacaaatgctcaagcggcgccaacccgctccgcttaacccccagcgagttattcccgaaaaacggaaaatgccgaaattgggtgccaaattttgccattttctgcagcattggcatttacagatagaacccccaaaccaacggcatgcagtgccaaacactccaacttgatttcctacctccaaacattttccgctcccgatgccctggaaaaagttgcgggccaaaaatcgcgacataaaaaaatttcacgccgtttcagcgccgccggcgctgaaccgtccaccggagcggaaaacccatatttttcccagatgcgcctcaaaaagttgtaagacccttccactactttcagggcgctcccggccttcggccgggagattttgtttttgaagacgaaaccccctttttctctatggtaatataaactagcgtgtggcgcagtagttgctcggtgtagacagttggctttgcacagtaattgcaaggtgtagacagtatacttttggtatatatgggcgggcgctgacatgagcgctttgataaaaatgctaaataaaatttatataaaagagaaaaaaattgcggattttatcaatatttttgtataccttagcacattgtttggaatgagttatgaatttttatgtgaaaaatcgaatttttcaactttttcaggaataacatttttcatattaattgtagaaaaatgcaaaaataatgataaaattctcccaatttttctgcattttttgatcatttaatcttcacatttgacccatttcaaagggagttattaatttttgaaaattcccccaaatttcccctgggcgaaaaatgaaaaattcaaacacacccaaatttggtcaaataaaaaatttaaaaaattgaaaaaaatatagaaaaattttagaaaatatttccagccccttagaacatcgttacacgtcataaaaatcatccacacgccgcggatttcgaaacccgggccccccctcccggggggcccccacacacaccactggaaccaaccggttctgcagggaaaaacttttttttgagttttcaaaattttttttatatcattccaaaagtctttgaaagttgcaacccaaaaggggcgggcggtttttcaaaggggcaaagggaaaaaaaaattatgggcaaaaaacccaaaaaaccgccgaaggggggcccggattttttttgg

SEQ ID NO: 23367 - DNA, 1841 bp, Heterodera glycines
gaaaaaaagagattgaattgggtcaaatttggaaaggttgtcagaactgagaaaagtgcgtttgcctgaaactcgtggggacacaacacaaagttaatatttttttctttataaaaataataaattaaaaaaaacttcttatttgttgctttttgaataaaatttgacaatttacaacactaaattgaaatttttggcacttttttcacatttctagcaaacctattttggggattttttagaacctaaaaatataagccctaataataacagatattttgtcaagtctcgtcatttaattttctttagcgttttaatttattcttaagcattccttcaggttaattaaggcgctgccgagtaaattttaaattaatattaatttcaaaatggaaaaagtcagctaaaattaaccaaaaaaaaagcaaacaaaataagctaagaagattttcttttcttcaggtccaccatgcaaggaaacattccgaactgtctccgcttaatcattttgaaacctgtttttattgtgtatagatggtcgatctattattgtacagttttaatgcatattttgtaaaatttgcaaaatttaaaaatgacaatttgcgtggggcctaattgaaattaagctcacctaataacgcgccaaatcgccttgcagaatggctccatgaatgtatttttcttctctaaatgtatgttatttcaatcaagacctgtacataatattaataattttgtatttatgtaaatttaaaaataaaattgaaacttaaatttaaaattttatttatgtgtcacttttttatatttgattattagggcccggatttttatgtttttacatattttttttgcggcttagttatggcgagagaagcccaaaaatagcattatctccgaacaatttttgatttagagcgacttataaaaacataaaaacacatattttggcgttttgtcacataaaatatgttagcacatattttggggtttggcacatattttgcacatattttggcatttttgagaaaaattgcaataaaaatacaagaaaattgaaaaatacaccccctaaaaatcgacttttttcctaattattaacataattttcaaattaaaaaattttttcttcgattgtagaaactaatgaaatctcgaattcattaattcgtcattggatttcgaagttctctgctggaactttcaatttatagaaatgatttatcaaaaaaagacaattttaccccaaacacttcgaaatgtatttgatttgcgttgtatgggctaaaaatgataaagaatgagatttttgggaatttttatgcaaaaacacacttattttttcaatttttaacacatattttagcacatattttggcatttttgggggtttttagcacatatttcagcattttttagcacatattttattacatatttcaggatttttagcacataaaaatccgggccctatttataaactcattaaattataaaataaaaactcgttcgaaaaaagagtgaaacaaattttggtaaaatataatgtgagttatgaattctcttttatatgcaaccacgcgaaaacgtcctggcccgcctaagaatagaccccaaaaattttcagtactgattttgattgcctctattttgtttttcaaattgtttagcattttctccgtgccactatttcttccgtcagttacgatgtttatatggtagcacagaaatgcgttttttgagctcctttcttcaaaagaattgaacaaaaaaaagttttgcctatttcactttacgaggatttttttccaaaaaataaccattttaaaaatttttat

SEQ ID NO: 23368 - DNA, 998 bp, Heterodera glycines
attttgaaggccgtccaaatgctgtgggtcaacctcatcttggacactctggcttctttggctcttgccactgaattgccaaacgaggacttactaaagcgaaagccctacgggaggacaaggttggccttttcactgtcaattattggcattttgtccgtatgccatggcattttggtgccattcactgcttccggtttcagtccgttgatttcgcgcacaatgatgaagaatatcattggccatgccgtttaccaactcaccgtgctgttcacgcttatcttcgcgggtgcctccctcttcgacattaccagcggtctttacgctccgctccatgcgccgccctcgcaacactttaccattgtgtttaacacctttgtgatgatgaccctctttaacgagatcaatgccagaaaaatccatggagagaggaacgtttttcaggtgtggcagccgatgaggaattccattgggcagccaaaggatgagtcagtcatttgagtcggggggggggggaagttatttgttgaaattaatgccaacactaaaattttttggcgcttttctctccattttttgatgttttccccagggcatgttcaataatccgatttactgcaccatttgggtgtttactctcatcctccaatatgttatcgtccaattcggcggtcgctggttcgctactgcaccgctgaagtgggagcaatggctgtggtgcttggcctttggcgtcggctctctcctctgggcacaagtgattattcccttccctccgtttggcttttcacggcttttccttctttaggtagtcatatcaatcccaaccaaaggccttccgaagagtttgaccattggcggtggggaggtggagccggagaccgccaacaaattgcgtgtgcatccgatgaaagtgacgaacggcgggaaaaaatgacagccgcatatagtcgcatttcgttaattgtaaaatgaataattgtttgaaagcatttttt

SEQ ID NO: 23369 - DNA, 1800 bp, Heterodera glycines
taatttaattgaattattacataaagtttatgtcttgttttgacagataaaatttagagaacaggatttttaaaaaaaatgaaattgtattttgttgttttttcttaataaacaactatttttccagattaatcaatgttaagaaaatttggccccgattttgagacattaaatttaattgaataaaaaacaaattatatattttttcttatattgttaattattcgccctcttcattttttcagaataatctggcccgaactgttgaaaccatcaaaatttgccttcagtccattctcgcggcccagcaattaaacagctgggacattaatcattgcaacgagggaatttacgtttatgattttttgttggtcgagcatttgtcgcaaaataactgtaataatattaataaaataaataaatatttatttttttttaaagattttgtgtcggtgcgctcggttatgccggccaacagtgcctttggattgttttactttgaaattaccgttcttcagatgaaatcgtgaattaaaaaaaaatgttttaaaataagtttgattatattaagggacgttggagttggacttgccccagcgcacatgaggatgcatgaattggtcgggcattttgagggaagcattgcgttgtggagcgacgggtctatccacagcaaattgccatgcgtgccggatgtgcttgacggattcgcacagtttggtcccggtgatgttgtcggatgcggaatggacgcaaacaaccggggcatttttttcacattgaatggccacaaaatttgtgagtaaatgaatggattcaaaagacaaaacaaattcgaattgtttcattcttaagcaagccaatttttgcaagccgaattgtttcacatgtatgcgtgctgtactctcgtggacatgaacgactccgtcaaggcaaatttcgggcccgactttctgttcaacattgtcgaaatgttgcccttctgatgggctgtttctcaatttgccagtggattatcggttgggaattgcgatgttgataataattttcaacactgttaacaaataaaccaaaataattgaattaaacccgttacacattaaataaagtaaattattttattttatgctttccattggtctcttattgcttttaaaattgatagttattacagttttcaacaaaaaaagttacctacccctttgtcccttccgatccatcctccgttcgtcaatctttgaccccaaacattttcttaaattctgtaatgcattaaatttatatgataatgatgatgattggattttatttaatttctatcgctgttggctaagtttattatgttacaatgattagcgatttttttttattgaaaaaggccaactatttttgcgtaataaaaggcagtaatgcctattgcataagtcactttatttgcacattaaaaaaaaagaatccattttagcttttgtattttattttttttttcacaacgcactcaatgtcgaatccgagggcaagttgtcagtaatgtttcctctttaaaaatatatttagaacctcactgaaattagagcaccgtttgcagttaatggacaaacaaattttgtaatcttttcgtttaagaataaatgtacatttcttacccggttttagcctgcgtggtatgatggtttgacatttccgttgccggtacaccaccaaccatacctgccttttccaccacgaccaccaccaccattgctgttaccgtcgcaagtacgacaaatgccatttcttcttaacccattcatcaatcca

SEQ ID NO: 23370 - DNA, 1127 bp, Heterodera glycines
gtgaatgtttatttttatcgaattctgaccctgtttggagtagattagactagaaaatatagaaaatttgaaaatcatgttcacactcccttctcccaggggtattattttgtaagtctttttttcaaaataacttttcaaaccccatttttcgcaccgtgaatgttatttttattgaattctgaaccggtttgagtagattagactagaaaaaattgaaaattttgaaatcatgtttcccactcccttctcccaggggtattattttgtaaagtctttttttccccaataaacttgtcaaaccccatttttcgcaccgtgaatgttatttttattgaattctgaaccgttttgagtagattagactataaaaaattgaaaattttgaaatcatgtttcccactcccttctcccaggggtattattttgtaaagtcttttttccccaataaacttgtcaaaccccatttttcgcaccgtgaatgttatttttattgaattctgaaccggtttgagtagattagactagaaaaaattgaaaattttgaaatcatgtttcccactcccttctcccaggggtattattttgtaaagtctttttttccccaataaacttgtcaaaccccatttttcgcaccgtgaatgttatttttattgaattctgagccgttttgagtagattagactagaaaaaattgaaaattttgaaatcatgtttcccactcccttctcccaggggtattattttgtaaagtctttttttccccaataaacttttcataccccatttttcgcaccgtgaatgttatttttattgaattctgaaccggtttgagtagattagactagaaaaaattgaaaattttgaaatcatgtttcccactcccttctcccaggggtattattttgtagtctttttttccccaataaacttttcaaaccccatttttcgcaccgtgaatgttatttttatcgaattctgaaccgttttgagtagattagactaaaaaaattgaaaattttgaaatcatgtttcccactcccttctcccaggggtattattttgtaaagtcttttttcccccataaacttgtcaaaccccatttttcgcaccgcgaatggtatttt

SEQ ID NO: 23371 - DNA, 1031 bp, Heterodera glycines
ttcatttaaataatttttatccaaaaaatttttttttgtgttttcggggcagtccccctgaaccgatgcgcccagatttatggggagaccgaatccttccggaatagcttcactatagcctgtactttaattctgcgttggatttttgctccccataattgtttgagtaccccaaacggacacttgaaaaaatcgattttttttgttttcggggcagtccccccgaaccgatgcgcccagatttatggggagaccgaatccttcgggaatagcttccctatagcctgtactttaattctgcgttggatttttgctccccataattgtttgagtaccccaaacggacacttgaaaaaatcgatttttttgttttcggggcagtccccccgaaccgatgcgcccagatttatggggagaccgaatccttcgggaatagcttccctatagcctgtactttaattctgcgttggatttttgctccccataattgtttgagtaccccaaacggacacttgaaaaaatcgatttttttgttttcggggcagtccccccgaaccgatgcgcccagatttatggggagaccgaatccttccggaatagcttccctatagcctgtactttaattctgcgttggatttttgctccccataattgtttgagtaccccaaacggacacttgaaaaaatcgatttttttgttttcggggcagtccccccgaaccgatgcgcccagatttatggggagaccgaatccttcgggagtagctttcctatagcctgtactttaattctgcgttggatttttgctccccataattgtttgagtaccccaaacggacacttgaaaaaatcattttttttgttttcggggcagtccccccgaaccgatgcgcccagatttatggggagaccgaatcctccggaatagcttcccctatagcctgtactttaaatcttgggttggatttttgctcccccaaattgtttgaggacccccaacggcaccttgaaaaatcgatttttttggttttc

SEQ ID NO: 23372 - DNA, 2959 bp, Heterodera glycines
  unsure (1)..(2959): unsure at all n locations
cctttctctcacatcgatctgtcccggcatttggtcgtcgtcgatctctcggcattggcccaccttttcgccaaattcgacaaagtctttgcaggaaagcacgacgtaagcagctgaaagagtaaaacgtattgaagaaaccataactgaataagaacatccaaaagtacggtacgccgcgctaccgtacattgaatgtgagtgtaccgttggcacactttgcccacacatttcgtcagcacaggcgcccttacgctgttgttgaatttgccctggtagcaagtgaactttggccctgaaagaaagagaaaactcgtcaaatcaggcgaaaagcccaaatgttgtaaaaattcgacaaaaaaacgcactgtttttgccgtctcgccgagattctcgaagccaacccaacgactcgtcactgtcggccgactgtccggcgaacaaaggcaaaatgaacagaaaaacaccaacgacggaagcaaacataggcaataacggaaagagaaaaatgaaaggcctcaaaaggaaattaaaaaaaacagaaaattggtgcgaatattgaaataaaaatcgtgtacaaaacgattttaatattgaaaatgcaaaacggacaaattaaatagaattttatgcagcgcaaaagtgaaaattaattggagagatcaaataatgtcaaaaccattcgacgttcccaaaaatatacaacatttgttttcgattcacaatcaccgattgatcattcattcatttgcttatgccttctgccaattgtcgtggcccttccacaacgatcttctgcaacaatttgtccaagagcacaaatgccaattggcgattcagtgtcggcatttggaagcactgaaagaggagacggacagacgccgccctttgcccatcggaagtgccatctttggcatcgccttccttctgctgatgatcatccatcatctgattttcctccccctcctccgtttgatcggtttcgtcgttagtggcatccgtcgacggacaaaaggaaaaagcggaggaaacggcggaagcgaatcgtccaaaagcccagcggagaaacggcgaaatgagcaaagtgcgctccacccatttctccacacagtgaagcgccaactcggcacgcaatttgcgctcctgtaaaatacggggcaacagtggcgacccgggcaaaaaactcggcatttgtttttacttgctccgaaatggtgcctggcaatttttctgctgccattgcttgcgtttgctgcttccccgccaatgccatcatcgcttttcgccgccgttgctgcattttctgttcatccgccgccgatggtttgcccaacggcgccgaagccatcgaattttgggagggcgttgcgctcagcgaagagggcacattttggaacagaatgagctcatgcagagaacggactgaaaaagaaaatcggagaaagtgccgaaatcaaacggaatctaaaacactttatggcaaaaaattgtagcagacgcacccaaataaatggccatttcaacgttcagcaaattatcgtccaaaatttgtgccgttttacgtcgcaaaaaagtggagaagagaaagccgacgaaagtgcgcagagagcacagcaaagactcgacccaaaagggaaaacggacaatcagaccaaaatggagggagaggaacagaaaaaggtcgtagaagtttctgaaagccaaaaaagagtccaaaatcggcaatagaaaatgcacccggtccacggcatagaggcgccaatttcgacagagtgccgttgttgttgctgaccattgtgactgtcatctagcaattgcttttctcgtggaatgtgtgccggtgccgtgcaattctttggtttgtttgttgagcaaaccgaagaaacagcgcttcttaagggggggggggggatttgggccaaaattggaaaatttatatntaaataattntaatttttaaaaaacaaacccgtatttgttcaatggtttttgacggttttaattttaattatttttctttctccgattaaattaaattaattacctcccctcgccaccgtcgaaacttcgcgcagttgccgtctcacttttcacggacattgtgtcgacacttcggtgaatgttttgttcggacgaacgctgttttggctgcaaggggaggtggttattggtttttaaagggcatataaaagttggctggtataccatagttgtagtcgtcgtcatgttgctgcacactgtcggcggtgccaaagtgtttgccaacaaattgaggatgaaaggcttcaggttctggccccgctcttttccgcccactttgcgcatcgctctgatcgggttcaaatcgggcaacaaattggttgtgccgcttccaccgcccgaccgccagccgccgccgttgccaacactgcccgtggccaattcgaacagacgggtcgagttctcctcactggtcaggaaaatatagagtaggtcggaacgtttcatgttgggcttaatttgggtggggtgaattggtcgtcgaccattcaaacggccgacttgttggagcagttgctgcaaaaagcgttcaaagtggatacggtacgtctccagcaatgctctgttgttccgtccgttgtgcaacagttgcagcgtcgtcttccggtcgggcaaagcgttaccgttgaccaaccgcaacatgttgttattgttgccaccgctggttatggccaaggattccctgaggcggtcctccaacgcaaaaaactcttcgcagcgatggccaaccgtccaaactttgggcagctcttcctcctcctcctctttctgtacatcaaatttatttagttttctctattgccgttctcttcattttgccattttttaaattttatatacttttcattgaatttttctctttttttgggtgctaaaaaagtggcctcttccccccgctggtcagtcagtggtcgcacct

SEQ ID NO: 23373 - DNA, 1831 bp, Heterodera glycines
attcgtgattgcaggaagagaaatactgtcgagaagaaaaatccaaaggacaaataactaatagggattttgtatatcttcaaataatattggcatttcatgaaaaaaattttctagtaaaagaattattaacatataaaataataaaaagaaaaactgtaaactatttttttattgcatcttaaaaaatttagcgcaatgaacattctacgataaaaatgattaatttataatattaaattatctttaaatataaacactaaacaatttgaaaataaaaaataattccaaaattaaagttaataaaaaaaggtgtaaaaacttgtaaatattaaggtcaatgccagtgctattatctaaattgcgaaagtaggtatgcgagaatgaggaagaacggcatatcataaattttaataaataaaaaatcaaaaagaatatgttacaaacaactacaggcatatttagacctaaaaatcagtggaccattagttatgattaattatgaaattaaatgaattttatcatcttgggtatacatatgacagaagtggaataagaaaactgtattttacaataattttgaaataatttattccgataaaattaattaaataattcaaaaaatatatttactttttgaaggttttcataaatgaaaaattacacaaaaattaaaataatttattttttaaaaaattgaaaataatttgtttaattaaaatgtatcacaaagttctgaagagggttcttcgaaaatcgagagcaaataaaaaatacgtgtaataaaaaatggtgaaatttaaaaaaacacggattaattttaaaaagcaaaataactgagaatgaaaaacataatttgtgataattattttcaggacatactttacaaatgagttttgtattaggaaaagccgaaagctccaagtaaaaattaaataaaaaccattaatttaagaccttgttaatcaagaattgtaatcatttaaattaactaaaataaattgttcaaacagttatatgtacaataaaaaaataaactacacaaaacactggtcgaaatataacagtaaaagataaaactaatcacttttatgtgtttaattacccacggttgagattactcaacatgctattttaataaataacaaaatacaaataaatttataatctctgttaaatcctaaatgtttatatattacaccaacgaaacataaattaattgcaaaaattgacattggctgggcctaattttaaagttgatattaggccagatacattagttagttaaatttcttgccaaaaactacatgattttaacatataatacaacaaataaaattgtttaaaaataaaaatttaaaaaaaggtctaaaaagcataattttatcgccgaagctaaaaaaattgtttcacattacagcaacattgaacttttattggaaatttcaattaatgccaaattgaggggggcatcttaaaaatttcgtgttttatctctaaaatttcaaaattaagtttataatttttcactaaaaaatcaatctatttaagagattatgataattaaattttatcttaaaatacattgcattatgacgagtacgtgatttgtagggtttaaaaatgaaaaataataactttttaaataaataattcatatattgaaaaaataaataaaagtaaataaatattatagactcattgcataaaaaggtaacaagtatcgtttcccagcggtgcctacagtttgaatgatatcaaaaatgaaaaaataaaccataattttaaaatttcagaaaaaagttgaaaaataatagtttacgaagtagtt

SEQ ID NO: 23374 - DNA, 1096 bp, Heterodera glycines
aaaagacattaaattctcgcagaataatgccatgccattaaccgtaaataacggaacttccacccatcggccaatggatcttcttgaattggatgaactgcacggacccgatcaggttttcgataacgaacgaaggaatgggtcgccggattcgatcactgccgaaattttgcgttccaagcaattgaaatcgatgaaggtaaatgaagctgacattcttgtaaataattaattggaaatgcaaaaaacaggtaaatactggacaaaaaccaaatgcgacaccgaccaatgaccagccgaaaagtgaagcaaaaaagttggccacggtttacatgcaaatcaaacgcacttttcacccgtggattcgtggcccatttgacaaggggttgaaggtaaatcataaatattgacaaattacatggtacattcattcatctttcaatgtttaggcaatggttagggcgggtgtcagcatcgacttcaagacgaattcgaatgacattgttttgagtgggactgaccacgcgcgggtggacgaatacgcggacaaactgcgcacgttgcgcgacggaccgatcagaagtgccaaagagcggaaatgtcgcgtggcagccaaacttagcaacccaatcggcgaagtgacagacgatatattggcagaaactggtgccatcgttgcccttccgatggtaatttaattgagagaagaaccgggcagagacgggggcattgtttcaatattcctttgaatttaactgcattatctgacgcttcctttttgttaaaaatattgcctaaattctttaggattgtgcccaaggcaatgtgtcgggaatggaaatttcgctgttgggttcagcggcacaaattacgcacgcttgggactgtcttcgcgatttattcggaacgcacgacattggggaactactggcagaagcgagggggaaagactttggggacgagaaaattttgcgttgcatcgccgcacaacaaaagtcgcaaccctcgggcgctttcggtgctggtcgaaaacggaaagaatcgtcgagccgaagagagaggaaagcaaactgacaaagagacccgatcaagggtg

SEQ ID NO: 23375 - DNA, 2018 bp, Heterodera glycines
  unsure (1)..(2018): unsure at all n locations
gaaagggtacagaggcatgacaacgcaaaaaagaattttcaggtcggacggctccatttctcgggacccgtcgaagctgtcgaagaattgcacaagaaaataactgctaagattagcctgttgaacaaaaacggctcaatgatngaaggacagcattagcatggagaagcaattccattgtcaagtgatcggaaagggcggcgagtttttacgaaggctgaaaaggaagcacggagtgaaggaaatcaatgtgccatcagagttttccaactcggaccnaggtgggcatggagaaggtcaagcaaagggacccctccgtttttcagattcatattgaagggccctctctcttcagtcttcgctcatgcaaagacgacctgcttaaactgttggatgattggcgcaacgattgctacgaggaggtgccggtccagcgtcgttttgtgccgatgattcggggaaaaaattcgaacaaaattgtcaatctgctggacggactgcccagggtcgaagtggacttaccgccgcacacaaacaacgacgcgacggaggacagtctgataaaaattaggggacataaatctgaggtgagtcggacaccgacagaaattatttgaaaataatgccctccaatgttttccgttaggtcactgtgtttgttgaacgtctcaaagagttcgtcgacaatttggccaagaatcatcacgaagacttcattcaattgcccatggacgaccctaatcattcttctttggagtttgccaaattcgtttgtgcaaaaaagaagcagatagagcatcggttgcccaagttgaagttggacttccaaagcgatgacgacacagcacaaaatgcgaaccgaacggttcgactgattgggccgctggatcaggtggaagccgccaaagagacagtgttggaactcatcgggagccttagggtctgcatttgattaatttattaattaaaaattggaataaaactattcccagagtatcgtcgtcgtcaaccgtgccccttccgttctgtatatcacttgtgaccctaagcatcacacagaatttctgcggaataatggccaattgctaaaggagataaaagaggaccatggacggtgcctcatcaacctgaacaaaaaaatggaacgctttgagatcagttgcgatttaaaacatagcggcaaccgatcggcggcaattgagtcgtccaaggcgcacattgagaagatcatcaatatgttggtgggttgtagaagattatgagtcaacaaatgcccattctctgtcaaggagtccaaggtggttcaccacgtgctcattccaattcgccaccatcgcaaattgggcccacacctcagctcccttcgggagcagttcaacgtccgtattcaaatgccgtccaaaagcactgacggacagccgattgtggtcactgggcctgacaaagccagcgttgaagcgacggagaaggcgctgagagcactgtgcccagtgacggaactcatcgaaatgaacgcggaacatcgctcgtcacttatgggacgtggcggagcaattttacaagaactcatcaggaagcattcggtaactcgtcggaatgccttttttctcacaatcagcagggaggttacaattagtcagattttcgcgcataaataaacaataaaaccgttttttttgtatttaaactttccaggtccaaatagtcgttccccgaggtgaagcaagttcaagctgtaatgtttcggtttccggtgcccccgaagacgtccgtgcttgtcttatggaaatccgtgaacatattttaccaattacacgcacaattttggttacacctgaaattcgaggtgaacgcatactttattgacttatattctataaataatccattaattaattaacaatttcaggctccttgatcggctctgggggtcacaaggtgaaggagctttgtgacaaatttctcgtgaaaattcatttttcgaacaaaagtgcatactgttgtgaaattacgtaacc

SEQ ID NO: 23376 - DNA, 2392 bp, Heterodera glycines
  unsure (1)..(2392): unsure at all n locations
tcttgcccccccctgggcagagagatgcgtattcaccatacgagagagaagagaattagagaaaaagagtaattcataaatctcgaaaaaacgattaaattgtaaagagacctcggccactaaaaaacctcagcctaatggtattctcgggtacgcttagcaccactgcgcgagtgttcagccgatttttttgtgcccccccccaattaatcgatatcaacggaaattatcgatttgtgaacgcaacaatttttaaaacacagaattatgaattgaaaaaaacttaagaaaaatgatcggaataaaccccctcggttctcttttgatcttcgaaaattaattagtgcgggaaataaaggactatgaaaaaccgtgaaataatggttttaaattagtaatttttttgcaataatttttaatcacgaaatattaaaaatatttatattgggataaatgttttttaattcggtaataaatttttttcaaatcattctatatccgttttttcatgtgatgaattaacaattaaaaaggatagtttgctgggactattcctcccactaagcagtattttgtcctatggtatttttattgcggaaataaaggactatgaaaatgcacgattaaattaataaataaattcttttcaaatctatcccatattggaattcatacatctgatgaattcacaattaaaaggcttgtattttgggactccttccattaatcaataaacctcacacccaataccgaaaaattataatatgaataaatgaaaaatattttttaatgcacatgtaattaagaatcgaaaaaataaatttttttgcgggaaatgaagggcaattttattctcgtttaatttttattaataagtatttttcccgatttatatcatgaaaattataataaatattttcatttcgggaaaattgctctgttgtcaaagggttttaaaaaatatcagagaatttcgccctcatctaaagctatcagttatatctatttgttgttgttaaaaaataattaaaaccattaactaataatatatgattaaaaatagttaaaataaaaatctgatagggtatggcgggtaatacgctgcccccctcaaaatgaccccaacaaatcccgaggggtggggtacccaccaaaaaatcgttggcccacctgcttacgtgtggtcggaatggtgcaacacttttttttgaaaagcggcacgtatgtaagaagtgacccaaaggtcgatgcgcacgccaccccattcccgcccccaccaaccccctgccccatgggcacctgcccgccagcgaaacgtcgaaatgagcactcagacccccgcccccaccaaccccatgccccatgggcacctgcccgccagcgaaacgtcgaaatgagcactcagacctcatggattccacacattgtcaaaagtggagtccttctgtctttgattgatagggttgtctttgtacctgataaaaatagtcggtcataaatttgaagtccttctgcctttgattgctagggttctctttgtaccgcataaaaatagtcggtcattaatttgaagctccaaatcacccacacgctatgcaatgctcttcatccgtccacgccagtgtggcaaatgcccacaacaacagcggcgggagccaataatgccaaggtggagcaaaagccgccggaattgaatgccgtgccgaaaataatggcatcgacaatggcattgcgcaatggtggtcagctgcagatgaacaacggcgggaactcaacaaaatcgacagcaacaaacggtgccgtcgtcaaccattccaagcagtaccaggaacaactgctggagcaacaacggagagcgagggaggcgcagagcaacgacgactccaacgagtcagcagcaacaacaacgatggcatatgatgaggagctgcagcagcacaaccaccaaagtttgaagcaggacaggggagaggaggagagagaagaggacaacagcaggcgaagacaactgctcagggaacaatgcttcaaggtggggggagggtgggataagggcatggactggtcgagaatcgagactagaggaaataggtgggggggggggcgatggaagaagggcatggcataaacaggtcgagagtctcgaggccggaggaaatttaattttaatggattgagaaatgtgtgtaatctggcaggtcaatatgttaagtgtaatcacaatgacgtttatttttttaattgctgaactctcccgtaaaaatggaaaagaaatgtctttcagcacccctataaaaaaggcactgttgngacaccgacaaaattggcacttttctcccgatggttccgcaaagggtgcaccgacgacagctcggcacaaattgtgcgcatg

SEQ ID NO: 23377 - DNA, 1315 bp, Heterodera glycines
taaaaaatacattttttacataaatggaaaatataatattctataattttttcatcaaatattgctaaattttttctcatttgttgcatcaatataaaatcgaagatttttcaaatatgtcctgattaagaagccaactgagaaatattttcaattttaaaaatgaacaaaattaaaaataataattaatggatattaaataaatatcttcaaaaatatacttaaaatatataaatattttttaattaggaggaagcattgacaaataataaataaatgtattaagaaccgccgaggataaattttagtaaaaacaatctcagagcattttggactagtcagtgcaattagttttttttaaggggattgttgccaaatgcaaaaaacacaaagcaaagggaatgatgaaaggaatggatggcatttgcaactgaggcgatgggttagaaatggcacgagaagttggaaatgaaaggagcagcagggttggcttgggatcgtgaacagggtgctaataatgtcattatgtatataaaatcgtgtgtttgtaaatctcgagaaaggatttttacatttttccaatttttctagagctatgtttggtattaaaggtacaaaaattgtttatctcagctcttagaagatcaaaaaaatgtttatcatttttaggtctattattttgcgttttctctctctctctctctctcactctctctcttctctttatattctgttatactgccatacgctattaaaaatctttacgaatttattgtaaaatttgaaaactttgtcaagttccaaaaagaaattttgataattcaaaaaactccgaatcttgcacatttataaaacaaggagcatgctttgtaatcaaaagaattcattattttttaaagaaatgcctttgaaaataaatgagaggaacttaccaattattgcaaaaaatttctttacagtatatctatttataaagggtgtactgcaataaaagctctaagtgtcaatcatagtcttcgcattagttctttaataatgcatgtttacgataatttttaaaaaagttaaaaaataaataattttactaaatttcaagctaaaaatgataactttaattttttcattgcttgcattataataaaggcttaaatttttgtaaaaaaattagtgactattaaaactaacaaagaatgtgaatgtgatgtagcttattatttcgtgtttaccgtagccctttactaagtacagtatgtcctaatatctcattagcggatcatttatgccccgcccactttaagtcttttgttgccctcca

SEQ ID NO: 23378 - DNA, 2836 bp, Heterodera glycines
  unsure (1)..(2836): unsure at all n locations
caaatttagagtgtttaaatttttntggctaataaaatcctcccgtgattgtnttgtattnataatggtgaggaanttgctttattaagtngtgtttttatagggttgnnattagattgatttgataagtggtagaagttttagaagattttttttcattatgagtgtgaatgttggtggttattggttttctggaattatataagttttgataatttaaaaattttatgtaatgtaagatgattgatttgttttgccgagcaattatcgcaatttgtacaaatattggcgcagcgtcaaaaggaccgattttatattttacaaggtaggtaatctatagagtgcttgctcagctttcagcacaaaaaatcaccgattcagcactgtaaacagcaccaaattttcccaaaataatgattataaaaaacctccaaaataggtgctaaaatggtaatgagatacataattttaaaaaatcaaaatcttgtcaaaaaaataaatttaaaaaaacttaggagatgaattatttttgataaaatttttcatttcttaagggtgtatttttctgaaattttttgggtcgtttctcaggggtgtattttcgtttttattgcatttttgttaataaattttttgaaaattgctgaaaatattttcgaaaattcctcaaaatgacgaaacagcacaaaaaaagcaccaaaatgccaaatcagcacaaaaaccaaaaaatcgagaaatcagcatgaaaaaagtggacatagaagcctcaaaccaagttagaaatgcgtttttcatgcttattatcacgccccaagttagcaaaaaaacaaaaaaacaacagcatatgctgcaaaatgagcactctagtaatctattttacctaattgaaaaatattcaaaaaattaaatttaatcccgattttagtacggaatatcggcaggcattccaaacggagttccaatttgttttcagaagaatttcaaatcaaaatcaagtaattccactgcagaatacgacacaattatgagaagtttttttttgcaaagaaaaaggaggaaattgaagttctctactgatatttttacaattagccaatttttaagggttcgtgataacgttcggatgtctaattgttgtctataagtaatcaactaatttaatgggtttatcgaataaaataaataaaattcaaagaaaaaatcatttttattaattaaattaaagtaaaatttgtcgataaaaacccgcgactcgagaccaagactctcaaaatattttatttgggttttggttttaatttcggtgtttggcttcgacttcataaaggctaacaataagcacgaaaaacttggattttctggacaaaatttttagaatttattatcacaagtgaccgatgtttttttcaacttttcaaaaaatgattaaagaaatttcaaaaacccaggtccaggcctgggtccaggcatcgaggagcctggatttttcctggacctggatttttttccaggtccaacatggaatgcaggtccatgattttttcaaaaaagcagatctctaaaaattttccaaaaataaaacgtaaattcttgtaatttttaaaaaccacctttaccaacatacagattttattaactaattcatttcataacatgtgccaatatttgttgggggagggctctataaatccaatcgtttttttttgaatttgatcaattccttcgaatgtttggcattctgtttattcatccttgtctttgttgtagctgcttccatccggctttaggaatggatttacacgctttgtgctggtgctgctccccttctcgtcctcactgttctgttgatcaatctcctaaaaaattatttggaatttaatttttgaatttttgcccttattgatccaacgaattttcagttaggtaattggaaaatttaatattttttttttgccaaattgtacacctaataacttttctgcaaatctgacatctcggaaattttcgaaaaaatgtattatcttaaagaattatcgaatagacttaggccttttcaaattgtcgattttttttaattggattaagcgtattttttatcaaatttttgaaaattttgtaattctcaaaaatatctctcatgctaacattaatgctaagccaaatttgattaatacccaatcttggtaaagaaatttattacgaaaagcccgttttaaaaagccgtggaaaaggcccgttcggcgctccgttggccaaaacgggctttttggcatgctgttgcctgacggctttttcctacaaactaaattttaaggccaggagcggaaaaattttgccgcattttttgagatgttttccaaaatttttctctaagaaagttcgagcaaaaagcccatctcagtaccaacgagccctattccgggctttaaaagcaattatttcaacaataattatattcattaactaattaattttattcccgtcattttttttaccgcatttttgatggaaccaattagcggtgccgtcacggaagaggacggttcattgccaaaaaatgtccaaataattttccatttcctttcgactaccgtaaactcctaatctttgaaacggacccaatctttgaatggatcaaatctttggaacgaatgtatttgctctccgatggcaattaaatgaacgttgcggtggaccaattttttttgccatgaaaaaaagcaaatttctctttggcactttcatctcctggtgatcattagcggtcatcttgctgaaggaaaatccacctgaaaaatcttggtggaaattaaaatgcccaaaaatttttaaaaaa

SEQ ID NO: 23379 - DNA, 1344 bp, Heterodera glycines
  unsure (1)..(1344): unsure at all n locations
ataaattcttccaactaataattatacccacagtttcaaataattaaatgtttctatcaaattagacactttgttgcacttttaattggcttaatggtatagtggaaaatgtttttttcgggtgcggaactatttgttctgagctcggcttaaagatagcttaacctgatttaaatgtagcaaataatttggggttgtgtttgtataaatagataaagcttttgcttttcgtttcattcaaaattgttgaaactattatttaaattctatttttattaattgctatttctttataaatttttaatttttttgttgaaatcgaaaatttaccgactgccgataagtaataatttttagtatttaattcggcatttcatttattttttcaaaaaaataataatgtgttaagttatttagcgtatttcttctattaatagcctccctctctattagaaccccctctccgataaagctgttaaaaacgattttggagttatgccaaaaaatgttttctgttttttagtaaaaaggttaaagcgtataatcaaattacaaaaataaaaataaaataaaataaactttcttcttagaatgcgtatatggtttaatatagagtgccacgggaccgggacctggtagcggacaactgagtacaactgagtaccaaggtcccggttttgaccgggaccgggactagtcccggttttttcccggttttcccagccaaaaattcccggattttcaacccaaaaaggtcccggtcccgggtttgcccaaaattcccggtcccgtggcactctagtttaataatttatagatttttaaatttatttaccgtttataattgttttataataatataaatttaattatttgaaaattgagccccctgcggctctattagaggaaatacttacgtaaatcgatttgcaaatatttgttacctaaaaaaagatcaggaactggatcaggcactggatcaggcactggatcaagcactggatcaggcactggatcaggaactggattaggcactggatcaggcactggatcaggaactggatcaggcactggatcaggaactggatcgagtacgttatttaaattgtaaaattttagaaaaaacatccctaaatttaaaaaatttccaaaaattgattccataaaatatatttttttagattcgtctgatttaaaataaaaaaattttaattcaaatttgttaaaatgcattcaatttttagcaacacccacctcaacatgcacagatngaggcgactgtttttgcaaatgaaaacaatggggtgaaaaatatttcaaaattgttaaattgaaaattttttt

SEQ ID NO: 23380 - DNA, 898 bp, Heterodera glycines
tggcggatttacgaaatgcgctggcggttttacgaaatgcgctggcggttttacgaaatgcgctggcggttttacgaaatgcaccagcacgcttttaaagtaccttaattaaatattctatttcatttttaattgagaatttaaaagtgataaaatataagcgattggaaaaatgaggtctgacgatgaagccatctaatatagcttacttattaaaggtaatcgcttcttttctcagcaataaaattaagaaattttaacatttaaaataaatcccaattaaatttattaaatttggcttcttcctttcctcctccgcttcttttctgtgctttttgttaaccttttatttcttcctttttctccgtttctttttgtttcttttccctcaaatctttcaattttttgttaagctcgtccattaattttttgaaatttggcattttgtttgaatttttaaattttccgttaaatgccttcttccatttgttccataatttctttatttccaaccattttttgctttcgccctctttatgaagtgccaattccaacagattccattccgccatttttatatgctttaaattggcataattccaattgccgtttttttgcatttgttccaattcactgatcaattcgggcaaaatgaaaagttgtttatctttaagaaataattgaggttaaaatgaaaatcaatgctccatttttacctttatcaaggttcaaatcgagttttatcagctgggaaaagttcattatattctcatcaaagtttttgatcatttcctcctttattctaaaggacaaaattcgttggacgattaaaatatatatttttttaatttcgaggatctatcgatcaccatgaggagtgaagtgatctgatcatatt

SEQ ID NO: 23381 - DNA, 1523 bp, Heterodera glycines
aataataaaattaccgatggcttttttcacaattactttatcttccaaatacgcataataaggcaacttccaatttggaatgctgattttgacaatttcattctcaattgttattttgtaattgaaaaaatcgaatgcggaatagcttaacaaaatatccaattaattaacaattattattaacattaaactttgaagctaaaaaggttgttttttacaaaattttaaaccaaaaattgcagaagttcctttttttaaatgtgcaatttaaattactccgtttttagtgcaaatgaaagtgttgacagtgcaaattccttttgttccatttgtaagcagcacaaacgaattgccattgtaaaaagcaatttgaacaatttcaaattgactgatggccaaattgacttttgccgcttttccatcaccaattctttttcttcttccgacacaacgctttcaattgtttttataaagtctatttcttcatagattggcatatttttagccaaatttcttaaaaaataaattttattatttttttgttaatggcatcagaaataaaactaatgctaatattaagatgagtaatttctccaaaacttcattgtcatttctttcgtaaaaaaacattttaattcattgattttctatatggaaagagatattccaagtttttgaaaaagatagagaaaattaataaattttttgttttttaagaattacagcaaagtttcattttttccaccaaaatttgaatagtttaaataatttttttagaaaaattttctttctgtccccattgaaaaaactttcgattatttcgatttaatgtcaaaaatgaaattcggacctttcaacgaatgcataaagtcgctcaatgaattgttcgcacatttgcagaggaaattccattaattgatgcttttcgtcatatttcactttgttcgaatggcttttcagagtttcgtataaaatttcaccaaattttacattttccaattcccattcatttaattctatgcctattttggcagatttggaactgattatttcactgcttctgttgtactccgttttgatctgatccaatatggccaaaagggcactcaacgatttgcatttatccgcaaatgattttttcgaaaaaaccattgaaaattttttcagtttttctgtgctttctcctttatattccaagctgcttagaatagcttccaaaaatttgaattcatccaattcggtgatcttttgaattgtttcccttttcacctcgcgcgctttgagcgcagaatgaacggcgttttgaagagcatcgcaaaattgcatcacagcttaaacaacccaattagagaattgaataattaaattgaatgacctttgcattcgcttttctcaattccgattactttcgcataattccacaacggttcacggaatattttaatttctaattgctcggaacttaaggaaagtaagaatgttaaagtgcgtgctaatggggagtagtttcataacgatagcta

SEQ ID NO: 23382 - DNA, 1782 bp, Heterodera glycines
  unsure (1)..(1782): unsure at all n locations
ttcgtccgtttcaaagtggccggaatatcaatttttctcacggtgttttggtcttcatcgttcttcaccagagggacctcaagcgcagcatttcgcagcccaactcgaacagatattcgtagcactccaacctggaaacggaatgccaaatatcaaatgccatttttgaatggcaattataatgctaattttgaacacggaatgccaaatcgctcacatcattttggtccgttgccacgtgttgctgccgaatacgaagaagccgtgcccccggacgagaacgccactcgcttcgggatatctgcacaaagtcttcatcagttgaggctgaaagtgacagtgatcagattggcaaacattcatcagcagagcttacgcaaaggacgaactcgttgatttccgtttcgatgatcggcaccaccaaagtgtcaacattttccattcggcgtttggtctgacggttttcgcaccccttaattggaacagaaatgaagcccaattttggccatcagttcgactgggctttacctggatcatctcctggcccgaaatcatgaatttgtctccttgaatcagctgagtgatcagattgccccattttgtgtgcgtgtgaaccacacaaaccaaatctgagcaattcggatcattatgaggtcgttaaaatgtgcccgactgctgctgcttcacctgggttgtcacggagcaaataatacggcgcagtcggcgttctgtccgggtccgccggacgcttcaaaattgtgccggccgatttcatcacaaaatgctcatttctgaataacaaatccaaattggacacattcattttcttttggctcactcgttgaatatctccttggccaacgagttggacgagttcagaatcagaagctcgcccgtcttcggacacttaaagcgcaccgccatgccggcgccgttgtcgcgcatccatcccaaattgtagaaatggcggattagttcggccatccgtgctttcgtgatcggcacattgtccttaatttcgtttcgttttaattcgaatttcaattcccgttcactcaccgaccatccctccgtgccgtcgtcgttgaccctttccacaaccacggacattttcttccgaatctccagcttcttctttgcctcctcctccttcttcagcgctgcgcgcagttcctccttctcctctcgatcatatgtgcttttcgtgcatggcgaaattcccctcagggctttcaatggcatttttaatatgcaaataaatttttgctaaattggaaaaatgcattttgtccaatcagttcaaagtgccctcggattgaattaaagttaatttgaagtttgtttcgttttgatttggccgcccttttccgtccgtcccttttttaaatacctttctttcattcgttggttgcccttaatgcgtctcacccatgattcaaattaatcatccattcattttaatcccccgccccctcacaatttgaggacacaaaaccgaaaaggacttttaatgcattttgaaccgtgatgaacagagaaataacaacatttgttgacgcacggactttgtaagggaaatgcaattttgacaagtcaaattcggaaatttgaaaaggcttaattaattttaatgggtcaaataaaactcgaaatgttgcgaaatgcccatttttggattaccggattaggcagccattaagggactanagccataaatcacagtttgtgaccagttgggttgaaactatgaaaatgtaaaattcacaaagaagaatctgtcgc

SEQ ID NO: 23383 - DNA, 2228 bp, Heterodera glycines
agcggaataagaaaatttttatgacaaaatataaaaatgatcgaaataaaagcatatacaaatatttatatatataagatctaatggatccattgaatcaatcttcaaatgatcatacatataaatacacaaagaatctgaatacttaatataacttaatcatacttgtccttcctaaaaattataaatcaaataagataataataaatattgaccatccacgaggcaggtcatttctgggtgtaggacaagaaattaaaaatatattccaaatgaaaaaatatataaataatggcaaaaaaaaagtaaataattgaattatttctttaataatttgttaatattcttaaatttaataaaaaacattggtgctaacgaaggcccttttgttttttaattcacaagaatgcattttgaagatccaatattaaataatacagaaaaaacaaagcaatgaaaatttaatttactaataaatatttatttcaattttttcggaaagcaattggaaatcaaaaacttttatcaaaaaagtcatttttggactaatttttgagaacatttttcaatttttattggtgagatagaaattaagaaaaataattttttttaaaagaatcaatacttaaataaaaaaattcattaaaataaaacaaataatttaaaaagcaaaaatataaacacattatttaaacttcagaagaaggaattaatatgatttctttataaaaatttatccaagaagtttttgcactgttaaggatgactatttcggtaggagagggtcgccagcgaatggggaaaagaggaaatttattcaattttgaacatttttttaacaaaattcataaaaatccaaaaaaaaatttttacccgtcggcgcctgtcggcgccgctgtgcacgcaaaaaagccttttaatgtaaaaatgatcgccaattgtctcaaaacagcaaaaattgatcattttttggtgaaaatctgttaatctcggtcacgtttttcggttcccggtaaaaatcacttctcgcacatccctaatgtacaaggagttcaaaatcaagaattgatatgtataaaatattttaaaatgacataaattaaaagcaaataaatacgtaaaaataaatcaagtaaaaattacattaataaataaatgaaaataacaaaaattaaaaattatctattaaaaatattttttattataatactaatcgcgtttttgcgttatttaatttttggattcgcatttattataagttgcttatcaaagaataaaaaccagaaattctgatcgatcgacttgaacatatggaattcaaaagaagataaaaaatataataaaaagataattaagaaaattaattcattaattaaaaattgtcacaagatggagatattcttcgtggagaagacgtgggacgtataaaggaaacgaaaaaaagtataataaatttgtgttattattgacctaaaatactcacacgttcatgatgagaaactagttaaaaattaaactagtaaaaataaaattaattattaattacatgttaaaaatttgcggccaagagtgtttggcgtccgaatcccgaaatccgaatcccgaaactcgacatttttctcgtcccgaaacccgacccgatgattttgggtcgggtttcgggataaaatatgaatttttattaaaaatttatgaaaatattgtttttatgaaaacaaaattttttcttttttttgttcattatcagggatgggatttttagttgcaaaaaatcgcgaaatatttgcctagatagttgctaaaaaactgaaaatgcccaaaatagttgctaaaaaaagctgccaaaattggaataactgcttttttggacaaaaaatctgttaccaaatttcactcaaattttcaaattttttccctgaaggcgcccgtcgccggaagactttttggcccataactttcaatcaaattaagcattcttggtgttgttcgatagctttatgcgtttataattaatttgcaaaatttcaatattttcattaagtttcaaaaaaattatggccataagaaacttaaaaacctagtttgtttaacttttttgtcctggtttttttgtgcatgaataaaaaatttttaaatttgcatgttaatagagtttttgaaatgctttcggacaataaccaagaatgtttaatatggttgggaaggaaaaaagttatggtccaaaaatt

SEQ ID NO: 23384 - DNA, 2017 bp, Heterodera glycines
attttaattagagttgagctggaccgaaaattttgggcttaaccgggaccttttcgggttgaaaaaccgggaatttttggctggaaaaccgggactagtcccggtcccggtcaaaaccgggacttcggtactcagttgtccgtgtccaggtcccggtcccgctcaactctaattttaatgcgttttattcacctttttggcaacattttcatttcttggcaaaaaatatacaaaaatgaaagcatttttcatggcaaaatttcatttactcttttttgacagaatcccaatccaccgtcctactcatttggtggaccgatggaaagcattgaggcgaaagggccgttggaattgcccaccaaaacgcggcttaaggttttttgttttttaggggaaaacaattttaaaaaaaaattaaatttacgatttataaaaattgggccttgaaaaacaaaacatttcaaaaaagagattacctatttctttaataatccgtctgactttttttagtttgtcaaattaaatgcattttttggaagaaaaaaaatttttttgagccactgaacccaattttttaaaatatttttcgaatttctcccccaccccaaaaaaaaaaataaatttggtttttcaggtgcgtatcaaacggttggacattgtcggctcgtggcgttgggtggacggcaaagaggacgcgtgcggcatttgccgtactccgttcgagacctgttgcatggactgcaaattcccgggcgacgaatgtccattggtatacatatttattgctggcggcgggtggttttggattttaccggatttcgcggattaattgaacctgtcgtactctaggcctaaactagtggcaaatcgtttccccggtgttgccccacatttgcgtctttgtccaaaatcggactcaaaattgaatttttcaagcaccatgatagcctaatccgcattagaattaagaaaacgcggtcttttggttcattaggatcaataatttgttgtttgaaaattttattattttttcaaaaattttttgaagatcaaatgatcggatacaatcacttcactttcaatcgctcatttaaagctgtttatacaatcaagaaatgcaaaaaacttaattttgaacccgattttggacaaaggcgcaaatgtcgggacacgcgataagaaactgattgtgccaagatcgtcagcaaatttttgaaaaaaaaataaaaataaatttaaacaaccaaattattgttcctattccccggtctctatgatggaacacaacctatgtcaaacaacataaggacacttctttgaaattgaggactcaaaaattcaaaaaaaaattttttgaattttttttgccaggtgttgggccagtgcaaacatccgttccacatgcattgcattgtgaagtggacgaacacgcaaagcgggcagaagcccgcctgtccgctgtgccgtcaggagtggaaatttgcgaccagctgattttttttgcggggagattattactagagatcgacctggacctggatccaggcctggatttttcctggatccaggtccaggtcatttttcggcaacctggatttttcctggacctggattttcctggatttttgtccaggaaatccaggtccaggtttttttcaaaatgtcgatctctagaaattattaaaatagtattggaaaaacattttctgctgcccaaattaaacaccaaaccagtaactcgaaatttttgctaaactaaatttggtgcattaaatcccgcagaggtcccgcatttaaaatttgcgggacccgaacaggatttcggattttttactataccgacaaatattgctatactatactaaatatcggcactggtatcgatgagacggcattacgcttctatccccggtgatgatattttctgcagatatcgcaacctgacaattggatgacagaaacagtaaactcagtgattcactgcctgctcagatggtgactgatagaactgggactg

SEQ ID NO: 23385 - DNA, 1700 bp, Heterodera glycines
gatttaattattaataaaaaaatatttggtgaagtaattggttattgttgggttattgaatatcaaaaaagaggtctcccacatttgcattttttaataactttacatccaaaagacaaatggcataatagtgaagatattgataaatttatatcagctgaaattcctgatgaaaaaatagatcccgaactttatgaaattataacaaatagtatgatgcatggaccatgttcagaaaaatcattgtgttggaacaaaacaaaaaaaaaatgtaacaaaaaatttcctaaacaatttcgagaagtgactgttataaatgaagacggttatccgctttataaaaggcctgataatggacgttatatatatagaaaagggcaaaaactgtcaaatcaatttgtggtaccatataacccatttttgagtaaaacatttagagcacacataaatgttgaaagagtaacagatatttcagttgttaaatatttatatgaatatatatataaaggatatgacgcagcaaccatagaatgcgtacaaattggagaagacggcacaaaaaaaatattaaattatgacgaagtcgctaaatatttagaggcacggtatttaagtccatgcgaagcatgctggagaatctttaaatttccgatgcaaggaaaatcccattcagttgatcaattggatgtgcacttagaaaatacccaaagagttttttatagaaaaaatgcgactgatcaagaaatcgaagaggcattgttaaaaaattcaaccttaactgcttattttaagttttgcctagaaaatcctgataaagaaattaaatacactgatatgccaaaatattgtacctgggttaaaaaagataaaaaatggaaatatccaagacaaggttaccaaaataaaattggtagaatggtaccaatacacccatctgaaacagagaaatattatttgcgttttcttttgctaaatgtttatggaaaaagttttaaagatttaaagaccgttaatggagttgaatatgattcattcggtaaggcatgtttggctagagggttggtgagagacgatgaggaatggcacaaatgtttagaagaagccacgtatttttctcgaaaacacgcgaaaggcttaagaactttatttgcaaatatattggtacattgtgcaccaaaatatcccgccagattatcgggattcattcaaagagtttatggttgatgacattaaaagaaaaaatccttccttttcaataaaacagataaataataattcgggattaaaattaattcgatcaatggcttaagaatattatcgacaaatcattgagagattttaaggatatcgccacaaattattaacaagacaaaaattattggatgaagaagagatttacgatcctgaaaatgaattagaattagcgaatagattaattatgatgatgaatgatgaacaaaaagcaataataaataaaaggcgtaatatattagaagaaaaagacggacaaaaaggcttttttatagatggaccgggcgaaaaccggggaagtcattcactttaaaaatatttatcattttgggtagatcttttaataaaatatttgtaacatggcattctcagggattgcggcacattttaaaaaaagggtcggacattgcataatcgatttaactccctttaacattaaaaaacgtcta

SEQ ID NO: 23386 - DNA, 1292 bp, Heterodera glycines
  unsure (1)..(1292): unsure at all n locations
ttcttcctttttgctttattttttcttttattttatcctcccccgcaacactctctttttttgagttcatttcgtcgtcccctcttctttttcttcccatttttctccaaatatttcgccaaatgatttctgttgtaatttttcattagctgcttcaattggaataattagggcaatcaaaaataaaaataataaaatacagaatttcattttcaagattttattttatttttcttcaattaaatggcaattcattttttgaggcatttaaatgattttttctgattagaaaactgaataaatcattattttacttaataaaataaggaaatcctgtttaattgcaaagaaataataataataataattttatcttaatgagaaaataattgccaattggtaaattaatgattaataaaattttattactttctactggagctcattcgaaaataataaacttattttcaataaaaataaaataaattcacaatgtaaagagattttataaaaattaatgcaattttctcttcaattttattccattcttttgctgtgtattttcttcctttttgctttattttctcttttattttataatattttccaattatttcccttttttcttccaatttttcttcttctttttcttgccatttttctccaaatatttcgtcaaatgttttctgttctaatttcttattgactgttttaatttgatcaattttggtgatcaaaaataaaataatattcaaaaggaataatatgaataaattcattttgaattttaaatatatttttcaaaagtttccttaataaaaattatttattaataataaaaagtggaaaatgaaaaatgctttaatgaaaattcaatttttgtggaaattattttttaaataaattatttcgcattgattttatagttcaataaattattttaaaaaaagctcttaattggtttttagttaaaaaataataatctttttttcataaatttttttctcaaatcacgaaatgaccattttataaaaaataagtataaaatttttcttgtggaataaattaaattcgtaaaatacaaataattaatttttgtgaaattatttcgtctttaatgaatttttaggaattgtttttaaatttaataattaaaaaaattttaccaaaaatggcgtcgtggttgtggaattgaagaaacgaagaaataaatataccgtagacatttaattatattnaaaatattaatatcattgcatccatttccagctttacacacttctttacattcc

SEQ ID NO: 23387 - DNA, 536 bp, Heterodera glycines
ttcatagagcattgttgtttgatattggcagggggataaagccggctgactgagtgaaaacggggtggggtgggtaaagcgaaatgactgagtgaaaacgaagatcctgctctctcccccacctatcctccatcaccaacccgtccttctccccttcaatcgccccgctttcgctttccgatcggctttaaccagcacccaccaaacaaaagcagtgtgtgtctctctctcctccacatcccccgcttcaccccctcctccatgcttcccagtgcttcttcaaagaagactggactgactgactgactggtgtggtggtggtgtgctgctgagagtgggtggtgaaatggggctaagtaatatatgtatgtgtgtgtgtgtgtgtggatgttagcattagtctggcgatgtggtgggttcattttcgtcggatgtttgtgggaggctagcgtatttctgtttccccatttacaaaaaactaaccgagtctaactatggaatcatttatttcttcttatttttatttatcctcagaa

SEQ ID NO: 23388 - DNA, 1192 bp, Heterodera glycines
catcctcatcatcttcctatctctcttgctcaccatccctttctctctctctcttcctctctctcatcctcatcatcttcctctctctctttctcaccgtccctttgtctctttccttctctctcatcctcatcatcttcctctctctctttctcaccatccctttctctctctctcttctctctcatcctcatcatcttccttacaccctccctttcttcccctcttccttctctctctcttcttctctctcatcctcattatcttcctctctctctttctcaccatccctttctctctctttccttctctctcatcctcatcatcttccttacaccctccctttcttcccctcttccttctctctctcttcttctctctcatcctcatcatcttcctctctctctttctgaccgtccctttctctctttccttctctctcattctcatcatcttccttgctctctttctcaccatccctttctctctctttccttctctctcattctcatcatcttccttgctctctttctcaccatccctttctctctctctcttcctctctcatcctcatcatcttcctctctctctttctcaccatccctttctctctctttccttctctctcatcctcatcatcttccttacaccctccctttctcccctcttccttctctctctcttcttctctctcatcctcatcatcttcctctctctctttctcaccatccctttctctctctttccttctctctcatcctcatcatcttccttgctctctttctcaccatccctttctctctctctcttcttctctctcatcctcatcatcttcctctctctctttctcaccgtccctttctctctttccttctctctcattctcatcatcttccttgctctctttctcaccatccctttctctctctctcttcttctctcatcctcatcatcttcctttctccctttctcaccggccctttctctctttcttctctctctcatcttctctctcatcctcatcatcttcctctctctcttttaaacatccctttctctctctttccttctctataatcctcatcatcatcaatacaacctccctttcttcccctcttccttctctctcctctttggaactccaaacctcatcatcttcccctcactctttcacaccgaccctttctctctt

SEQ ID NO: 23389 - DNA, 897 bp, Heterodera glycines
aaagaattttctaatttaaaaagtttttttgggattcgattatttatttcaccatattgacggcagagtaataataaatttaaatataaataatttttaggtataaaatgattttaaatagaaagaattttttaatttaaaatgtatttttgagattcgatatttatctcacatattgacgcagattaataataaatttaaatataaataatttttaggtataaaatgattttaaatagaaagaattttttaatttaaaatgtatttttgagattcgatatttatctcacatattgacgcagattaataataaatttaaatataaataatttttaggtataaaatgattttaaatagaaagaattttttaatttaaaatgtatttttgagattcgatatttatctcacatattgacgcagattaataataaatttaaatataaataatttttaggtataaaatgattttaaatagaaagaattttttaatttaaaatgtatttttgagattcgatatttatctcacatattgacgcagattaataataaatttaaatataaataatttttaggtataaaatgattttaaatagaaagaattttttaatttaaaatgtatttttgagattcgatatttatctcacatattgacgcagattaataataaatttaaatataaataatttttaggtataaaatgattttaaatagaaagaattttttaatttaaaatgtatttttgagattcgatatttatctcacatattgacgcagattaataataaaggcatttccgcaactcgagacatatttttccgtgcttagctcatcgagacgaatcgattggtatataatttgacccattttttcacaggggcgttcactacagttcaccca

SEQ ID NO: 23390 - DNA, 1139 bp, Heterodera glycines
aaaaagagatagccatttttttgggcatagagaataaatttaaaaaattccctgtagaatagaatggccattgctctccgcgcccctctgcccatgctgggaacatttgtatggtacaaaatttctcgcaaaaaagagatagccatttttctggcatagagaataaatttaaaaattccctgtagaatagaatggccattgctctccgcgcccctctgcccatgctgggaacatttgtatggtacaaaatttctcgcaaaaaagagatagccatttttctggcatagagaataaatttaaaaattccctgtagaatagaatggccattgctctccgcgcccctctgcccatgctgggaacatttgtatggtacaaaatttctcgcaaaaaagagatagccatttttctggcatagagaataaatttaaaaattccctgtagaatagaatggccattgctctccgcgcccctctgcccatgctgggaacatttgtatggtacaaaatttctcgcaaaaaagagatagccatttttctggcatagagaataaatttaaaaattccctgtagaatagaatggccattgctctccgcgcccctctgcccatgctgggaacatttgtatggtacaaaatttctcgcaaaaaagagatagccatttttctggcatagagaataaatttaaaaattccctgtagaatagaatggccattgctctccgcgcccctctgcccatgctgggaacatttgtatggtacaaaatttctcgcaaaaaagagatagccatttttctggcatagagaataaatttaaaaattccctgtagaatagaatggccattgctctccgcgcccctctgcccatgctgggaacatttgtatggtacaaaatttctcgcaaaaaagagatagccatttttctggcatagagaataaatttaaaaattccctgtagaatagaatggccattgctctccgcgcccctctgcccatgctgggaacatttgtatggtacaaaatttctcgcaaaaaagagatagccatttttctggcatagagaataaatttaaaaattccctgtagaatagaatggccattggctctccgcgcccctctgcccatgctgggaacatttgtatgg

SEQ ID NO: 23391 - DNA, 1722 bp, Heterodera glycines
atggtttaaaaatcagtctaattgaattttttccaaatagtgaagaaataggccaactgaggttccgaacaagcgttatttttgatagcaaaatcatttagattggctaactactgataaaaatgttttactgcataaacaatgaccatgactggtaaaatgcaggtcatctagggtgagaatttttaagcacgaaaaagtccaaaataagtgcgaaataagcatgaaaaaattccaaatttaggggtataatttttcaaattgcttttatatgaaattaatttctttttcattgattacagttgaaaataattaaatatattcgaaatttttgaatacatttttctaaaataaataaatttcaaaaaccaaaatttgatcaagaaagaaaataaattttggccaagaaaaaaaaaacaaattcagtggaaaaatttttaaaaattttataaacagtcgccaaaaaatgtgatcgcgtcaaaaaaaatattttgtttttcattgcatttttgttaaagaatttctgaattttcatgaaaaatttaaaaatcgcgaaaaataagagcgaaaataagcacgaaacgccaaaataagggcaaaaacttattttaagggcgtacatctaaaataagtatttctaagttcgaataagtgcgctaaaaagcaaaattttcgaataaaaaatgcgtttttcgtgcatttctcgtcgagttaaagccgcagaaaaaataagcaaaaacttaaaaatcctcaccctatacataagcaccctttcgtggatgcagcagtttccccggtaatcgtacgctttactggtcccacaaaaaaaggtcgaaaaaaggaattccgagctttttttgttgtgcactcagggggtttcgcaggcgctgatcacgaatatgacatccatttcgatctatttctgaatcccgaacccgaaccaaagtcggaaattaatttttatccaaaaccgattcaaatgcactaaatgaccttgaatccttattttctattatattccatgtatctgactcgattttggaccataaatatgaattttggtgaaaaattaattttcgacttttgttcgaaatctggtccggggttcggaattgatcaactgttcttaggttcgtgattagcgaccccgaaaacccatggaaaagctttattgacaattttttcaaaatttttacaaaaaaattgttcgaattcgggttcgggattgaaataggtcgaaatggatgccggattcgtgatcagcgaccctggaagcatgttcaaagaatgaccttgatttcagcaaatcgcttaattcatcctaaggcatattgtataacacaatttgtgatcaccgcaacaaaaaaaacagttttataagcgtcaaattaattatccaacaccgcaatttcaaattgattatcactctcaacagttcattcattcacttctgtaagctgatcacttgggccaggagtttcgttgagaagcctaaaaatagaaacgcaaaataaatatgaattttgaaaaagcattcgcttaccctttcccgaattcgtcctcgttataaatgtgaatgccaattttgttccattgatcataagtttgccatccaatcgcttcatcttcccattttgtccatttgctttcatctctcgcaattgcgcaacggatcagcagaaaaagatcgctattgtcagttcttttcaatgccaattgctc

SEQ ID NO: 23392 - DNA, 1541 bp, Heterodera glycines
  unsure (1)..(1541): unsure at all n locations
aatnaaactataaaatttagaacaaataatttctctgaagttttttaactngcntttaccatgcttttaagccccgccgtgaggcgggacagttccaaaatttgcaccacattttactgtggaaagtccaagtaccttaattggacaactacgtgtcaatgagcacagtcgccgttggccagttgtgaaacagaaaaatgggaatatcagatggggtgcgtcccatcctaaaaattcctcttttcgtctaaccatcactccctttttgtgcactatttcgtttcaacattgtatcaattttttgttgtcttttgaaataaattgtgaaaaaatatacgaaaattattttcgcttttaattatgatgtacaatgcttttaagccccacggtgaggcggctcctttttgtgcactattttcgtttttaaaattggatccggattttttggcttttttaaataaattgtgaaaaattcaaaacaaaaaacttttattgcgctacaaatgcttttaagccccgccgtgaggcggctcctttttgtgcactattttcgtttttaaaattggatccggattttttggcttttttaaataaattgtgaaaaattcaaaacaaaaaacttttattgcgctacaaatgcttttaagccccgccgtgaggcgggacagttccaaaatttgcaccacattttactgtggaaagtccaagtaccttaattggacaactacgtgtcaatgagcacagtcgccgttggccagttgtgaaacagaaaaatgggaatatcagatggggtgcgtcccatcctaaaaattcctcttttcgtctaaccatcactccctttttgtgcactatttcgtttcaacattgtatcaattttttgttgtcttttgaaataaattgtgaaaaaatatacgaaaattattttcgcttttaattatgatgtacaatgcttttaagccccgccgtgaggcggctcctttttgtgcactattttcgtttttaaaattggatccggattttttggcttttttaaataaattgtgaaaaattcaaaacaaaaaacttttattgcgctacaaatgcttttaagccccgccgtgaggcgggacagttccaaaatttgcaccacattttactgtggaaagtccaagtaccttaattggacaactacgtgtcaatgagcacagtcgccgttggccagttgtgaaacagaaaaatgggaatatcagatggggtgcgtcccatcctaaaaattcctcttttcgtctaaccatcactccctttttgtgcactatttcgtttcaacattgtatcaattttttgttgtcttttgaaataaattgtgaaaaaatatacgaaaattattttcgcttttaattatgatgtacaatgcttttaagccccgccgtgaggcggctcctttttgtgcacatccctccctttttgtgcactatttcgttttaaaaattgggaacatttttttgtttgtttttttgaaactgaaaatgtaaaaatttaatagaattatttttgattttaaa

SEQ ID NO: 23393 - DNA, 1623 bp, Heterodera glycines
  unsure (1)..(1623): unsure at all n locations
ggggggggggggagagaaatgccctcaaaaaatgccctgaatgaggaaaaatggcattttggntgagaggaaaaacaaagggagaaaagtataagatgaagttaaattgacagatggcgagaagcggagaattgtgagaaaccaaatttaatagagggaaaaaaggaaacatcggcggatgggggggggggagacaaaaaaagaaaaatgaattaaaaaacaaaaagtattataatcgctttggaaatgcaaaatgaaatgagtgattcatattgattaatgatgctcgagattctcgagtctcgactcaagtgcattgtcagatccttggcttcgggagggactgaattcaaatcccgagaaaagtctcgggttttttatatgtctcaattctcgggaaatcttcggtcttgagtatcactaatatttactgggtaaagagattgaatggcggcaatgcatggccaaagtaaaaagtgttgttcgggtggaaggcatcgatacaaatgccatggaattgggctccgcctgctggaggctttggtgtccttttccggccgaaagtgcccatgggcattgcccgagcttctcgcattttctttctttcttttccttcggagttccctctgtgtgccaataaaatggccgctgaaaattgggcaataagaaaacggaaagagcggaagaataggaaaaaaagagactacagacagaaagataagccatctgttaaggaaagacacggacagagcagagaaatgccatggaattggggggagagacggacagagcagagaaatgccatggaattggggggagagacggacagagcagagaaatgccatggaattggggggagagacggacagagcagagaaatgccatggaattggggggagagacggacagagcagagaaatgccatggaattggggggagagacggacagagcagagaaatgccatggaattggggggagagacggacagagcagagaaatgccatggaattggggggagagacggacagagcagagaaatgccatggaattggggggagagacggacagagcagagaaatgccatggaattggggggagagacggacagagcagagaaatgccatggacttgggggagagacggacagagcagagaaatgccatggaattgggggagagacggacagagcagagaaatgccatggaattggggggagagacggacagagcagagaaatgccatggaattggggggagagacggacagagcagagaaatgccatggaattggggggagagacggacagagcagagaaatgccatggaattggggggagagacggacagagcagagaaatgccatggaattggggggagagacggacagagcagagaaatgccatggaattggggggagagacggacagagcagagaaatgccatggaattggggggagagacgcacagagaagagaaatgccatggaattggggggagagacggacagagcacagaaatgccttggaattggggggagagacacacagagcacagaaatgccatggattttggggggagagacgaaccaaacaaagaaatgccatggaattggggggagagacg

SEQ ID NO: 23394 - DNA, 1216 bp, Heterodera glycines
taaaaaatgatgtccataatatcgtaaaaaggtgtgtctcgttcatttcaacaacaaactctttgccatttcgttgtccactttttgccaaaaacgtccataacgtccgccatggtaaacagtgcgtgcgctcggttccagcgtcaattccaaatgctgctcggtgttctgagcactgattggacgccaaaagtcgggtgaaacgagcgtggaattggctgaaacagaatgccatgccaataataaaacaatggtggtcgaattttgtaaaaaaaaaaattataaaaagtggaaaatttaaaaaaattataagcaaattacatgggttgaaaaattcaaattaagttgattctcttccttttaatatccctgcaaaatttgatgagctttagttcagttaaaaatgagttttaggtgatgaaatttcagtctcggctttttttttaccgaaaaaaactgtctgaaccccacttttgtacggtcggtctctaaatgctttgttcgctgtcactaccgcaatgctcattgtgccatggctgctgctgctggtggtggtgttggcattggtcattatcaccatcattttcatgcaattggtgttggccatcagcagaaggcgcagtatcattagtggtggtgaagacggtgttcatgttgattttctgtgtccagtgagtgttcgggttgctggaatagcatcattaaaaaacaatttccaaaattatataaaattttttaaatgccagccaacccattttgtttgaaaatttaagaaaattttcggtggaaaacgaaaggctcccaacccactcacccatatttggcaaaatttgtgaagaagccgccgatgatgcgcatcatttgcttgtcatcccaattcggtcgaaatttggcgtacaaacccttgcccagcaaatagcgcgcgtcatgacaatgggtggcagctgaggggggggggggggggggaaatgctaaatttaacacaaaatttttggatttttaccgaaaatcgattttaagaatttttttttatttaaaaaatgtcgagtgaatcacttgtccggtctctaatactaattcatacccgaaatatgaaaaattcataattcaaaattaaaaaaaaaatcatgacaaaattttaacaatttccaaggtttcgtatggacgtacattctttccgaaattcccccccccccaaaatgccaaagcatggact

SEQ ID NO: 23395 - DNA, 2146 bp, Heterodera glycines
aaaaaaaaaaaaaagaaaaatttttttttttttttttttaaaaaaaaaaaattaaaaaaaaaaaacttttcttttcttcttttaaaaaaaaaaaaaaaaaaaaaaaaaaaaaaaaaaaaattttttttttaaaaaaaaaaaatatttgttggtttttttttttttgaggttttttttttccaaaaaaaaaagaaaaaaaaaaaaaatgtaaatttttttttttttttttttttcggccccccccttttttttcttttttatatttttttttccgctgggcgcccggttaccctttttttttaaaaacccttgggttttttttttggggggcccaaattttgggtccgagaaaaaagggggtttttttttttttaaatttttttttttttcaaaaaaaaaaaaaaatttttttttttttgcccctttcccttttttggcctttttgccccagggggaaaaaaagggtttttttttgggggtgcccccgccgtttttccccctccccaaaaagcgaggggcccccttcggaaaaaaaagcgaaaggaaaggggcggggaaaaatttttaaaaatcaaaaacggaatgaaataatcccacaatttttaaccggaaaaatgttatataaaattttattataaaaattttagaaaaaaaacggataaaatttcatggaaaatgtgctaaccacgcattgtttcggcaaccgaaagggctcatccgtgagaacactggccactttggcaacaatcttaaagacagtaaaaatttgaattttaccgttaaattttcgaaatattttctcgacataattttttttttactaacaataatcaaaatgacgaatttttgggaatttaaaattaaaaaaaaatttagtaatggttggtttccggcggtgaaaatggccaacaccttggaaaaaatttaatggaaaattggggtgtatcgatgtgagggaggggaggggttgagtgaaaaacttcgtggagttagcgttgccccacccctctgctcacttttgtcgatgtacaaatgcgtgtgccgaccgtgtccatataggcggggaagtcgccgtcctgcgcaagtgcacgctcgcacaagtgcgggtccacgcgcagtttgcgaggacgctgaatggcatttagcaaaaagccataaaaatgattattttattagagttcgacaagcaaaatatcgaactctagggtcagaaaaatgaatcagtccattatcaatggaaacccgattttgaaggtcgcgatttgccagtttttttgcgttttataaaagagaaatcggctcacctcccgcgggcctttgccctcgcctttggaccgatccgcctttttctgactgcgctttatgttgaccaacggtgcgtcctgatactcaatttcagtctcgcggtgtccctgaaaagctgcgttcaaaaacaaacgaaacgaaattccaaaaaaaaaattgaatctcggttttcccggatcgacggaaaagattctgtctcttccaccttgctccgttcaccgcacccatcgcagtaataaaagccaccgtccaacgtgaaagtgtcggtgccgcacacctcacacaccatttcgccatggtcgcccccagacgacatttccgaaaggaacaaaattgcgaaaatatgtgttaaattagcaaatttaaaatcccataatgagtgtgttgtcaaactttctaaacagctaattgtaagtcgagaatctgatttattaaaaatttaattctgagtgagtgaaaggcatcgtctgtgttcaaaacatggacaaaagcgtgaaagagacaaatgctgggagatattggaaatgatcaaatattacaaatgaaacttgcaaaaatggaacatttgtccataaggccaaaagcaagaaatactcttttcataaatggcacagaattgctcaagcaaacacaccataacaaattgacagaaataatttctgatgtcccccacgaaaatttttccaaatgtttgaaagcttaaccattttgaaaatgatgtgcgaaaagcgggcatttctgctgaaaaagtcggacgctcttttgagtagaagagggatgaaaaatggtggaaagtggcgagagtgaaaatgatcataataaatggtatctgattttctgt

SEQ ID NO: 23396 - DNA, 982 bp, Heterodera glycines
gtcaattggagcaatgtttcgggcatgtagtgcgggaatttcagaattctcgaaaactgacatcttagtgagaactgaaaacggtacggaagaattacaaaataagtccccatttgggtttaaaaggccgacaaatgtcaattggagcaatgttttcggcatgtagtgctggaatttcagaattctcgaaaactgacatcttagtgagaactgaaaacggtacggaagaattacaaaataagtccccatttgggcttaaaaggccgacaaatgtcaattggagcaatgttttcggcatgtagtgctggaatttcagaattctcgaaaactgacatcttagtgagaactgaaaacggtacggaagaattacaaaataagtccccatttgggcttaaaaggccgacaaatgtcaattggagcaatgttttcggcatgtagtgctggaatttcagaattctcgaaaactgacatcttagtgagaactgaaaacggtacggaagaattacaaaataagtccccatttgggcttaaaaggccgacaaatgtcaattggagcaatgttttcggcatgtagtgctggaatttcagaattctcgaaaactgacatcttagtgagaactgaaaacggtacggaagaattacaaaataagtccccatttgggcttaaaaggccgacaaatgtcaattggagcaatgttttcggcatgtagtgctggaatttcagaattctcgaaaactgacatcttagtgagaactgaaaacggtacggaagaattacaaaataagtccccatttgggcttaaaatgccgacaaatgtcaattggagcaatgttttcggcatgtagtgctggaatttcagaattctcgaaaactgacatcttagtgagaactgaaaacggtacggaagaattacaaaataagtccccatttgggcttaaaaggctgacaaatgtcaattggagcaatgttttcggcatgtag

SEQ ID NO: 23397 - DNA, 1637 bp, Heterodera glycines
ttaaaattttaaaatttaggcaattcataaagaaattatttcacctaaaattttgaatgttttaaaattgaaagggaaatcaaaacattcacaggagcagcagacagatcaaaatcagaagaaaagtaattgaattaatattattatgagaaaaaggcatagtttctgatctatttagttagcgatgatataattaataataataacttaattatagtatatttattaataaatagacactaaaatatttcagaaggaattgttgaacaaaatgatattgccgaattattttatttaaaaaggaaatgttaaacaaaattatatttgacgaaactttgaatttggattaagcgccgacccctcggggaagaaattttcagggagccaaggggtcccggcgtcgtagacgcagaaatgcatgccacggaaaattttaattgaaattcttttaaatcagttatttaacacagcggcccaattttgggttctcagtgcaaataggtttattatttatttagtaatcagaacgccaaaactttgcaaaaattaaaattttttttgggattttcccttgtaaaaatggaagagccgatctcgagatagaaaagaaactttcagaaaacaaaagagaattcgatagagagggccaaaaaactagcctaggcaaaatttcaagaaaagttacccacaggaaaaaaatttttcccagggcaaacatttcaataattttaattcttttttagccaagtccacaatttaaggccaaaccaaataaaatttacaatattctccagaattttcccttcaaaatgagcataaaatggttttatttgctctactattcaccaagttataagctaaaaaaatttcataaaattgtcgatgttgtacgtaaccatcgctttttgaatatgattttttattgccacgaaaacttttattaatgaaaaaataattctgccttcttctttaaaagaagaaattgaaattaacacacaacatagggaggacttgaacctgggaccccccttttggtgactaactcacagaccactaagaccaaaaatccagcataattgtacttggagcccaaaattgggccgctgtgtaaatcaaatcaattcgtttgttacgcaaagttcgttcaaagaattttttggttatttctagggccgatttctaatggaaaaacttttttttttgctcgattgatttgaagaaaggagctcaaaaaacgcatttctgcattaaaattttttcctttggacgtcatttttcgtcactagaaatcactattttggcgtttcgtcactaaaatagttaaaaatcactattttggcgtttcgtcacttaaaatagtgaaaattcacttttttggcgttttgtcactatttttcactatttcgacattttttggaaaatttgttaacaaaagtgcaataaaatcaaaaaatacacccctaagaatcgaccaaaaattttttaaaaatacaccactaagaattggaaaattttttcaaaaattcttcccccaaattttttttcttgacaaaatttttgatttaaaaaatgtcaatatttgctaagagaattttataaaagaaatatagctcatttgcaactacaatcagtgaata

SEQ ID NO: 23398 - DNA, 957 bp, Heterodera glycines
  unsure (1)..(957): unsure at all n locations
acatttagccgcaagatttgctcaataattttgagaaacgatattctttttcctacttgatacttattgaaatattaagctaattaattaataaaaagttaaattaatacatttctatatataaatattaaaaatcaagaaaaatgccaaactcattaagcacaaaaattttttcgattttttcatggcacaccacacaacttacacaacgggtgacccattgacaattggcacgaccaccagctcgacgagcagcatgacacacagaatgctgtagccgttcatttttttttggaaaattatttttaaattaatgcaattaaccttcaataaaatttaaatatttgccattattaatttaatgtataatatttgtgtaaaaaatgttacgggcttcaccttttcggtatacaccagggataatgccgacactctcaaaaaattcggcaatcagcaaattgaattccgatcgcatttgaattttttttttgccttttgccaacccacactttctcagtttcattccatttttgagtaagtttttatcggaatttgtaaaataagatctaattgattttccgtctttcaaaatgaattattttagtttaatatattctaaaatagcatataaaaaaactcttggaaattgattaactatttaaaaaacactcttaaatccatttaattcttaaataaatttaaatttaaaatgcttaacattggctcagaaaatgaactctgttcttgggaaacgagaatttcttaaantcttcgctggtcatgtgaattgtgatggctgtgattttttcaggaccaaagttttggggccaaatgttccactttttggcagtttggccaaatccatttttatttcgggtgattatgaccggccaccaatgggatgtgtacattcatangagtagaagagcacctgatccgatattggggaaatgaata

SEQ ID NO: 23399 - DNA, 1158 bp, Heterodera glycines
acttttttgtttcctgactaaaaaagcgattcccaagggcgcccttttggcatcaaaggacgatgttgggctatttttgcccttgccaatgtctttttcatcgacaatagccattcacgagtgttcaacagatcaatcaattgatctggtggcaaatccgtatgtttcaacaaatcattcatttctttttcaattgtctttttaaattcgatgatcttcaccgtttgattaggatttttcgattttcgcaaaattttttgcatgcattcagcgaataattgacgactttttttgtattcatcaacatatttttcaattattggttcaaggaatggaattttcatcgaaggactgaaatttaaaatttgaatattcaaaaaaaaaagtttttttccagttttctgattatattcattatcctaaagttattagcatactaaataatgttttataaaaatttttaatttttttataaataattttaaaaattaataataacagataagtgctaaaaactaggccaatcataatttggtgtattgatggaaaaatatctatgaatttttaattttttttaccaataaatttttttaaatatataataaaacatacatataagaactatgataattatatatttgaattttctaataattttttaaaaataaatatttaaataaaggtcagataactaagccaaccatcataatttggtgtattgatgacaaaaatagttaataaattttaatttccaaccaaacattttttatattaaatttatttaaatgtgagtgaaaaaactaagccaatcctaattaggtttatatttaatgtttaaatcaatattaaagtttcctacattttatttaaatcaacccgtaaattgttcaaataggtttgtgccgcttcctccgccgtctccatttcactgctgcccaaattttcactttttggcacattgctttccgacgatgatgtcattgtttccgccgaatgtatgccgtgcttggtagtgccaattttgttgccagttctcggtttgtttgggccaatcaacaaccttcgattgacaattaaattgctggtggaaggtgccgaaaaattttgtgtttccttgatggtttcagcattttttccggctttttgtctgtacaaatt

SEQ ID NO: 23400 - DNA, 1281 bp, Heterodera glycines
ggggaactaaacctgtattaatatttttaacaaattgcagtccttttcgcctaccctgttaagagaaatcttaattcacataataatttcccaattttcttctataacagattaactcttctatggtgagtttttcaatttctatgtactttattaagtaaacaataataatcaaacatttttctatgattgcaaagcatttaaaaaatcataggcttgtttattttcattatgttttggaaaaggtcaattaaataaacaatttttttttgtaattttattaattgtataaatcttatgcaattttctataagcaatcgatagtgtaacaaatagagaagataagttctgatcaagcacacacctttcattatttccggttaaatatgtgttcatattttaacaaaaagcagtcttgaatgtcgtcgaaatttgtggtaattccatggctatagccccgaccaattgcgctggaattttgccatgaggcttattttttgtgctggtttcgaatttacaggcgcccatgcaattggagcgcattaaattttttgtcgatttttcttcaatacccaccttaaacgataagcatttcctcgcacaccgctctatttgctctgttttaaacaacaaaattttcccaagcattcatacctactttcttaattgcactgggatcacatctaaacgactatgctaaaacggggaactaaactgtattaatatttttaacaaattgcagcccttttcgcctaccctgttaagagaaatcttaatttcactaataatttctcaattttcttctataacagattaactcttctatggtgagtttttcaatttctatgtactttattaagtaaacaataataatcaaacatttttctatgattgcaaagcatttaaaaaatcataggcttttttattttcattatgttttggaaaaggtcaattaaataaacaatttttttttgtaattttattaattgtataaatcttatgcaattttctataagcaatcgatagtgtaacaaatagagaagataagttctgatcaaacacacacctttcattatttccggttaaatatgtgttcatattttaacaaaaagcagtcttgaatgtcgtcgaaatttgtggtaattccatggctatagccccgaccaattgcgctggaattttgccatgaggcttattttttgtgctggtttcgaatttacaggcgcccatgcaattggagcgcataaattttttgtcgatttttctttcataccactttaa

SEQ ID NO: 23401 - DNA, 1577 bp, Heterodera glycines
attatagggaaatggcacttcaaataccaatcagcagtatcattcagaaaacggtccgattcatccgtttttttacagatttcatgaatattttgctgtacgttttcctcattttgtttttcttctttcattttctggtcatttttcttccttcgtgcgacagatggccacactttgtcccctttttcttctcatagccaaaaaaatgaaaatttatttgtccacgaaaatgtcgtaaagccgaaaacagtgccaaatgggcacccttctcagctcaaccattcttaaactgaagaaggcgttcaacattggcattatgaattgctctgaggaaccctttcggtttagttatcgacgagagatgtccactcggatggaggacaattcgttgtttctggaggaattggcgcgtcagactgatgaaatccgccaaaatgggctcgacgcaatgccgaggcacggatcactgacagacaaagtctgaagcaaaaatggaaatttacctgggattaaggaggctattgttatttccccattcagattctcgaacttgaggaagaggtggaacgacttcatgcggagaatcgcgagctgaatgagcagtgcacggatttgcaagcgcagttgctgcacaattcggtggaatgtggcagaaatttgttggcggacgcgggacagccgagtttggccgccgaactgagtgggaccggtgggatggaccaccacagggtgagaaaacagttcaaacggtcaaattacccaattttgaattgagatgttggacatcataaaggagcaagacatcgacaatcaaaagcttagaaattacataaacggttggcacaatgataattgccaatttgtgatcgcatccctttcattcgctttaggaattttggtgagagtgatcgagctgcatcccgagattctcgagatcaaggacgacatgaacagttcacaatcagtggcgtccaacggctccgcccaatcatagcaattagccggcgacgctgtgcccgaacgacggcgagtaacagatgaaatggagagacgtgccgcgtcacaacccgtgtccccgtcctcctcttcacttgtaattggagcatccgattcgattttgttagtaatccgtggtgttcaatccgttcagtttgcccgtagtgcgatggagcgtctctctctccgtcagtgcacttcgtcttcatctgcttgccaccgtcaaacagcgtcgccgaccccccaaccaaatgaccaacaacaacaaaataacaccttcgtctcccgtttgtacaattccatttggagcccacaatggactctcttccgaaaagaaacaactgccaatgagaaggaatgtgatgaaattgggagggtccccgacgacccaacttcgtcaaaagtcgcggaaagtgatgtaaatagcgtcgatagtaacttggaacaaatgaaatgagcttaattttgccctgactaatgttttccatcatatccttcttctatttccctggttcgatgtttcgccttttgtcaaatgaaaaaacaaaactcaccaaggaatgttctaacctaacaattca

SEQ ID NO: 23402 - DNA, 1161 bp, Heterodera glycines
ataaggtaaaagagccctattttttttcagagaatttattaaaaaaaggcaaaattttaaattaaataaggaaagtttgaaaatgtttattaaaaaatttaaggatgaaatataattaaaataaatcaaaaagaaaaaaatcaatttatttttctaaataaataaaaaacattgtcagaggcagttcctgccgaaaaaaagacaaaaaatttttcgaaaaaaaactaaaaaaattgaaaatttaaataaatttaaaagtgaaaaaaggaaaaaagattacaacaccttcgattcccaggacgtctccgttccaagtactaagaaggcccaacgttgcttaacttgccagatcggacgggatggcgtgctttcaacgtggtatggtcgtaagcgaaaggaaagcaattaaagtaatttaaataggcatatttaaaagagcctatttttttgccttttcacaagagaatttattaaaaaaggcaaaattcgccttaaattaataaggtgaaagtttgaaaatgtttattaaaaaatttaaggatgaaatataattaaaataaatcaaaaagaaaaaaaatcaatttatttttctaaataaataaaaaacattgtcagaggcagtgcctgccgaaaaaaagacaaaaaatttttcgaaaaaaagctaaaaaaattgaaaatttaaataaatttacaagtgaaaaaaggaaaaaagcttacaacaccttcgattcccaggacgtctccgttccaagtactaagaaggcccaacgttgcttaacttgccagatcggacgggatggcgtgctttcaacgtggtatggtcgtaagcgaaaggacagcaattaaagtaatttaaatagtcatatttaaaagagcctatttttttgccttttcacaagagaatttattaaaaaaggcaaaattcgccttaaattaataaggtgaaagtttgaaaatgtttattaaaaaatttaaggatgaaatataattaaaataaatcaaaaagaaaaaaaatcaatttatttttctaaataaataaaaaacattgtcagaggcagttcctgccgaaaaaaagacaaaaaatttttcgaaaaaaagctaaaaaattgaaaatttaaataaatttacaagtgaaaaaaggaaaaaaagcttacaacacct

SEQ ID NO: 23403 - DNA, 2258 bp, Heterodera glycines
tggacaatccgtcagtgaaggacaatccttcactaatggacaatccgtcagtgaaggacaatccttcactaatggacaatccgtcattggacaattcgtcagcaaattttttttccaaaacccgaaattcgaacgcaaaaaaaaagccgctaattttcgcaatttgagttttcgacagccccagaaattttttttttacgcttatcaattcccagttccgccacactttttttatattaaaaatcgccgatccctcacaaatattaaaaaaaattccattattcattcattgaaggaattattgttatgtgcagaacacctattgggtgccatttgaagaacacattccgcatcgattggacgagcgacaaaagtgtgaattgattaattaattacttaattgattatttgggggggggggggggtgttcaaaataaatttaattaccaaattcaaggaccatttgatgattaaatttcagacgacaaattggttattatcaatgggtgtcttttgtacttgctatttctgcgctaatgttccatttgccggtgagttaaggtctcgactcgagaaaagtttatcgggttttctggtttcgggaccaagtctcgtcggtctcgagtccaccgattcgagaaaagtcgtctcggatttttttcggtctcgagcatcactctgtttagcgtgctttttgtgtgtaaatgcgaattaactacaaaacaactgcatactaaaaaacaaatactaaatttggccgcttacagtagtcctcttttctactgatactgtaggctctctgctggcgaatgctgtccaaccaatcgggcctgcaagtgtccgttgtgctgggcgtggcatgccaggaagagaatgtggacccggaggtgcgcgaccgtaccatcgacgtgatggcggtaaagcaacaagggagggacatacctaattcgagagtggggttgatcgggaatctgggccaaggatggatttttggaaattggccggtggcctgaaaaattcggtgtcaggggtaagagtcagggacggttcacacgcaaaatttatatgtgaaaaatggtattttgtgctaaaattttcatttttaatattggtaccttctccaagacctccacacccaaatttttcaaaaaaattccgtgaaatttacataaaattagcaatttttagtgaaaattcaattttcgaatactttttcctgtcctcatttcacgtaaatttaattaaaaaatttttttatagcgtcacattgatgacgcactgcgttaccaacgtgatctgattgcccgatcacggggcgtttttctgttcgcactgatcaatgttggccgaatatacggtaaacgaacaaaacagatgcaaaaattagcataatttgccatttaaggagcatacgtcacgtgagccgaatgctttgcaatttttaaattcccaatttttaataaaaacaattttttaatttcagtttgttgtacagcatgtgcaaattgcttcacttggtgaacgcgatggtccagttctatttccttaaccggtaaaacagggtcatttttgaattatgctctgaattaaattacgctttaccactccaaatcttttaccctgaaatttaaatttaaaaattgattcgattagggttaagcccctacccgattttttgtttttttttttgaaatttactccctgacgagggtgttttgctctcatcagatggatttttttaaatttttttctgttgaaccttttattttatgatgatgatgggtcatcatattccatcttaattggcaattcataaatggtggcaaattttctaaaaaatttttttcaccaaatccaatccataaatttaaatgatcatttattctttaaaaggtttcttgaaacgtccgactatccgctgttcggtggtcatgtgatctacgacttgttcagggtcggcaaaagtgtaaaataaaaaaaatggaatggcactaatatttctaattctaacattgatcaattttaattgggacaattttattttttaaactttctctaatcatttttcaattaaaggatcgagaatggcaagattcgggtcgttttcccagggtgagtttgatttggggtgaataatgattgggataaaattgggatcagaagcaatgaaacttaaaagtgccaatgataataataattaaataattttatttgaaaattaatatctaaatcataataaattaattaaaaatgataat

SEQ ID NO: 23404 - DNA, 1538 bp, Heterodera glycines
  unsure (1)..(1538): unsure at all n locations
ttttttcaacccaccaacgtccagtcgtccctcactgctcgcgctcatcaaaggtgtcgtgccatcaattgcttgctggttgacttcagctgcccattcctcgaccagcagacggcacacctccaactcaccagattcggcagctagcattagtgggaagacgcttcctgaaacggggggaggggaaacaaacaaattaaatgatcaaaaaattcaaaattaaactcaccggtggcgtccaagtgtccaacggttgcaccgtgggcgagcaagtagcgcgcaaagtccacctgaataaatggaaaaatgttttgtttttcttcaaaaaacggcatttttttcctacccttccagaggacgcagcgaccatcaacatggtgattccttcttggccacccggcatgtcaacgctgaatccgctctcgacgtacattcttgctggaaaaaagatgttggcagagttaaacacaacaaatgccatcaaaatttggacgccatgccattacccataatctgcagaaagtcgacgagctgctcctggttgaatgactcgatcagaatggaaagctcgtgcactgcgtcctcgcttccctggccgatggacatgatgagttggcgaacatgttgctccaaatcaacgacgacatcaccaccatcagcagcaacagcaggaggaggaggaatgtcatcagcctaaattgaaatgggagaaaaatttaaaaaagtgccgaaaaaaagagagaaattgttgaaatttttaccattgccgtgaagggcaattgaaagtggcagcagttggacgacagaacggagggaaaggaaatgtgtaaatcggacgaaatggacgacgagtaatggtgaagtgtttaaaaatgtcattgttcgctccttttatatgtacattttgactcccaaaacgacccgtgtcaaaaaatttttaaattcgtgtataaaagggaaggttttgctcatgaaattgtcacatttttggcattacatttcgagtttttagtgcctattttggcattttttatagcctaaaaatccgatccctagttaatgaattaataaaatactttattaattgagtaaataacataacataattgaaaaaacataaatcaaacaaattctaaggggcattcatcgaatcttccgtaactgcgtcctgcagcacgtagcgtttgtgatccaaaacatatttaattttaagtgtgaaatttgggaattaacgcttgtagactaatttttttttaataaaaaaagattggggacgaaacgacgcagggacgaaatgacagcgcgccatttatacacccatacactccaaagtgatcgtttcgtccccaattttcttcttaaagttgtctctcagacgcagttgagttggttttctaccccttctctgatttgttatcatctctcttattctatagaagtttgaaaatttaaattcacacaaaatcaaagtctatccgacagattttatcgatgaaaagttatgccatattttattgaccganatatacacatacaaa

SEQ ID NO: 23405 - DNA, 385 bp, Heterodera glycines
attattattatttcatttctgttccttttttttggcctttaaattacaatgtgacacaaaattataggttcaccttttgtctattataacattctaaatacgcaaatcggcgttgaacgtgtaattccatgtcagagagcccgaaaatattcaccaaaccataccaattttgtggaaaaaaatgcgagtcctccgccgtggccgcaaatgaaagattggacgacgaatggtttaacattttttcatattccgtcatgacaaaacatgtcaaatttggcccacagccattgcaatattgtcgtccacccgtatcttcagttctatgcaatggtgctctacagaacaaaaaattgaactcgaatacgaaaaatattgttttaaaaaa

SEQ ID NO: 23406 - DNA, 1084 bp, Heterodera glycines
cttctagatggtttttcataccacatttagctattttcgggatttttagcttaaatttaatgaatatgaagatttgtaaaaattttgcccccaatttggaaaaatttacgtgcatatttttcactttttatgtgcatattttgccatttttggtgcatattttacgattttatgtgcatataatttgacaccctactgaagataaatggtagaaaagattactggaaacatttgtcaacaaaaccagcaataaatcgctcaattgggtcacgcacaaatgcgaccattttccaaagctgtaattcattggtcaggtcttttgtcattgaaacattgttcacaatctgaaggggaaacgacagagacagacacaacgccaaaagaacaaattcaaatcaaaatacctcttccattggcaattcagcataatacggtgactcaacatgacaaaacatcttcctaattctcggtctaaaatttaaaaaaaaaataatgccattctctctaagtcacgtttaattattaataaaatatgaacaaacaaattcaaataattgtaatcgaaatttgtgatgttaaatttattcatatttgcaaagtagcaaaacaacgactccaagaaaacatttgaattttttgcaattaaacagccggccaatttaagcgacggaataaactaaaagtgaatataaaatatatttaattaatttaatttaagttataatttaacaatgcataattattttttataacaaaaacacacaacattgcgctggaatttgccatcaaactttctcacacattgctgctggtcatcacttccacaaattctgtcccaatcttcattaaatgtaccaaagtggctttttgttggcaatggcttaattgtaaaatagtttgcaaaattgaatcaaaatgactgccaaaggaatatgaaaactcattaaactttgtttttaattgattggaactcaataaatattattatcgactaattgaatttattaaagtttctttttaattgattgaatactcattaatctttgtttttatttgattggaactcattaaacattattatcga

SEQ ID NO: 23407 - DNA, 2130 bp, Heterodera glycines
  unsure (1)..(2130): unsure at all n locations
tatattccttgatatattgttaaacttttaaacaatgtatgtaatccattgaaaacattgtcgttaattaaatcaaagttagaaataaattagtgattgattgtatgaaataaatggtattttttaaaattaattacttataaaactgcatttaaaaacaaaaaattttattagatttttagaaacaacggttatattttttcgttattgcgttttgtataaaatttttctttgttcaactttttgtattctttattaatgttgttttttgcttaattattcatttttattaaaatttgtcaaaatgcatgtagatttttttggactaactttcctcgctttattaaaaattttgttttcatttattataattattattttttatttattatttacatgaatatttattttttcactcctagcgttaaatccattttaattggttttttgcactaaggaatatttgtagattgtttttcattaattccttttacaattttgatttatctttacggaaactatacaaaataataatttaataggataattattagtttaaaattttttttaactcaaaaaatataataaaaatattttattcatttttattttggaattctttataaaattgcataattaaaaatgtatatttttgtattcaattttgataaaccttatttataggtttttccacttttattttaaattcatttataacaaattcctattttcatgtttttagttagataatttagcttgaagtcattaatttaaaatatgtatttcgaagttattattcatattaaaaaatatatatatataataattatcaaagattttaattttatgatttttattttctctaagaattgccccatataagaaatttccaaatatcccaaagaataattaaatgtaaagataacaagcagctttaatgccatctaacggaaatatttataactttgaaaaaaattaaaggggatccgcgattcttttaaacaatcctttattcctttaatttcaatttttaaaaacattaaaattctcccaatgcgcttatttgaatccaaaaaaaatttaattttaaaaaaaaaccccttggaaagggttaaaaattctcttttggttccaaaaaaaaccccaaaaaatttaaaatttacttttaaaaattccccaaaatttttttcccccattaaaaaaatttttttttaaaaacggggggactttattttttttttttatttttttttaaaaaaaatttgtgaaaaaatttttttttaaaaaaaaaggggggcgccaaaaaaaaaaaaatttttcattttttgcccctttctctaaaaaaaaaaaaaaaaaatttcttcccccgcggggggctcctctaaaaccaaaaaattgggttttttttataaaaaaaaccccccccacaaataataaaaaaaaaaaaaaggggggtgttttttttttttccccccacaaaaacttttcctctttttttttttggaaaaaaaaaaaaaaaaaattttttttttttttttttttttttttttttttttttttttttttatttttaataaaaaaaaaaacaacttttttttttttttttttttaaaaattataacacaaaaaaaaaaaaaaagagccccccgggcggtggatattataaaaaaaagcaaagaacaaaaatatttttttttttttttttttttttttaaaaaaaaaaaaaaaaaaaaaaaaaaaaaaaaaagaaaagggggggggggggggggggggggggggggggggggggggggnnncnnnncncnnnnnnnnntttnttttttttttttttttttttttttttttttttttgttnnnnnnnnnnnnnnnnnnngggtctgcttggggcggtaaagngnnngngggggtttattttttttttttttttcctttctcctcccccccccacnacccccctccccttttttttttttttttttttttttttttcccccccgtttgtttanttttttttttaaaaaaaaaaaaaaaaaaaaaaaaaaaaaaaaaaaaaccccccccccccccccctctcttttttttttttttttttttttttttttttcccccccccccccccccacccccccc

SEQ ID NO: 23408 - DNA, 2029 bp, Heterodera glycines
aaattaagaaaatgaaaaatctaaaaaatttatatatttttcggaaattatctcaattatgcctgaaaatgaaaaagtacttaattttaaaccgagatgaacccttcgcaaaagtattccgtatttaacttcaattgctcatttccaaatgcttttccgtcgtttcgttcagtgagtttctacgacctcggcgtcgtcctgcagtccctcatgctcactgctgttgtggtcgtctccctgttcatctacacgcttcagtccaaaagagacttccacaaatattacgccactcttttctccgtctctctcctttttttggccgccactatggtccaggtacggtacaatcgacacagcacacggtgcctttttggttacggtaataccgtagtgtgttcagatgttggtgatgtcttctgcgctcaattttgtgatgagtttggctggcgctgttctcttctccgtttatttggtgttcgacatcgatgacataatggtaaatacaaaaagcgaaatttcccctttttaaatttaaaatattatttttccatccaaattcttcatgctttagtattccgattcgacatttcgtcccttaaatccttcccattttctgttcagaatcattacaatgaggaggactacatcatcgcatgtctctcaatttacttggacatcatcaacttgttcttgcgcattttgcagattctgaacgaaatcaaccgcaattgaaaaaaaaagaaattctttccacgacaggcccatattctattcggaaaatggttggggaaggctcccccggttttggtcggttttcatatattcccccggtttcgaggcctggtacacctgtaaaaaacatttatttgcaaattgcaaaacaaaaaattattgtgagattctttgggatggactcatccttctgtgtatttgtgttactgtatgtctacctattttatgtatgcacagtgattaacttatacaatcgcatcgaatggcaattgtttgtgcttttaattcggggagaaaatgttttcgtaatttgccagttcaattaaagtcgtctttcgagtgaattgactgacttatttatatatttataatttgatggattagcggcttcaatttaaatatttttaaattaaaatattgtcaatacatttaattgtttttctcgtgtaaaaatatgtaacttttatcggtctttttgatctcgtcattccttccaaatgtttacaataaatttttgtttaccctttctttcctttttactcttttgccttttttccgtcccaatttccccccccccccccccaaacgcgtttttatgttgtgaacgcaaaacaaaaaaagaagtacaaaatgttattgtattgtgaaagaacggcttttagtgccaaaattttatttcacctctgaacttttgggcacagatttaaaagaatttttaaaaatatattttagtatatgtatcaattagtaattgaataattagctgttatttagggttatttgtcgggaatttcttattctttctacaaaatatttccatttcaaatgttgccaccgaaggaaatttgggaaaacgatgcctacgatcggtggaatgattttaatgtgaattttaatctgtcgaaatgcctttgccccccccccccttgtttgtttacttcgcctcacatgtcaaattcccgtaaacattctcggccctcccaaattcattcatcccttttcttggcttttatttataccccccccccccaaaagtatcatcttccaaccaccaaagaattttaatgcttttcccttttgatttgctttatgtaaaagcattaattaattaaaatggcctattggaacttccaggggttggaggtcgaattaaaatatgtaagtgtttaataaacttaaccattgctcaggtggctctgatcattgtgatttgtgtcattggctttgcactgatcgcttgcaccacagctgccatttggtttacagtggcggtaaaagggctttttgttgcctttga

SEQ ID NO: 23409 - DNA, 1467 bp, Heterodera glycines
ccattttataaacaaaaaaagtcgttgcatggtttaaaattacaaaaactagccattttatggtgacaatctgttaacaaattgcattcaaattctcaacatctatccccgacggccacagtcggcatcttcccccccccccccccccccccccctctgtcccacaaaatttttggaaaaagcgcgccacaaaaaagcgtttttaaagcagaaaaaagtcgtcgtaaatgaagaaaatgataagtgaaaacaaaaaaatgttggaaaaaaacaattccggtgaaaaatacaagccatttgaataaatattaaccattttgcattgcatataataaaaattttaaatgtccttgaatttcatgaattttccccactatgtccttgcaaatcggcatacccgtccttggaaacggagcatggacgatggcaaccctgaccttatctaatttcatgttaaaattttagcacacattttggccaacaactgctttccgacagtgaagttcgtcaagtgttgggtttcatggtcatttccggtaaaaattactccggaaaatgcaactctaccgccaagcttatgtataaatggcatgacaaagaatacctcggggcggcgcacggcgtcagcggaatttaccaaatgatgttgaggtgggcggcgaatcgagtcggtgggattaaactgacattgctttgtcaattggatgctttagcttctggaacttgcttgatgcctctgcgaagtcggacttaacgcaaagcgtcgattggttgatgagcacacaatttccgagcggaaactttccgtcctcatcccatcgaattggtaaaacattgacaaatcatatattaaaatgagtggtgcccttcgaatgcctttgtttttttaaccccacttcctttgcattcccctcaattcatttcccgacttttgttaggtgtgaaggatgaacttgtccattggtgccacggtgctcccggcgtcttgcaaatgctaattgtcgcttatttggtccttgaaaacgacaaatatttgaaggttctccgtcagcatattcaatcaattttccatttgctccaatttcagtcggcggagaaatgtaccaaacttatctgggccagaggaattctgcacaaagggccgggcatttgtcatggagttgccggtgagttctgtgattccatttacattgttctatttcaatttgtatttttcttacaatttcatcagattacctagtttccttttgaaggccatggctatgcatttcttctgctctatcgcctcactcaaaatgaaaaatatttgtcaatggccaaagcattcgctttcattttgatggccccatcttttgaagtcagccctttaggatgtcaaagatataaataacaaattatatattaataattgagaaagattttggttagaaatctgcccgaactcctgaccactcatggagtcttttt

SEQ ID NO: 23410 - DNA, 1246 bp, Heterodera glycines
aattattaataagggtcaaaaagcaattaacaggtggtaaatcgcaattgtttctttctgcactacaaccccgaatggtccaagggcaaaaaagaggacgataatccttggcgagattcgcctctcagaatcaacgaagcttttctgttactacttgcttcgtttaattatgcaggtttcgccattaggctattcgctcgcgatacaattagccctatagaatcttggagcaaaaactagtaatattttatcctttagaaagcatgcaaaatagtttgttatagacttgtgcaacaactatgaaataattcgctgaaattagtgtcctttcgacaatatgaaattaatttcgtttattttagaaccttaggttctgatgaattaggtaaaattaagttctaatttattattaaaattatgaataagggtcaaaaagcaattaacaggtggtaaatcgcaattgtttctttctgcagtacaaccccgaatggtccaagggcaaaaaagaggacgataatccttggcgaaattcgcctctcagaatcaacgaagcttttctgttactacttgcttcgtttagttatgcaggtttcgccattaggctattcgctcgcgatacaattagccctatagaatcttggagcaaaaactagtaatattttatcctttagaaagcatgcaaaatagtttgttatagacttgtgcaacaactatgaaataattcgctgaaattagtgtcctttcgacaatatgaaattaatttcgtttattttagaaccttaggttctgatgaattaggtaaaattaagttctaatttattattaaaattatgaataagggtcaaaaagcaattaacaggtggtaaatcgcaattgtttctttctgcactacaaccccgaatggtccaagggcaaaaaagaggacgataatccttggcgaaattcgcctctcagaatcaacgaagcttttctgttactacttgcttcgtttaattatgcaggtttcgccattaggctattcgctcgcgatacaattagccctatataatcttggagcaaaaactagtaatattttatcctttagaaagcatgcaaaatagtttgttatagacttgtgcaacacactatgaaataattcgctgatattagtgtcctttcgacaatatcgaattaatttcgtttatttttagacccttaggttctgatgaattaggtagaattaagttgctatttattattaaaatat

SEQ ID NO: 23411 - DNA, 1090 bp, Heterodera glycines
tcaacactctagacaattccaaccccaattacggaatgatagcgccaaccctaaatttttccggaatttctttttgggcgagtttgattatgaaaattttggaaaaacgcctatctcttcttctggaagttgatgtacgcctatctctttttctgctcaacactctagacaattccaaccccatttacggaatgatagcgccaaccctaatttttccacggaatttctttctgggcgagtttgattgtgaaaattttggaaaaacgcctatctctttttctgctcaacactctagacaattccaaccccatttacggaatgatagcgccaaccctaatttttccggaatttctttctgggcgagtttgattgtgaaaattttggaaaaacgcctatctctttttctgctcaacactctagacaattccaaccccatttacggaataatagcgccaaccctaatttttccggaatttctttctgggcgagtttgattgtgaaaattttggaaaaacgcctatctctttttctgctcaacactctagacaattccaaccccatttacggaataatagcgccaaccctaatttttccggaatttctttctgggcgagtttgattgtgaaaattttggaaaaacgcctatctctttttctgctcaacactctagacaattccaaccccatttacggaatgatagcgccaaccctaatttttccggaatttctttctgggcgagtttgattttgaaaattttggaaaaacgcctatctttttttctgctcaacactctagacaattccaaccccatttacggaatgatagcgccaaccctaatttttccggaatttctttctgggcgagtttgattgtgaaaattttggaaaaacgcctatctctttttctgctcaacactctagacaattccaaccccatttacggaatgatagcgccaaccctaatttttccggaatttctttctgggcgagtttgattttgaaaattttggaaaaacgcctatctctttttctgctcaacactccagacaattccaaccccatttacggaataatagcgccaaccctaattt

SEQ ID NO: 23412 - DNA, 983 bp, Heterodera glycines
gggttggcgctatcattccgtaaatggggttggaattgtctagagtgtgagcagaaaaagagatagcgtttttccaaaattttcacaatcaaactcgccccagaaagaaattccggaaaaattagggttggcgctatcattccgtaaatggggttggaattgtctagagtgttgagcagaaaaagagataggcgtttttccaaaattttcacaatcaaactcgcccagaaagaaattccgttccggaaaaattagggttggcgctatcattccgtaaatggggttggaattgtctagagtgttgagcagaaaaagagataggcgtttttccaaaattttcacaatcaaactcgcccagaaagaaattccggaaaaattagggttggcgctatcattccgtaaatggggttggaattgtctagagtgttgagcagaaaaagagataggcgtttttccaaaattttcacaatcaaactcgcccagaaagaaattccggaaaaattagggttggcgctattattccgtaaatggggttggaattgtctagagtgttgagcagaaaaagagataggcgtttttccaaaattttcacaatcaaactcgcccagaaagaaattccggaaaaattagggttggcgctattattccgtaaatggggttggaattgtctagagtgttgagcagaaaaagagataggcgtttttccaaaattttcacaatcaaactcgcccagaaagaaattccggaaaaattagggttggcgctattattccgtaaatggggttggaattgtctagagtgttgagcagaaaaagagataggcgtttttccaaaattttcacaatcaaactcgcccagaaagaaattccgttccggaaaaattagggttggcgctattattccgtaaatggggttggaattgtctagagtgttgagcgaggaagagagataggcgtttttcctaaaattttcacaatcaaact

SEQ ID NO: 23413 - DNA, 1856 bp, Heterodera glycines
tttcttcttcgtctaacacttctttcgcctgcttttttcattttttgaattccttttttgtcattttttcagcctccatttattattcattgttctaatacaacaaaaaaaattctatgaatttttggttttaataattttttagaatttgaaatattttttaaattttcaaaaaagcattcattgcgtcttcttcattctttgtttgttcaaatattttactcatcgcagaatatttattgtattattgaagcgcagccaatcgagaagcaaaatctccatttcttttatcttgaaagcataactgggcatcaaatttcatggacaaataattgccgaaaatttttaaaaattatgattgcatttattcattaaaagttaaaaaaaaatcagcctcaataatgggaaagttatttttttcattatttattatttatttgtttttgttcaattaatcgccttaacctcctacacaaaagcagcaattccgtccataattcccgcctaaaaaagcgatatatttttaattttgaagaaatattaattaattaaaataaagcatattaattttttatttacaatatttgaacaaatttaaaagtgacaaaaacgttaaaattaatgttaaaattagttagattatataatttaggaaatatttttaaatttcttagcaataaaaatgttacgtttttcttatttttgggcaattattttttagaaagttaaaattgttaaaagcgtgttatgatttaattaatataaaaataaaaataaaataaaatatcatttaaaaattgaaaatatttcaaaaactataattttttttattcaatttttcaaattgattattttttatattattaaaatcttaaaataaaacgccgcgaatcgcgcgggtcgcgtcgcggtcgcgtcccaccccctgctatataggcaaaaattttcaattgttttgaaaatctattaaaaatatcgttttttacaagaaaacatttaatggttttttattaattaattttaataattaaaaatcaataaaaacattttgaaaggaattttctaaccttgagaagaaatttttattgccttttggatttgagcgattgtcatcatgtttttgtgcacatcaaaaggccatcgtcgtcgtcgccctccttttttcatttctttttggctgcgcatttcgtcgccaattatttcttacatttttattttttattttttttgattgggtccccaaaattcattcattcccatcaatttgttaattttaatgattatgttgttccatcaccaaaatttgttaatttgattatttaaattcgaaaaattgaaactttttctttttgtgatctccatttttaaatttttttttttgtttacttatttattttcacaatattttttatttgaatttaaataaatttacattcgcgaatttttaaaatttttttccagcggcttctctcggcaccgcttacaatgagtctcaaattttcaatttttttaaaattttaaccgaaattgatgccaaattgttattccgtgccaaaatctgtcacataaatcctatatattttcatttactatgatagcaaaaatttcattattcaaatatgggaatttgtttatccaattttaaacgctccaaaaaccgaaatggctgtacaggacgaaaaccacacgatatgatggtattagaaaaaataaaatattttattaaagaaaaaattactcgtttttattttaggaataaaacagtagtatcataaattgggtcacattaatttaattttgtccttatttgatcaccagaatttttaggattaaaaatccttcattttaaagattgt

SEQ ID NO: 23414 - DNA, 1282 bp, Heterodera glycines
gggtgctgaccaaaaagtgggatagcgatgaggggtgctgagcaaaaaagtgggatagcgatgatgaatgctgagcaaaaagtgggatagcgacgatgaatgttgactgttgggtagcgaagatgagtgcttgcaaaagaggggttcgaaagttcaaattttcgaatttagcttttttgtttcaaaaatgggtaagtgatctcttatttaaggattgaagttcgggtcagggaacgattttcctatagaatacttttttactacgatatttaatgccacagaactttattttaaatatttgtttcactgacgcatgcattttccgtttcatagaaaaatcataatatataaaaatgggacatgaaattgggcgagattaaattcaactttttgcctgaaagataaagtttgatgattttccaatcctgaattcttctcatcaattatgtaatattttttgccgaaaaagtaatttaacttaaatccataagtacggtggggtgtccgagcagctccccatctaccaaattagggtttatcataatgatgcaacagaaatatgattttttcggtaatgttcagcaaggaaataaataatataaaacagtgattggacacctcaggcataaaaggagtaccgcgactatccattttgcccgagcaatctctgtcctgtatgtacttttcaattgtacagcatttccaaatcatttccattccattcctagtttgttgtgagctataaaaacattttcaaagccaaaaaacccaaaaaatcataaatagaccaatcgagagctaacggacaacctaataagaaaaaaccccggagggagagaatttaattaaatccaaacctccgggggtccgtgccgggtaccgcggggtaagcagtgctggctttggcttcatcacggcacccgacctttaggccaagttaagctcagcgttgcctaacttgccagatcggacgctagcgcatgattccactgtaccaagcaccccaccggaagttagtcaaaacaaaaaatatataaacccaaaatttcgagtccgctcggaggcatgacaatttaagaagaataaaaagagacaattcatataagtttttaactacttattatgaatattttagaacaaattaaacaaatttaacctgaagaaaccatacatttttgctatcattttaaagcacttaatgaaaagaaccagcatatactaaataacagcttttacgcatttgaaaaaataatttgaattggactcaaaaaaatttgattgg

SEQ ID NO: 23415 - DNA, 1318 bp, Heterodera glycines
ttgttctgtggaagaatttcaattaataatttaacaatttttaaaatttcaaaaagttaaattaattaaatatttaatgcatttatttcaattctatattgtattagcattttttaaaatttttttgcttttctgtcattttgaatatattttaatatttttgtgattttttgaatgattttaaattttgcatttttgctaaatttttgctgttcggaatagcataaaatatgtgcaatttatatgaaatcggaatgcttcttaatgctttgcaattatttaaatttttatttaaaattaaattcaatgaatgctaaattttactttccatatattaaaatattttaatgaattttggtttatttgcattttccaaaatattcttaaatatccaatttaatccataatttagtgagtcccattgattttgcatttatttataatttttgcgcaaatttcgctaagtctttgttaatgtacataataaaaactatttatttaatggtgctttattcattcattaattatacaaatatatgtatttttattattcttattaatcctttccttaatattctctatatgatattgttattttaaaataaaataattgttaattgcctttaattttgcatttatttatgtttttgtcattttgaattattatttttttaactttttctcgtgttaattgttgaatttatttttgattttataataatttaatcagcgcatctttttattagtattattatttttttgtaaaatttgatttatatttttttccttttcttggatttatgtgggctaataaacaccaaagatgtcataaatatggaataaaaagcccgaaaatggccaaatatggaccaaaatatggagaaaaactgccaaatttaagtttttaacccacaaaaatcttaataaatggttatatatcaatatttgcttaaacaaacttaaaaaatacactaaaaactaccaaaaaatggatttaacctaaaaatgcaaaataaaatttatttcagaagcgaacaaattgcaaaaagtcgactattttaaaagtcaggaaaaagggccaattattgattataaagccaaaaatgaccaaaactaaaagcattcgtattattattttttttaaaaaccagaacgttgatccttagagcgtatatttttcgatttaaacaatatacctagctctgtgaactttatgaaacggttttaaaagcctttttctaagagtaaagtcatttcggacttttcaaagaccgaatttctttagctttttttaacttacttgaaattttaacttctc

SEQ ID NO: 23416 - DNA, 990 bp, Heterodera glycines
  unsure (1)..(990): unsure at all n locations
ttggatgaatgaaggataatgtttactcgttgnttaatttattattttttctatctttantattagtttnaaattctatataatttatttaatgnaatatcctttttgtatgttatttatgaagcatattttatggcttttcagtaattctgttaattatggaatgattttattatttctaaaatntaatttatttttatttttcaagtttagttattactgtcctntagttaatcaattctcattagccttgttaattttttgtttgagttacgcggaataggacgacgattttacttaaactgtgtgagcttaagaaacttttcgtaatttctgttgaatttatttatgtttaagataatttttatgtttattttatactaatattttggtaaatattatttgtaacattagaaaataataattgttgcacttttgacgatccttaagaaaggagagtcaataaataatcgaaatttaattgttgagttcaaaataggattctgctggagggttttccgtggcgtgttcaccaatttgaatcttttttgaataaaaaagcaaaaaaatggtcaaaattaggcaatgtttaaatgggagaagccaagttgaatttggaaaggaccaaaagagtgccaaaaaagaaggccaaaaagacggggatgggaaaatatgaataaaatagtccatagccaaaacaataaaacactttaatagcttactttaggtgaaaaagataaaaataaaaataatttgcggcaggcaaagcatttaaaccggttttgaaaaccgattgaaactcctttggtaccgaagtattcattttctccatttttattttaaaccagttcaaaaaccggtttcaacactttggcgtgagctttattggcttactgcattgtattcgaaccaaatataaaacctataaaattgattttgagttgggccattacgaagggatcaattttccatttggttcaccccaagtct

SEQ ID NO: 23417 - DNA, 2903 bp, Heterodera glycines
cgaaaaaattttaatatttttttcgcctttttaggaaaatttcctccctgacgaaggggttgctccccgctttttttttaaattttctatttatctccgacaaactttgtcgggaattttgttcccgatccccgggactattcattttcttacacagatagagcctacggtttgggcatttcaaatttgtttaccttgcgctattataccgatgaaatggagaactttggcgactcgtctttggcgttgattgtagtgaagaatttcttctatcgtaattaatttaatttttatttttattttaaattaaattaaattttatttatttcttctatcgtaacttaatattttttatttttaaaattttttattaaattttaaaattccatacttaatcgggtttgttgctgcagcaacgggccgattttgtgtgcttccagtgcttgaatttcttcttattgctccagtgagtgaccatgaattatcgttgattttttcaactcggctgcactcgaatgtgttaattactaatgaaaaaaggccgaaaattggaagaacttttagcatttttttataaatctatgataaaaatataatataaaaaagtaaatttatttaattttatttctatacaataaaatatgacttataatattaaatttagataaaatatagcccaaaaatatatttatggaaaaatatttgcccaccctcaaataatcaatttagaaaagacatatttaatcatgtgcaataaaataaaaaaagattttttagaaagtgcttataatatacgtcatgatataatgtattattttatgttttttaaaattttatacaaaaatcgttggggaaaatatgaaattgtatttgaagtattttaagatatttagttttcggcatcaaacaatggcacttcatgcgctgaacgaagcgatgataaagttcgatttgcaattgtgctggcgaaaaagataaagaatgagatttttatgaataaataaatttgatttttccaattttaagcaaatattttattagttattacatgtttcagtttagcacataaaaatcccagctgaattttgataacaaaatgcaataaaaacgaaaaatatacctctataaaattgcataaatttaatataggaaactttgatataataaaatttcttattaaaaacggtagcatcttcgcggtataccaaattttagaaataaatttaaataattaaatttttatttttattgagcaaattaggatataattttttatttgccaattgatattttcttaaatttagatattttaattatttgaaaaactttttcaatacaaaaagggttaaagtttctttaatgttataacggaaatataattttttttaattgcaattttgttagtcattcatttgttttataaaggttaaaattgcctttcataaatgaggtgtccacaaaaattcaaaaatgtcctactaatattttgatgaataagcattatgaaaatggttgctgcttaatgtgacaatctttgctcgacttattacatttgtaatttgttaaattcattcattccgtccatttgcggtgtcgttgttaattcactgtgattagacaaattgaaattgctaaaattaaattaaattatttaatttaaatacatttttaaaggatttaaaaatggattggaaatttaattttcaacttttattacgggctttgttttttctaagtttcacagtcgttttcggattagaagacactttttctgtaaaatcagacagtgcagaaggggaaaattataaaaaaaaatgcaattaattaattttaattttaattttaatttagtgccggtgttgccgttgtcgaattctcaaggtaatttaaatatttataaataataatttaaattatttgattgcaaaataataaaataattaatttgattaaatttttatttatttattctttaacagatttgaaatatataaaattctgaatttaaagggttttatgacaaaaaatacaactacaacaagacctataactacaacaaaaagccagcctacagtgtcaaaaaaccggcctacagtaacagctacaggaaactaagcaacaatgatggcaacgcaggaaaaaagcccagctatggcggcgacacggtgaagaactatgactacagtaaacaagcagcggggaatggacagtacaaaagcggtgctggccagcaacagtacggtgatcaatcagcggcggcatacggtggctacaacaatgactatgacaaagacaaatcgagacctgcatataattatggagacgcaaataaaaatggtgacattttagactgttttttatttaaacttattttaaaaaacaaggatatgatggccacaatgaaggaggatatgactacaaaaagccaatctaccattatgatgacaacaatgacaaccacaaaaatggtaaaatgagttaaatattaaatttttgttttcaaattatgaaatttaagaggataaaaacaggaatgcttataaatactgtaataagccaaaaatattgcataataaaaataattataataaatatttaaatgaatattttttatattccatagagaaggaaagttctggcagcagcagcagcagaaaaagcagcagcagcaaaagcagcagcagcaaaagcagcagcagcaaaagcagcagttcggaggagtacggtaatgaaaagcacggagaagacccttacaatccggaaggaccaatgccaccatacatttatccaccttacaaagtaaaaaaaaaaaatgcaaattcatactgtattggaatgagttggctattttaggtgccgccagaatgtccaccgtattactatccgacaccagcaccacacaa

SEQ ID NO: 23418 - DNA, 1048 bp, Heterodera glycines
catattttctggatgatttagcaaatattgccaatgtctgtgcctgtttcttataactcgaaaactaactcgaaaacattgacagagagagattcccaacatttgccaaaaacattgccaaaacaggcgcataccaaaaacaggcggaatgttttgggctaatgtttgggcatctctatcccggtttttagcgttttagccgatgttcggcaatgtttgtgtctgtttctggtagtttatttgtcaatgtttgggaatgttctgtccatgtttttgtttcatattttctggatgatttagcaaatattgccaatgtttgcgcctgtttcttataactcgaaaacattgacagagagagattcccaacatttgccaaaaacattgccaggcgcataccaaaaacaggcggaatgttttgggctaatgtttgggcatctctatcccggtttttagcgttttagccgatgttcggcaatgtttgtgtctgtttctggtagtgtatttgtcaatgtttgggaatgttctgtccatgtttttgtttcatattttctggatgatttagcaaatattgccaatgtttgcgcctgtttcttataactcgaaaacattgacagagagagattcccaacatttgccaaaaacattgccaaaacaggcgcataccaaaaacaggcggaatgttttgggctaatgtttgggcatctctatcccggtttttagcgttttagccgatgttcggcaatgtttgtgtctgtttctggtagtgtatttgtcaatgtttcggaatgttctgcccatgtttttgtttcatattttctggatgatttagcaaatattgacattgccaaaacaggcgcataccaaaaacaggcggaatgttttgggctaatgtttgggcatctctatcccggtttttagcgttttagccgatgttcggcaatgtttgtgtctgtttctggtagtgtatttgtcaatgtttgggaatgttctgtccatgtttttgtttcatattttctggatgatttagcaaatattgacattgccaaaa

SEQ ID NO: 23419 - DNA, 1262 bp, Heterodera glycines
  unsure (1)..(1262): unsure at all n locations
tcagaattgaatcaatgtaggacaaaaatagcttgccagtctaaaccgacccccaccgaccaatttaaccttcaatgaattaattaaattatgaaaaaaatgaattcctggagtttgtcaaaaaattgttggggcccacaacaattagcattttatgcgatggaatatatatgcaaatgcagaagaaaattccgataattttttggattcaaaaaacatttacattttccccctaaattaaggcgtagtgagtgggtatttagttaaaaaatgaaaaaaaatgaaaaattggcgttaattatgcaaatgaaattaattgaaattcacaaaagaaggcaatgcactttcatactgatgacgcaaaaagaccaaataaacaaattcattaaaataatgaaaaaggggagaagaaaatttttatggattaaaaactaattgaagacaaaattttcgctaaaccataattgaattttttaattcaaagagtgatttttaattttgccggcattcgaatggcaaattgtgggctttttgtgaccacggattttcattatgttttggtttgggaattagttttttgtcatttaattttgttcataatatgatattgtagtgtgtggttagtagccaaaaaccaaatttaagtgatttaaaaaattaaaataaaggcataatttgccaaatttggtaaataaatatgcatattacaacgtataaatacttatgtaagtaaaaggtcgtctcccgccaacagaaaaaaaggaaaatgccacacgcaaaagcccaaaaaagtaggaaaatgccaaaaacaagtgcattaagcagaagagaaagatgagctgcctgctgaacacacaaaacaaaaaatgagagaggaaagggcaaaaatttaaataaaaatttaaatttgtaaaataaagcgggggagggggacgggggaagactgacatttaattaaaaattttgaaatttgaaatagcaaaaatataaaaaagagggggggggggggagagtcattcattcgttcgttcgttcattcgcttcgtacaaatattgtaaaaaaatataaaatagttgaataaataaaggcatttgcgaaatgaaagattattatcgtggtgagggatgggtggnggggggggggatgtagaatgaatgaatacattttatattatttgttcaaaatactatttttatttttatgtattaaaagtgagaaatgaaaaaagggaatgtgcccatggggagtcagggaaatgtgt

SEQ ID NO: 23420 - DNA, 915 bp, Heterodera glycines
  unsure (1)..(915): unsure at all n locations
tccgccnncctccgccacttcccttccaccacatttttcncaaaatttgtgggactaccaaacaaatttatgcacattcatacatatgttaagtgctcaaaaagcatgcccatgattcagttcgtattttattcatcatccgaagaaaacgcgcatcgcaaggattacggtaggaggtggtacggtattgattagctgtgattgagttagaaaaatttggcaaagtcggattggttggcttttgcctagtaacaattttgctgccgacagggattcgcattcttcgtcggcactgttcggaattgcctctgctaatggctttgacaacaaattgtcggggtcgagattcccgaacaaacaacacccattattccgatagctttaaggtcgattgacacggaaatttcccgatgccagtgaccaaaaagccgagaaccgagactctcgagtaagcatcatttatgtgtagtgtaatgtccgactgataccgattaaattgattatatttttagtgaataaagcagaaatattacgcgcaatttatcacaattaaataaattacgtaattaaaatgaatttcgagggacgggaaagaaaatcagcgaattgccgccaatttattattatttttgaatgtattataattatcaaaataaaattgtcattaaaaaggcgatcaaactcacatgattaaaaggaacaaatgaacatttatttgaaagaggaaaaataattccgaaagaaataaaataaaaaagaatttcgacatttaaatttcgtttagcaattcattcatttggcctcattttttgacattttctttttttatacatattaaaaatgtgaaaatttaaaagagacaattaaacggaaaaagcagcagaggagaatgacatttatgaaagaaaatcgacg

SEQ ID NO: 23421 - DNA, 2126 bp, Heterodera glycines
tttaagaatcacattccttctgccgagaatgccttaagagctacacaaaagcggcactcgacacgaaaccattcgcacgcggttggctgggactgaaatgcatggcggataaatgtgaaaatccaattccatggcgtaatataatgaattattttattattaaattcaactgaataatttaagaagaattaaaaaaagatgcatcatcggatgagcttgagacaattaaaacgctggaaaattaatgcgctgaactgagtgtgtcagcagcgggtctttgcatggaacggtcggtcatttacaagcaaacaaaatcattcaattcatgcattcattcatttaattaatcatttaataattaattaattagcaactaattaagatgccctaaatgcaattgtgctgttgagatggatggtccaattgctgccactgaaaattaccccaataatgaacaaaccgttattgagccaaatgataaattgaaatttcattgccccgagtgcaattacgaaatgtgtcgcaaatgcaatgcaaaatgggtggaagagcacaacaatttgacatgcgaacagttcgccaaacaacaaaatgagcaaattcaacgaaatctcaagtaatgtaaaaaataaataaatatagcatttttaggttccggttgtgccgataggcgccgccgggaaaatttttggtatttttaatgaattttattacaacgtatcgccctttttagacttttctcggagacctctaaattcaggacaatctgaaaattcatgacattttttgatttttcagataggtaccctcaaattcaggacaaatctgaaaaatcagtagacttgatagccctgcagaagaagcaaaaaaattcaacgactaattttaacgaaaaaaaaatcaaaatgttaccccgccaaaatttattttatttagtcccgtcatttgagtcctaatggtagaggaaatttcagtaccgtcgcgaagatagatgacttatttttcggaattttcttcactaaactcaaattttggctcaaaaaatgacgaaaaaagtcataaaaacgcaaaaaagccataaaaatgccaaaagatattttaaaaaattttaaaaaaggtcacaaaaaaatgcattttagaagcttcaaacaaagtatagaacacataagtcatttgacttaaattcccatccctaaatatgaatgtagaataaatctcaggtagtaaaaaaaataataaatttaaaaaaacattattctacaataataattttttaaaaataaaaaagggcaatctttaatttactatgtttttaaattagatggttgaacttttagacaataaaaatatatttttatgttttacaatccttaatttgatgcccaaatttctggtgcccaaacttcccccccccccgcgtccatgacatgagtccctttcgcactgagccatttcagtcccagttctgtaactgtgtacataggggaattgttgctgccaaagaatttttcggattcttactttacagatagaaaggagaagtttgtatataaaaattgttcgattttgattcaaagatttcaaattaatattttcccagttaaattttgaatttattattaaaacgaacaaattggaattattaaaactgttaattaatgtgaaaggaaaattcaacaaattaatttttgaataaatttaaaactgtgtgccataattccattggaatatttctgttgcttccatcacattctgtccttgactctgatcgtcaatgtggttgtactgtgatcacactgacctggtttgaattagtttggcaaagtaatttgttaatccatggcaaatgcttgttgaattgtgcgcgatattcagtgctattcaaaaatgtaaatttaaattgaattttcaaaaaatgttacctgattttgtaaagcaccggtgcgttgatactgtatacgatgacagtaagaaatgaaaagccaatagagtacggtgttctgacgaacacatttactaccataaacagctgaaaaaagaagttgatcagtgattttagtgccactccaatcatatttagcacgataaaaggcaataatgctttgacaagcttgcgattgttttcc

SEQ ID NO: 23422 - DNA, 1358 bp, Heterodera glycines
  unsure (1)..(1358): unsure at all n locations
cgaagcggccgattatccccataaaatttaaaaacgggcgcgaagcgcccgtcctgaggccgcgaagcggctgaattagaccttagaatataaaagggcgcggagcaccctttgaggccgcgaagcggccgaattaaaccttaaatataaaaaagacgcggatatggaagccgcgcatgcactagcaacgaagtcctttgcgcgaagcgctcatgtcagcacccgcccatatataccaaaagtatactgtctacaccgagcaattactgtgcaaagcatactgtctacaccgagcaatcactgtgcaaagcatactgtctacaccgagcaatcactgcgccacaacacgctagtttagatataactaaagcaacatcgagtttcattgctaaaacaaaaatctcgggaaccgctggcgggaggggttcgagattttgaccttgggggcaacttttgacggcgcatccaggaaaactataggcattttggtccgagggccaactgagcgccagcggcgctgaaatggctttttcaaaattttttttgctgttttttggattcaaaaattttttaaaggcctaaatgaaaaatcggcctcgataggattttaagttggaatgtttgccacattttttgcttcttcaccgaacccctagggcctaccagtttttccgaaaaactgactaaaaattgcatacttttttgggccatttcagcgccggtggaataactccccggcttttgatgggaggaggtcggtgtaagcggcttttttgtagagctcgacgagctctatccaaccatgtttttatatttcagaaattttcagaaattttcgagctaggccccctcgaaaattttccgtttttgaattttattattttttacagatttttccggggaaaacggagaacactttcaagcaaccgtttttcatgctctatcgattggtgtcattttcagaaaaaatttttaaaatttttttggaaatagaaaattttggttgctaggcctcaatttcagttctggctcaataactcgtcaggagttgattttatcaaaaaatcgtctaagagcttttttgtagagaattttaagcccaatctaatgtgctttatctcatgttttaaccatgagtttaaaaaaagttatgaaattaattgtgattttgaaattaaaaaccatagaggggaccccatggttttgcattccatgaaaaatttttttgctcctaaattagccaaaatgcatttttatggcctaatttaaggtgctgaactcgaataatactntatttttggtttcagatnttttgaaagggtgttaaaattttttgaaaaatcgtcaaaatttgagcc

SEQ ID NO: 23423 - DNA, 2129 bp, Heterodera glycines
tcatattcgaccaatgccatgtgctgaactagcctattgcccaaatgctcaactcgacggtccaatacatcgaatctcttgaccatggtggagtgcaacaatttcaacgcgaccatttcctcgctctccggctaaaagagatggagcaattagagaagtgaaaataaatattacgttatgcttattattgtaatactgaatatttaatatttgttttttaaaaagaattttataaaactttacttcaagggctttctgcatagccaatgctgcgaggcttccgaccggacctcctaactgaaccagctttgaaactcgggctgaaattttcctgagctgctcgccaatggttgctgccggtgcgcttatttcggaaaaggcatcgacgtagtcttttacatcctcgaccacttgaaatttgcgttaataaatagcttagataattatttaagctttttgttattttaaagtattaggttagcacataattattgtccgtttaaaaaagagatgtctgcgttaaaataccaatgaagcagatttttctccagccaatcttataaagattctggacactaataaaaacccgacataataaatatatgccaacccaatatctaattaatcaattcgatttacctccagcttcaatccatcggccaagtgacaatgctgaagcggcaataaataatgccagacagaggcgcatcttcacttaaacaaagttaatgaaattaggttaattaaaaataaatttcaataacgaatagatttattcttaatttcttttagcattataagaatgaaactttaaatacttattttgttaatttctgcccggttggctcgatcaattgcgctgcgctgaaatataacctttattttaatggaagttgaaataaacaatgagcgatttgttattaattgaatatcgaccagagaattattgtcagtaatttttttgacaaacaaaaattctgaaatgggttgcctgtgagaatgttctgctgtccttaccattttaatatggtatggaagagaaatcgcaactgactgataacaagcactatggataatgtcaatcaaatgaatgttgtaaatacatgccaatcaaaagataatttgttgatttgaccattttataaataattacatcggaaagcagtaaattaaaaaaatatatatgaaattagtcggtagggtacgattggcgcccccacaaagtgtccaagccacgaattgtccaagccacgaattgtccaagccacgttttgtccaagccacgaattgtccaagccacgaattgtccaaaagagtaaaaacccacgaattgtccaaagtctaaaaagctcataaaaagccggaaaatgggtctattttagggttttcggggtcgctgaataccaatacgacatttatatagccccttgcctaaccttagatccacccgaataagaaaaatctccaaatttgattaaaaatatgtgcttttttgtcttcagattttgctattcattaattgaacaaatgattcgtaataaacttgaaagtctacaaaaaagtcgaaagaagctttgtttgtcagcatttcaaacccaactgaggaggccgtaaattttggagtggagattgacgaactgcatgccgtgataacttccgacaatgttgaacaacagactttgaacgaggctgcactttcaacaatgacctttgagcgcggaaaaaccaattttgggtgagattgtctatggttgaaaggtatgtttgaagcgccgcaaaaaatttatttccaaactattcaggatttagattcacacaccactcaggaaatcgctgaagatgcacaaatcgagtttttctcaattatcttggccgtcttctcctggaatgccaatgttcttcctttacttctctcgaacatatatcggcttgacacagcgccagatgttggatggtgttgacgcattttgagataatcgactcaatttttcacccatcggcaaccattgtttgtttaaatttatgcgtttagtttcaaaaaatttaaatttttagctgcactcgggacaataatttcggctatcaactcggaacaagctatgcggctacccctagagttcggcaccggc

SEQ ID NO: 23424 - DNA, 1778 bp, Heterodera glycines
ttgtattattttcacttgatataaattaaaatttgaatttttttttaaatttttaaaatttttttgaatttttaaaatttcccggttggtcccggttcccggtttttcttgcggtcccggtcccgaaaaaaaatcgaggtcccggtcccggtcccggcttatcaggtcccggcaagtcccggtcccggttttggcaaaaattcccggtcccgtggcactctagttttaagtgcttgattatattcgaactatggcataatgtcaatttctaaatataatatttatttgtttagtgccaaaggatgggtaccaaaatggaaggatgcgatagaaattggtgccgctttgataatgtgagaatgattttttatgtttcgttgatttcggagcgttagttggggtttcagccgagtttattctacaaaatggggggcgggtggaagccgtaaatccgtaaatggaaagccggagttatggggacgcatatccgaaagcggctcaataaaaaagcgacaaaaagtgccgtaataaaggggacagtgaatgcgaattgtttaaattttcaattttctaaaaaggtataaattcatatttttaaattaatttctctttctgtgccagggaggtcacctgtgttcggtttacgtttgtggacaatatggtggaaggacagaatggcatcatgattggagctacttctggcggtagtttcacattcatttatatttctcgttgagattttcttttatttttattttacccatttttgtagcttgtggccggtcctcagtgggtcgtgtcggaggatggcaataccttaggctgggagtgacaaactgcaccaatgtcatttttgcatccttttttaaaatagtatttgcagcagcaatttttggctctggccccccccccccccgaccccaattacgaacgacaaacgacaaatttggcattttgtcaccgaatttgtcattacgacaaacaaaattttgtcgtttatcgtttaaatatgccatttttccgttggtcgtatgtctttgtcgtgtgaattgtcgtccaaatgacaattgacaaaatgctaccgtaaatttgttgtttgtcgtcgtcactttgcttttgggtggtattgggtatgcgttttttgaaaagccgggatccgccgctccagaaaagccgggggattatgggatcggtgtcgttcggaaccccgaccctagtgcaactcattaattttgaataaataatttgaaactgctgaagcttaacatgtccgtcgttgctggccatgaattgatgcacgcgcttggctttagacatgagcaaagacgaagtgatgctcgaaattacctgattttacggaaaaagaacggagtaattaacacaaatatttataaatttttcattttgctcattataaagcaatcggaaattgacccaaacacccaaaactttggcttcgcttacgatttcgggtcggtgatgcattatggagctaagggcgatcataaaaagtaagaatagttggatttaatgacctaaaattgcaattaaaggggcttatacgatcggatcactttgccacgcttttaccaacaaacgattggccaacgcgaacgaatctctttcaaagacgcggccataattaaccgaatttattgcaaaggcaaatcaattaaacataattaaatagattttccatttgttcagactcatgcaaaggccatgaggacaagtgccaaaacgggggctatttgaatccgaaatgatgcacaaaatgc

SEQ ID NO: 23425 - DNA, 2137 bp, Heterodera glycines
ggcggatgatcaatcaacgatcacacagatgtgcgctgcacgttgaggcgtgcttgcaacgcacgcagtgcggattgacgacgttcagcagcgacaccgtcgccctcagctgttgcagcggggtcgtcaagctgttcaagcagttgcaggatgagcagcgatggcaagtgggaggcgtatgcgagcatcaccgactgttgccggttgcgtcgtcgcagcaactccaccgcagggtcctgcaggtggtgcgagtttgagagaaaactagcatgcatgatggcaagccagcagcgtgccatgcatgctgtcgcgtgcatttgaaagcgtgtgtagcgcgcagtattcatttgttactgcgcacgcgacttgcaacaggcatttaactcgttaaaaaaagttaaaatccgaaaaaaaatttaaaatttttgtttaacctgttcaattaaaaaataattttttttattttttattttggcgttttgttcgacatgcgcttgcgcgctgcaattagcccgcacgcacgcatatgcagttacaggacaggagatcacctgctgttcgcggcacaggccgcacgcgcctccggcacagaacgcgcaaatgcagaaggcctgccatgtttttcgaaaaaagttttcaaaaaattacaaaaaatttctcaaccacaaatgtgccaatcaacagcacaaaaagtgcgacttcagcggaagggaacaacaaaaatggaagtgtttcgggcactgaatgaccagcaatggacgaaacagaaacaacggcagaggaagaggacgaatcaccggtggcggcgagtgcggcggcggcaaagttttgggcagtcaaattgaaaagcaccggcggcattcaatcaatgggagcggagcggaggagaggagggcaaaaaagaagaaaatggcaccaacacagtgattttttattggggagaaagaaagaaaatttaaacagagcaggattattgattgattgattattgattagcctgtgattgggcggtcaggtagtattgattgggggatagtattgattggctatgaattattgattgattgattgattcaaattggctggagaggaaggcagccaaaaaatagcggcggacattgtggccaatggggcaacttgttgtacacaggcgcacaactcgttcacacaaattatttatttgtttttttattttttaaaaaataaattttaaaaaatcaaaaaaaatttttgcttaaaaataaatttaaaaaattgctttttttcgttgctaatttttcaattgttcatttttttaaaggaccaaattttctagcaaaaaatatttttttttttaataataaaaaaaataatgcacgattttgtccccattgttgaattgtgatgagaatagggctggcaaaaatatggacacttaaaattgcaaaaaataaggccataaaatgacaaaaaatggacattttttttcaaaaaggggtaaattttccaaaaatttcatcaaatttattatagggctcaaaaaagccaatttagttgatagaagatgcctttctaatagaggtttttggaaaaatgccaaaacatggagcaatgcattcattcattcatccctccacctccagggctgcacgtaactcggttttcaattacggaaacgcgtaatccggtttttttaaatgatggaaatctctaaaaaaaaagtgattggcatacattcctattctaaacccaatatcggacaactgggataggagggatactgagaggtcgggaccccgaacttaatcccgcttaatctcgcttaatcccgcgagatcccgcttcaatccatgctctaatctaaacacacttcgtgaggaattgttacaatataagtacaagttttgtcaagtatttcaagtggcatcttgctgatgtgagtgttttgtggcgctccatggcaaaatgcgtccgtcccctctttttttgtgtgtgtaaagaaaaaaaagccccgcgggggttgattacccacgaaaggatgaggaagagaggcggaggacctcattcattcattttttgccgcaagaggacgcggaacacggcacacaattcaattacaaaattggaggaaattgacttcagcagggaaaataggggg

SEQ ID NO: 23426 - DNA, 1407 bp, Heterodera glycines
gctcaatcgtctgatcctcgcacctcacattgacacgtgcgatgagatcaacgatattatgatggcgaacgtgcctggtcaagcgcgcgaatatttgtcctcggacaaaccgcttgacgagcggccactggacatcgatgaaatcgagttagaagtggcagcgttgaaccgacgcacagactctgggatgcctccccaccgtctgcgactaaaggtcggaagcgtcgttgtcctccttattaacaaaagcgataaggaaggactgatcaacggcactcgcatcgttcttgaagaacttggcgacgatcgtctggtcggtcgcgtcattaacagcaactctgttggtggccaagttaagttcttcatcgaaagaacacgcaatgtctacgaggacaaaacgcctggcggcttaaaatatgagcgtttgcagtttcccatcaaacctgccttcgccatgaccattctcaaaggtcaaggccaaacaatcagcacagtcggaattgaccttgaaagggatgtattttcccacggtcaattgtacactgccttttcaagggcaacggacgggaacaacgtccgagtgtacgctcccagaagggagaccgatgcacaagacagagtcaaagtgctgaatattgttgcaacgaaaatgctcattttgcaataaagcaaacgagttaagtccagcgcgtgcgcactttatgatgtcactccgttctcatctgcacttaaaacggacacatattcaaaaaaagtgctgccagctggactgaaggaggcaggtgggccatgacgtgcgagttagggcacttccggtttccattgcattgaaaaatgcagtgtgtcaaggtgaaaccaagtgcatgtcggctgacgcaaagaccctaacacaaggcctaggtagcgaagctcccaaagcgcgaagcgctttaagcaccaagacacatgtaagcacacacccgctagttatatactactaaagaaacaaggcaactcatttccaaaaacaaaatctccttacggggcgtcgggaggggttcgaaatttcgaccttggggacaactttttgaggcgcatctgggaaaactataggtttttcgctccgagggccaactgagcgccaacggcgctgaaacggctttttcaaaattttttttgaagttgctcggattcaaaatttttttaaaggcctaaatgaaaaatcggcctcgtaaaggagcttcgtatggatgtttggcacattttttgtttcttgaccgaacccctaggccttaccagtttttcttgaaaactgcgcaaaaatgggtcacttttttgggccatttcagcgccggccgaataactcgccagatattgatgataggaggtcggtgtaagcggcttttttgtacagcttgacgagctcta

SEQ ID NO: 23427 - DNA, 1103 bp, Heterodera glycines
  unsure (1)..(1103): unsure at all n locations
ttggcagccaatttcagcaattgtccatttccgtcaaaaagttctcttttccgaatcggcgtggagagcattctaaaaattaattaaaaacgaaagaattttagtttttgaattaattaattaattaataataataccatcattatttggccaagaatggcgtactctttctcgaaaccatgaggaaaatcagtaggaatttggagcttttcagcagaaaatagcattttgttgacgctgttttggagcagaaacatacaaaatgattcggaagtctgaataaatattcaaaattaataaaattaaacattaaataaaatattaaataaaacctgcggcattttgaaagtgccgtccaattggcattggttggccaatgttttgttccgactgtgccattcctcaagcggataagtttggaaagccaacaaatgaatgacacttcccaaaaaccaagcgatgtccgattcgtcggagtcaagtctcatttgcttaaaataatttttaaaattcttttgaaaattgcgcaatttttggcaccgaaatttgctgtggactcattgtgatcaatttgctcattgtcaattcactttgactacaaatttggcactcgtcaatgaaagtgatgcgaatgtttccgcccattccgttggaatcgttcgattctttttcgacacgaaagttttccaaggttggggggtacggtagttcagtggcccgaagttttgatacaatgaaaattcatttcatttttcatccgtagcnaaaccctcgcaattgtactnncgcgaacgtggagtcgcgcagaatgataataatttgaaagttccgccaaatattggccaagcgaatttttggtgcttttcaacgggcaaagaaaattcgagaaaaagccccggcactttttcgagctcagagaaaaaaactttcgctcgtcaaaaacaattgctgcccagaaattacagaaactttccgttggcttttccgtttttgcaaatctaaaaaaaagaaaaatcggtgaaataaaaaacaaatattaatcgattttactaaattggccatttgctaataattggtgcccggctgaaatttttagctttggg

SEQ ID NO: 23428 - DNA, 1739 bp, Heterodera glycines
  unsure (1)..(1739): unsure at all n locations
caaagggaggagagagaagagtggtccctccctcccctctccaaaatgtctggaaaattcaaatctaatcgatgtttcttcgttgcaactaagcaaagctaccaatgcttccaatcctttgaaattcagagagtctaataaattgaatttattactagagtttctatttttagacctaaaaacgctttgaatttgacattttttaaattttaaaatgagtcaaattttaggggggtatattttggaaaatttttagattctttctttggatgtgttaaggaattctgagcaaaacgtcaaaatatgacaaaattgtctttaaattatttggattttaggaaaaagaattaattaaattaaatttgaaagatgcaattcattagcaatttaaaccaaaagaccaatttagattttcagaaacaaaaagctattgagcagggctcccagatctgagaatttatcctcattttgtggttttttgataggtcaatgaggattttttttttgaaataaggaaattataaaatttttcccgggggcgcctattggcaccgccggcccccctcttccccaaaatttttgtttttttggaaaaattcctgggaccatccctgaaatggacaatcaaaaatataacatttgaacatttaatttgaaaaatggggctttttgacccaaacttatttttaggaaaaatttcgaaagtgttaccgcatcaataattaacagcaattaacaaattaagaagttaaagcgattcttcggtccaaaaaaggatatgaaagggacgaaaaaggtgaaagcccaaaaaggtgaaaatgtcggaaggtgaagggtgaaagatgcaatttttcaactattttattcaattcctatcaataataactagggctccaatttatagttttttcactatttttttcctgagcttcccatagcttggaatgcacgcacgaaaaacatgttttttcggctgttgttaagctacttttcgagttattagcaactattttctagttttttttacaaaattttaaaaaaaaataataatttcaactattttggcgttttgccaaaatttgttatgaaaaatgcaataaaaacgaaaaatacacccctaagaaggtccgatttgcagcgcatgacaccaaatgacttttaaatttataaaaatagataaaatttctctaatacacctacccatttctacgtatatgcaaccgcgcgaaaacgacccccggccgaaatctgtgtgttgttaaatatacccaattttcttaaccttttaatttttattaagattttttccgacttttggcgacatttgttgacgaaagtccccgaccacagtttatatctctgaagctgaaaaattttttaaatgttaaggatgaaattttttaaaagacgaaaaaagtgaaaatttcaaatgcatttattcttcgaaccattagctaattatatgttaatttcattcccgaatttcaaggcattgttcttttttatactttacattgaaaaacgctagggaaacaaactgggaaatacaatagaactgattgcggcaactaattacagtcggtgaatcgtcactcggtcttccgactttttccatcctattcacaaatacattctaaacggtcttttctttngcgactntttccacgccccaaaagcatcgttagaggagaaacgattagtncgtgaaatcgaagcctgactaaaaaatttgggaattt

SEQ ID NO: 23429 - DNA, 2048 bp, Heterodera glycines
  unsure (1)..(2048): unsure at all n locations
tcatttttaatgtttcgtcaatgaaacgtctccaccacgtnccctttgtgccaaatcacgacaatctnnncgatgatgaccaatccaaatnntgggacgggagagagccacggttgttctcgcgcaatccgcccagaattccttgccagtgtcagcttccgatgatcgtccagccgcggagcgagtcgtgatgacaaggacaagctcggcttcctgactttgaatcgaaaaaggttccctggattattcccaaaaatccaagagctgtttcccgttgctcgggattgtgagaggaaaatgagatactttccatttgagtcgatgatttttgatggattaaaatgatcggacaattttcggctacaatgcgtgggcccatataatttaaaaacgatgacatttcaacatccggtcttcctggtaccaaccgatcacctgctggagagtaaactcccgcgtccaaacaccgtacaatggcactgtgcaatcggtaacactttgagagaacggtgcgatcgatgccttttgctgtttccagcacttccaaaattgactcaaacccaaacttaccacgaataactgtcatttgactcggtaagtgtacccgtaactgctgtttatctcctgtcagaagtattttctttaccgatcggaattgtgtgagaattgacaaaactgccgaaagcgtggcttgcccacactcatcaaccaacacataagttacgttgcccaaatccaatgccaactcctcagcaagagccaatgtcatgaagtacactcggtatttggtctgtttcagaagcgcggcagtggtcgttcgttcgcgtgcccgtcttggtgctgtgttaaagtcatcgacgtattgcttaaatgttttattatcactccattttttcggctcggttccttcagcggaaggaacatttccatccctttgcacagcttcaactaaaagattgtcccccaggggcctgatcctgtccatgtaacgcccttttccttgcccagagaaaagtgccaacattggcaccttttctgacaaactttccatggtgtccttcaccaactcacacactgcgacattcaaaggagaaactgccaaaattgcagcgtcacggtcctttttgagcacgcttgcgatgcaggccgctactgacacactttttcccgttcctgccggtgcctgcatgaaaattacacgggattcgtcgtccaaaaacaatccgtgagtgattcgctggtcctcgttcaacttaccgaccgcaatttcgttacttgacaacctaacggttggtcgttgttccgctccgtctttgcccattcccatcaatatttttaaaatttttgagacgggatattgcccttctgcaatgtccgacggaactgaaagttcaaatgcctgttctctgaaagggagacctccgtaattaggaattggaatcacattagattccctttcatcgagaatggattcccaatcttcccagcccctgtcgtagccctttttagccctgtaactcaaaaacattttcacgttcatcagaaagttacccggagcggtttcatttactgacagtccaattactcggccaactgaacagcattgggctcttgagtcacgcgcaacttttgcttcgaccggcgtgtcctcctcccatgcctcaaggaaatcggcaaccgccgatttgttgttgatcaaccattcgaaagagacgcgttgtgcctttttcaaattcgtttgcacttcatccggtcgcacttctggtctctgccagacgagttggacattgacagtttgcttcgccaatttctccatttcgaatgaacgttggacagcggccgcagctcccatcaagcgcactgaaaactggttaaggggaaaacagaaagagtccagactttctttggcaccaattaccaccgtttttccatgtgaacgaatttcatttcctttcagaaaaggagttaccaggggtaaaatgtaattttcacccatccaccattcttatggacttgtgattttggccanaattaaggtaaaggagttg

SEQ ID NO: 23430 - DNA, 980 bp, Heterodera glycines
ttttccaaggaggacgaggtgcagcgtgaccgtgtgtctgccaagaacgccttggagtcctactgcttcaacatcaagcagacaatggaggactcaaatgtacgttttttgtggagtcctttactttttttttattccacctcccgtcgcaaatgattaaaattttggtagcgggcgttaacaattttctgagccctttacaaaactactgtcagaatgggttgagtgagacccaggggactgcggtgttttttcctcctttctatcttttgattttaagctgaaggacaagatcagcgaggacgacaagaagaaggtgctggagaagtgcggtgaggtgctggcatggctcgacgccaaccaggcggcagagaaggaggaatttgagcaccagcagaaggaactcgaagggatctgtaatcccatcatcaccaagctctaccaagccggcggcgcaatgcccggcggtccaatgcctggcggagggatgcccggaggtggcggcgctgctggtgcgggaggagccggtggaccgaccatcgaggaagtggactaagcgagtcgatctcttcgcgatcatttttttgtttgatcgattatttaattttatttttttctcgcgtaaattgtttgacatataaattcattggttgcttacttacgaatctcaccgaacatgcccttctgctttaaaccgtatgttaaatgtaaaaagccaaagacaaattggttcgggaaatcattgataccttgtgtggttagtgatttataatcggaaattcaatattttaaaattcactttatgatcgtatctatatagaatgatattttttgatgtacaattgtttttgactatttttaggttattgcgatcaaattagaaacaaaattgggtaatggtgaagctggtgcccccccccctttttggaataaaaaattttttcttttaaaaagtcgtgaaaactcgttttacggggttt

SEQ ID NO: 23431 - DNA, 1200 bp, Heterodera glycines
gacttgtcgagactgtcgcacattttggagtgggtccgaatggattaccttttggcccggtgcaacggattcgactcggccaccaattgggattggaacgacgcactttcacccggcgaacttcaagtgttgcatgtttttcattgtctatttggctcgttttgttcagcgactttccatcggcagagtgctttaccataagccgagggtcgcttttctcgacgaagccacgagttgtcttggctttgacatggagagcagcctatacaaagtgctaagggacgaaggaattacggtcggacacttttggacgctcaaattcgactcgttcggttttacaattgtttaggttgtctccacgggacagcgttgttcgctgaagcaattccacgagttggaacttaatctgcgaggacggcattggactttggtcgagttggactcggtccggtcgatggtcactgagccgtcgttgggaggagcggcggaggagggcagcagggcatgacgagcgatggatggtcggggcatccgccgaatggcactttcgcaataatcgcgtcttcccctccctccccctcctctccttcccctctctttctgtccatattttctcatatttttgcttctcattttcgggtccctcccctcctaatcgaattggccattattaatttgttcaactaataatttgctaattttgcacctttccattgtcagtcattaccaatttttgcttcgcttttctttgtctgctgaatctcatccgttcatttataaacctctccttcctattgacaatgaccactaaaattatttcttttctctttttttaattcttttttttctaaaataattcattcgcttctaataataaaagtcaaattgacgcaataacttcgattttgcttcttatttttttgtatatggaattgatttttgtcgcagataataaattttcgttctttcattattgttttcaaattacattaaatttattaaaaagtgcattttaaatttacaaaagaattgggatgatttggagcctaagcgtggcaatttgttgtgcttttattaaatgattgtcttcgttcgctttgtccatttgtcgttggaaaatgggcgctttgggggaaggacagtccaaaacggacacacaagcggaacttctccaatccgaagcattggcgaaaacgaaac

SEQ ID NO: 23432 - DNA, 1352 bp, Heterodera glycines
tcgcccctttccaaattttaggcaattttgggggccggcaaaaatttaaccctaattctgaccccaaaatgtcgaaaatcggaatttctactccaattttttgcgggaattgaaagtcggaattctgcgataatttcgtccccaaaaatgacggaagaaatcgtaatttgttcatctgtacttcaacatacaaacaatgcttgttactactataggcccagcgaatggagcggcttttgattaaatgacaattaatttatgttccgtttccatgacgatattaatagggcttcagtttaaaataccctaaaaggcgcaaaaatgggcacaaaatggacaaataggcagcacacacaaaagtctcaattgtatgaattttatttttttttcttgccttttttttgagaaaaattattcataaccttactcaaataaaaaaagggggtaattttttaacgagatggccgcaagcgaaggtgtaccgacattggcgcctcgacaattacgcaacccgtaaaaatagacatttgcgcctccacaattgcgccacccactaaaaatagacatttgcgccgcccagtataatagacattttcgccacccagtaaaatagacatttgcgccgcccagtataatagacatttgagccgcccagtaaaaatagacatttgcgccgcccagtataatagacatttgcgccacccagtaaaatagacatttgcgcctcgacaattgcgccgcccagtaaaaatcactgatcacaaataaacgaagatttgctaattaattttaagtgatcgaatttttaatttagaaaaattaaataaaaaattattatttaaaaaatggtccaacaatacaaattgtactattttgatttgcgcggtgtggttgaacccatccgcctgttgcttcactatgttggccaaccatttgaggacatccgctttaaagactttgaagaatgggagaaaacgtacaaaccgagtgagtaattaaaacatgtggcataatgccatagaaataaatgccaaattaaaaaaaacaaaaactttttcagaatttttctacggaaaagccccagttttggaggttgacgggaagccattggcacaaagctcggcaattttgcgctaccttgccgaaaaatttggtaaattaattataataattaattttatttgtttttaattataaatttaaatttaaggcttggccggcaaagatgaatgcgaaaaggcgaaggctaacgaaatcatcgactttcaaaaggatgctaactccgaattgatgccctatttgatggtcaaaattggacgccaagaaggcgatttggtgaaaaaataatgcaa

SEQ ID NO: 23433 - DNA, 2436 bp, Heterodera glycines
  unsure (1)..(2436): unsure at all n locations
ggccactctgcgataacaccaaaaatagaaaacttctttttaattcattttcttggaggaaaatgccaattgctccaacacaattaaagaaaaatgatagaaaaaataaagggaaaaagaaaattaagcacaaaaaggtaccaaaaaatggagaaggaaaacaaaaagattggaagccgttatttaacaatttacgataaagtaaaagcccgaatgtgaaaaagaggttgaactgtccctaaaaaaacagttgccttccgatcgattggcctgtgatcacattgatcagtgttctctgatcagtagtccgatcacagcagaatgacgaggccagcgatcgcaactgccaatgcgaaattggacgggcctccatctccttgtgggcctcgccagcagaagccgtggtcgtccccctttttgtatgccacgcatttgtaaccttctttacacggattgcccttagaacagccttaaaagaggttaaaggtatcattttcgttcatttcaattgtttcttatttctaccgcttaattgattttcgcggatttatatgttatcctacaaatggcaacattattcatgcgccgtgttggaaatggcactttttcgccattttttgccaatgatacttttgactttaaatttcgcgttttctaatttaacgtttctcataccggcgtcacgtttctttgatggcactccgatttcgaccggcacattgcctttgtacccttttctacgccatcctttgattgggcatttggcgtacgggttcgcgtacacttggntgcagcagntttttgaaggtgcaactgtagcattttgagcacaccgtactcgaaggagttgagcggcattatctttgcagtgtccgtcaagttggcattcgatgcccgcttcagtgaaaccctgcaaattatgtgataattgggtggtccaacgacgatataaaataaatatatgacggcatcaaattgaatttcttttcgttttatgtgagccctgattttaagcgaataagaaaatttttgaaaaaatctcggtctcgagtctcggggaattttcggtctcgaacagcactactttgttgtgcttgggagcgacctattcagtttttaaggacctcggaattgtatcaatctaatataaattcatgtgaaaagtgtttgcttttatttggaatttttattttttatttttaaaaaatataaaaattattttaaaataaatgcgttcaacaatagttttttattaccaaatataattgcaagaatattatggttgcggtaacatgtacgcagaacattgccaattgcatttcactttaaaatgatatttttaaataattttgccggaaaaaaaagaatttataatattattatgacgataattttaaataataaatatacaaattggaatttaattcttaataattagcttagaattttattttaaaaactttaatttgagtaaatgatatgcattacgattttgctgtgcgcttaaataatgccaaaaataagctaaacaaacaaaagtcatccattcattccttttcataattaaggaattgaatttctaataatagagctttttatttagggccaaaattaatttacttttttggaagtttttttaatttgctataaatcgctataatttataaaaacaaaaattggcgtttaaaatgaataactttgagcaggtgtgcaatttgaaggacaatttgtaaatgaattggattcatattatttttgttcgtttcttaatcttcattgttaagaattacggctgaatcttgtttcatattttgtggctttttaaataaaattaaagcaaaaactgcgtgccatcgcggttactctccgccaatcattcgtttaacaatgccaatttagtagggtcgtagccgggcgagggggatgaccccggttaagccgcggaacggggagagcggggatgacgaaacgggcgatcgccgaaaatggcgactcataaaccggaggacgagaatttcgtgtttcgttttcgtgaaaaataaatattttcgtttcgttttcgaaaattatttttttggttttcgcacacccctggtcctgaccccccgatttcttaacacaattgcatcaaactttataaatttttaggttgatttttacattgattaagcacaaaatcccggcggacgggatcgggatcccgctggattttctcggaatcccgcggggattaaattcgggatcccgacatcggggtccgtcccgaaccctttttaattcatcgggattgattgaaaagatccctcccgaccattttgccaatcccactgaatcccgaagtcaaagcctcgggattgatggaattggatctggatttggggttcctccgaacccctggggaggtctctaataaccaccatataaaaaaaagcattt

SEQ ID NO: 23434 - DNA, 918 bp, Heterodera glycines
agtcgacaattgggcttcgcaactgatcaaactcttgattgtcattaagaagatcaatgaccattgatcgccgcacatcccgttggttaccagcaccgatcggaatggcatttgaacagtgcttaatttaaaaattaaacataagaaattaattgataataataaaaaataccttggccaaaaagagtgaaaagacgctcaaaaagagaaaatgcattttgtttctttcgattaaatttagaatgaattaatccagtaaattttctgttatttattcattttttcatcttaaaaatgaaaattcatgaggtgatctatagagataaatttattgtcgaatttattggctttttattacctttttatgaaagttttaaaattaatggtatttaatcataaaaagaaaaaaaagaatatgcattttatttcttttggttaaatttagaatgaatttgaatttagccagtattttttgttcatttttattcatttttagagataaatttatagtcgaatttattgggtttttattaccgtttaatggcagttaaaaaatttatggcaattaaccatagaaatataatcaaaacattttatttttgcaaaagaaaaaccatcaaaatattcagtcaaaattcagtccattgaaatttctttttgatttttttattagtgcaaaaagaaaaatgaaatttttaaaagaaaataaataaagatttccaatttttataacacgaatttgcaaatttaataaacattcattgaatgtgtaaatagtcgtcccaatattcgcgcaacatgtcaccctcacacgccaatgaatcgtttttattgtgcaatttgccacagcacatacagtaatggacggacaaaaacggtgtcgttaccgtatcagtcgccgttttatttcgccaaaaa

SEQ ID NO: 23435 - DNA, 808 bp, Heterodera glycines
  unsure (1)..(808): unsure at all n locations
ttcaaaacgacggaacattaacagcacaatcactagcagaacggacgtaatgattgatacggtaatgtgtacggtgtacagtaaggagagtgnaagagaggaatggactccaaaatccatactttatgtaaaaaagaactatagtcatcgtcatactaattaatatgtttaaatcacatcactttaattgaatgtttttttaaatagttgaatcgatccgaaacaacaaaagtgtaacaataactttttttgtaaaattttaatgggatttctattggggtggaaaatcgaaaatttttgaaaacaaaatgtatggtttgaataaattttgaggaaaactcagttatcctgattagagagagaacagaattcttacccgaatttccttttgaatagagagagaaattgggttctttctgagttacataattttttaggaaaaatattttttaatgaaatttttccgactttaagcattgttttgtggtattcagcagatcaccatgaaggagtgtttgatcagttgtttatattgactatttgattaatatagactgacatttgaggcatatgcatttttttctgcgcactagtttcgatattaagcataaaaaacgcagtttccacttggtttgaggcttctaagttgacttttattatgcctttttttttgcctttttcgggattttcgtgccttaaattccttttttggcattttgccgttttggtgccttttttggtgtttttttccaaaaaattccattaactgcaaaaaaaaatcgggaaaatacacccctaagaaatgact

SEQ ID NO: 23436 - DNA, 1332 bp, Heterodera glycines
gaaaaatggatgtcaattatgaagaaaatgtactgtcccgtctcatatacaagggttgcaagtcaatcccgattctcaaatccgattctcgatttttggatctcaaaaattttttactttgagcattggaatttcgagaaattttataaattgcgcaaggactacaccgcctatcaccactgcactacaaagcccagaaatttctcaaaaaattgtcggttttttggtgtcgattccggattagtacagttttgaatcttaactctaacaaaataagcaaatcacgagcaattctatggcatgtatcaacccaggcttaccacgaaacgaaattggcgaccagcgccatcaaagcataagcgtaacattcacgggcaccaccatcggtggcaccaatgaagcacaacgcggacaccaacagtgaaatgacaaagaaaaacagcgaattcggcacaactttgccggcagcaccgacggagaacagaaacagtgccaacgcgatgagaaaattgacgaacggagagaaggtgtccatgagaaaggaggaatccgctgcggagtcattgctggcactgtcgtttccaacggcatggcttggcccttcttcagcgatggcactttcactgccatggcttggcacttgtcccgctgtggcacttccactgtcactgccatggcttggcatttctcctcccgtaattagcaacaattgatcattttgcggagcattttcagtgcctgacgatgacgaggacgccgaaggcgcgatttgttggttgtcgttttgagacgatggctcatgatgaaccaaattgatcactctctccaagaccgctccttgctgaagcagggaattgttgtgccggaacattttcagtgtgaagaacagcatcatggcgaaggacacataggcgagaacaattgggacgatgttgaaaatggtggaaattctgaaaaaattgggagggaaaatgtcggataaaatgacagaattttaaaaattggccagccaagaatttgtaaaaacttgtcaagctttgcacttttttcttgcaacttttggggaaaacaaggcctcggttagaccatacccaatgaattggacaaagcaaatgagcagcaaagtctgcagttgttggagaggaaaaacggcgtaaatgagcgtttgccattgctgttgcagctttgtgagcaaatagtcgaccagagaattcatttacacaaaacaatagggaagaaaaaatcagaaaaaagaaaaatttcgattaacacggcgagtcaattttgggctccaagcgcaaataagtttattatttatttattaatcagaac

SEQ ID NO: 23437 - DNA, 2189 bp, Heterodera glycines
aaaaatcaataaaacgcatttttgaggcgcgctttttcaaaaaaaactttttgggaagagggggcaggcgccgccgggaaaatttttgaaaatttaattaaaatttgttgacagattttcaccaaaaaatcatcaaattttgtgatttttgtatcatttttctaatgagaaataagagttttggcgcgccgctgagaacagtttttcagcaaattaccaaattttgcgattttgggccattttctaagaaaaaataggagttttgggggcgcggcggtgccgataggcgccgccggggaagaaaattggaaatttcgatcatttataaacagtttttcactgaaaattagccaatttataggtaaaattttgaaaaattttatgggaatttaatccaattcttaggggtgtaaaagtcgcttttcgcgccaaaaagcgaaatgcgaaaagcgaaatgcgaaacgccaaaaaatgcgaataatgcgaaaggcgaaatgcgaaaagcgaaacatcggcccatccctgatacatatccaggccaataaacacgaatgagcgaacggtgaaggatccaaatgattatttggagaaaatttgaaaatcgcaaaaaaaaaaaaagaatttaattaattaaaaaaataaagtgggtgggaaaagttgtacccggtttgaacatttcgatggcaattatttaatgcaaattggacgatactggcattattctaaagctcttcttgattaggagaagctttcccaaaacgaatgctaagcaatttgaagaatcagaaaaaaaagatatgaacgttcgaaattttgtttttcttaaaacttttgtattcgaccatagacaaaaatgaattcattatagaaaatgcagaatatgttaaatttgaagaaattctatttttttctctgcactctctcattattggttgatctctcattttttgggactgtgtgtccaatgctcaataaaaacaaccaatacacaaatgttctaaatttgtgtcagaagaatgaatgtaatgtttcgtgtgctcctcctcttttcctccccgttttacccatttttttcatcgctttggccccggcaaaaaagttgattcaaatcaatgcaaatgtaaacaaataatgtttttcaatcaaattattttttcctgagctctccgtggcctgaaacacgaaaaatatgttttttttggaggagggtgttaagctacttttcgagttctagaggctattttaggtttttattttttagagcttaaaaagattttaaaaattttgaaaaaacctatttcgatctattttggccattgcccaaaaatgcaacaacgaaaaatacacccctatgaatcgacccgaaagtattcaaaaatacatccctaagaaatgaaaattttctcaaaaatccatctccaaaatttatttatttattttcttgacaagaatttggattttaaaattatttatcttaatattgactttgcctaatttttataatttttgaataaattttgtcattttacactcctaaatttgaggctatggtttagaaaaaaaaacaggggcatcagtgtaattgcgagaagttttacattagctttatttgaagcttatagggattatattaataaatttaatttattaaagttttgcactaaaattaatcattttattttaattttttaaattaattttataagtttggtcttataaaattcatgaatcatttagtacatacctaatcccattcatatttacaagaaataagatagattaattcgtttaactttattttccataatttgtttgcgctctcttccctctataaaaaagttcaattttgtcttttatttcatccctatttttttaatttaaaattataatttcaacaaaataactagaaaaaaagttgtgcctttatttacactaaatttagaatattatatttttggtactaatgttgtcttacaaattagttttggtcccctttttggttggattttttggaaaagcagaaaatatctctggcatacactattttaatgttttccctttctctaaaaatgaatctttgtttttttaataattttttgtgttatcaaggcaggagaataaacaccaaaacaaccaaaaaaccaggggggggaatgctatttctgagccgctttttaatagcatatgcg

SEQ ID NO: 23438 - DNA, 790 bp, Heterodera glycines
taattcaaatatttgcttcaataaaaacgataagtcaaaacagtcatttaaattttgcattttatttcaaatccaaaaataagcatatataatgctgaaataagcacaaacttagaaataagcacacttgggagccctgattatttctagtttatttgcataaattctctgtccgcttttttagcaaaagaacttttggcaatcccatggtgtttttgttttattttgaatttttaccaatttaacctttttttatttctaaggagacatcgccaatcgttgtttgcccaaagaaaatggcatacgaaaattctatgaagaaaacccaaattggatggaacacgttgcggctaccatcaacccgatcaccaaatacaccggcggggtccgtaaagcaattgcagacccgggttgggtgctagagaatagtatagagagaattgaatttgccattttaaattgtaatttttgtaaggaagttatctttaaaatgaaaaccttttcagatttattggctcataattgagcagtccgtttcaatataattagctaaaaattttcagaaatttttggacaacatcttctccaaaaaacacctcccgaagaaaacgaagaaattacaagtgagttggttgattatatatgtagtaattcatgcagtcctgatggagaaggagagtagatgagagagagagaagaggaaagaaataaagcgatggagagaaaagagaggaagagcaaacaaagagaagagagagacagagggagacagagggaggagagagagaga

SEQ ID NO: 23439 - DNA, 2136 bp, Heterodera glycines
  unsure (1)..(2136): unsure at all n locations
cgaatatgaattctatatgccctaattgctaaccacgaagtctaattctagcaaagagtcgaaaattcaagttctttcaatctcaagtttttgttcctccttttgtttacacatacggaaacaaactgaaagtcatcactgatactcatcagtgctacaacaaaatcgtttaaactatttttagactaaaaatcgaaaaattttaattttcggctttgttagaattcgtgattcgaaattggtcgaaatggaggcctgattcgtgctcagcgcctcaaaacacccctagaaacgtgttataagaattttcagaaaaaaatttaaagaaaacattttcgggaccaatgatcgacatgattgccgcattgaaaacgatttagggcaatagatttgcattttggtgaaaagcgaatttctgattttttgttcgagttcgggtccgggattcgaaattggtcgaaatggatgcaggattcgtgattagcgactccgaaaacctattagaaagtgagaaaaaaatagaaaaatttttatgcgccctatactgcatgagccaaaaaaaatttttgggaagaatttttgagaaaataagtggttttcgccctctgatgatttttgacagtaaacaaaacaaaaatttcacatatattttatttttatttcttgcatcaaaaaggaggataaattctccacaatatgcgagcccttgaaaaagcgtatctttttatacaataccaaaatttgcggggaaaaaacaaaacgagtgaacaaaacctaaacaacaaaaaacagagaaaaaaggggggattaaaacattttggagagatcgttgtaaacggcgaggaccaacgcggcgccaaccccacggatggcattgacgaagaagccgctgaagaaagcacgtccaccctcgtgccggtggatttcctgtaaatttgaagcaaattcttggcacataatcgaaaattttctgcaaaacacacaaaaacttgattttcaaagcatgggggccaaaaaaagcatggcgaaatactcaggtaaacaagcattttttggaaaaattagaaaaattgcacctttctgttaagggaattgtaaaatcataattttaaataaagcaacaaaaacctatgaataaaaagacccaaaaatctatgttttacaatttgacggaaagtcacctgccatttgatttaaagttttctttaaaaaaatattctttacagattctctcatttatgcgccccataaaaagtgcttggagcaaaaaaaaaaaaacaattttgtagttggaactactgtaatttttgttcccccttcgccttgtaaaaaaatatcgtgttttatttttaatctataagcctcgaaaaaaggaaattataaatccatatcggctctatttgtggtttaggcaccgtaaattttctatagagttcaaaataaaaaaaagcttgaacaaaaatgtgaaaatttgaatgaatttccgactttttgttcgagttcgtattcggggttagaattgttcgaaatgcatgtcatattcgtgattaatcaacgaccccgaaaaattaaaaaaaattatggagcctaaaccataacagagccgcaatatcccattatcccgcgccccaacctcccccctctcacccgaatgcaatgccatgcatttgcgtagtcgggcactgctttgcccgactgcatcatcagccgccgtcggacggtgtccaacggataggaaaagagggcggccaaaaaggcggaacacttaaatcaaaaaaaatattggaaatatttttgcatttcaaaaaatattcacttggccaatgcaaaaggcagcccaaaagggcacactttccctgcccgtgccattttcgttctccgtcgttgccacaaacactttgaacgagtcgaacagaccgtagtagagggaacggtagaggaaaatgtaacacagcgaagggacgaaacccctgcggggaaaaagcgacgcattggaaaattgaattttatgcgccttggagttggaaaataacaaaattctgaaccgaaaaaaaacatttcccaccccataaaaagggggaatttatcaatttggtgaataatccattgacattcttttgccgatggantattaaa

SEQ ID NO: 23440 - DNA, 1634 bp, Heterodera glycines
aacgggcgcgaagcgcccgtataagcccaacaaaatttaaaaaacgggcgcgaagcgcccgtatgagttcaacgaatttaaaaaacgggcgcgaagcgcccgactgaggccgcgaagcggcctaacaagctaaaaaacgggcgcgaagcgcccgtatgagttcaacgaatttaaaaaacgggcgcgaagcgcccgtccaaggccaacaaaaattgaaaaaccggcgcgaagcgcccgtctgaggccgcgaagcggcattattaatagctcaacaaatttagaaacgggcgcaagcgcccgtctgaggccgcgaagcggccttaatagcccaacaaatttataaacgggcgcgaagcgcccgtctgaggtctcgaagctgccttaatagcccaacaaatttagaaacgggcgcgaagcgcccgtataagcccaacaaaattaaaaaaacgggcgcgaagcgcccgttcgaggccgcgaagtggcctaaaagtcccagataattttttaaaaattcaaaatctccacaaccatagcttatctaggtagcgaagctccgaaagcgcgaagcgctttttcccagctaaatagccgacggttcacgcacccgctagttactatatacgttatattgacaaggagtttcgtttcaaaaactaatttgagcttaacggctaatgggacgggtctgaaagtggtggaagggtcttacaactttttgaggagaattcgggaaaactataggttttttgatccgagcgccaactgagtaccggggactgatttgtcacttttgtttgcatttgaaggcccctaactttttttgtaaaactcgaatcaaaaagtgcccgctgaaagggcactccgcctaagggtcctctacaaggaggtattttttaaaattttttttgagcaaacccctggcctgcaaaaaatggcaactgaagcgtgctcaaaaagtacacttcagtaccaggtgaataccgcgccagggtttgatctgagcggggggtggtcagcgaacttattgtagagctttcaaagctcgattttttgaaattttaaaatttcgaaaattttcaaaatttttcgagttaggcctaaaaaacggttttcgggtttttgaattttaggattttttaacgatttttcccagagaaacggagaccacttccaaaacatagtttttcgagctctatcgactggtatttttttcggaaaaatttcgattttttcccggaaatagaaaaaaattttggcctgagcgggacatttgagtcccgggcccataactcgtcaggcgtcggttttagacaaaaaatgccttagagcaaaattgtagagctttttaagctctatctaatggtatactatatgtagggaaattttcaaaaattttcgagctaggccccctagaaattttcaaaaattttttttgggttgaaaaagagggtgaaaaatatttttctggggtaaattagggtcctgagcacaaatatgatgtttattttaagtttcagattttttggaattttttaaaaattcgaaaatatttttaatttttttggtccttggaaatttgggttaaaatttgaaaattcataactcaatgaaggactgctcaatttaagtgaatt

SEQ ID NO: 23441 - DNA, 1838 bp, Heterodera glycines
  unsure (1)..(1838): unsure at all n locations
tcaaaaaaaatattgtaaactaaaacaagcatttntaataattttcaaaaaattgaaaaaaacgtttttttaataggaattcaaggaaaaaattttgaaagtttttcttgcttttttaaatcttgaacagacttagtaaatttctatttgtaagtttcaaatttaaaaaaataggtgcagtgggaaatgagtgcagccagaaataaaaaacagggaaaaataaagaacaccgaaataggtaactctgtaaatcttattgttagatttttttgggaaaaccccagaaaaatattttaattcctccaaatttctttatgaacaacgagattgttttgttttcatcactctaccatatttcccgaactattttccgcttttagcatccaattctcttctaatcccgtgctgcacaaattctgtttggtcccctcgcgccatttctgcgtcggttcctacattttcgccactcggcgtgccgagcagtcgcgtgccgtcaccaacacactttgcgcattttctgtcttgctcccattacgccagtaattttgaattaaaaatgtttgggatcttaaattccctccaataaatccctttgtccctttttggtccaattggtttttgcaacgacagtccgtcttcgccgaaatgttttcggatgccatcgcgcgcttcaaagccgcttcccttgtggagagtgtggaggatttggtgtgccgatgcacgcgcgagtttatgcccgtgtttttgctgttcggtgcgctcgaacggtggccatttgtggtaatggaaaaatttaaaacaaaaagcatttgaaggctttttcaaattttattgattcggtgggtccgccaatgttgagagaatccatcggggaaaaaactcgtctgtttttctaacagattttcagccaaaaaatagttttggttcttttaagactagaaaattctgacaatggccgccgccggacattttgaaaattggcccaatcaaaaagtatcgagaaaggtccaaggaccgaaaatgttgcactatgatctcgacaattcttcttaagagaggcagtcgagactgactctcgctattgactaaattaaattgcaatccctaatcacccgccatcctaatggtatcttttgtttaagtcgagctgtgagcagacccatctgcgcattcagcacagccacctctgggcgttgaaccggacgccgcacagcgactttttggcccgttgcatcaccgcctgtctgatgtgccgtggacggtgtgccgtggtgggcggcaagccgcaggaggtggcacaactgatgcacacgctggtcgctttcatggagcccagcgatcgtttgctttgtttacgaccgtacaaaatgccgtacagcccctatctgcgcttgcaggccatcaaacgggtgggagggtattgcttaagcaatgttggaatggggttaaaaaaactaaaatcgtttgtataaatttacatgaaatttttttaatttctcagcgatttttggaaaattttttgaaaaaataagtaatcatcataattttgaaaaaatcgctaaaaaattcaaaaaataaggcagaatttgatacaagatccaggctgacaatgggtttttctagattccaaattcagtctttatttatttattctgttttcttacaatccgttgactcatgaatttttaacgcagtccaaaatcctcctataacggtgtaaaaaatccgttttaacaagcaaatccgattaattttttatagtaatttttattcttatttgttttttgccaacttttacagttgcttaaatttttccactnagattttaaatttaaaaa

SEQ ID NO: 23442 - DNA, 1574 bp, Heterodera glycines
acattgagactattttcggtcgacctagcacctttctatctcatatgaaattaattcgaatcgaatttaaacaaaaaaacataatttgcatacactttgtgattttttggcattctgtccattcattttcttcaaatacctaaccaatttagtcacattgccaattctttcttatataatacctaattaaaataatgaatgaaaattataaaagaaaaaaagtaaattagcataaaggcaaatgaatttgaagggaaagaaggaatttattataaaaatggcgactaaatgaaaatgccaaatttgtcatcatattcatcttcctgaacttctttttcatcactatttgtcgttttttcattgcttttttcaatttcttcatttctttcttggcgttttctttggcattttcatacattttttgctcaaattctcccgaattctttcaatgtccgtttgtccgttcgaaatttgttttccattttttgtaatttatgggacctatttttctcctttcaatatttaattccaatttcatttggaggattttcatgttttttccaaagaatttagaaaaatcattcagactattgaaaacatgttaaactgcgaggatattgttgtataataatattggctttacaaatggtagtaattgtttcgaactttcggatttttagcttaattagtagggcatccaaaaatatgcacataaaatcgcaaaatatgcgcataaaatatgcaccaaaaatggcaaaatatgcacataaaaagtgaaaaatatgcatataaattttccaaattaagggtgtaatgtctctaaatttcttcaaatttgttaaatattaagtaaaatcttcaaaaaatggctaaatgtggtattaaaaatcattttagaagaaaaaaacatgataaagcaaaaatttactcattttttgcgaaaaaccaacccaaaaagcgaaattttgctttttttgcttatttttgacataaattaaccattttttgagaacatttatttattcaatatttttcgtgaaaattttgctaaaaaattatttttttggaaaattttccggtttttgaggtcaaaaaggccaatttgtctgttgggggccgttctattagaggttttttggaaaaatgcccaaatatgcacataaaatatgcacgaaatgccaaaatatgcacaaatatgcaaatatgcacataaatcgcgaaatatgcacaaatatgcaaaacatgcatatggaaagtcatcctagaagcttcaaaacacgctaaaaacatgtttttcgtgcgtttcaggcctcccacagtccaggaaaaaaatatgcatgtgcatataattggactccctactcatcagtgcttcaataaaatcgtttaaaccattttagattaaaagtcaaaatcgaaaaattccaatttcgactttattcgaattcaggctggtgttataaataggttgaaatggagtgctcagtagagaccggaaatttcaaatttgcggatcccgctgcgggattggaactcaaaattctttgcgggacgggatcccgcgggattaatcc

SEQ ID NO: 23443 - DNA, 1227 bp, Heterodera glycines
  unsure (1)..(1227): unsure at all n locations
aaaaagcctatttttttgccttttcacaagagaatttattaaaaaaggcaaaattcgccttaaattaatgaggtgaaagtttgaaaatgtttattaaaaaatttcaggatgaaatacaattaaaataatcaaaataaaaaaaataaatttatttttctaaataaataaaaaacattgtcagaggcagtgcctgcctaaaaaatagacaaaattttttcaaaaaagccaaaaaaaattgaaaatttaaataaatttaaaagtgaaaaaagtaaaaaagcttacaacaccttcgattcccaggacgtctccgttccaagtactaagaaggcccaacgttgcttaacttgccagatcggacgggatggcgtgctttcaacgtggtatggtcgtaagcgaaaggacagcaattaaagtcatttaaataggcatatttaaaagagcctatttttttgccttttcacaagagaatttattaaaaaaggcaaaattcgccttaaattaataaggtgaaagtttgaaaatgtttattaaaaaatttcaggatgaaatacaattaaaataatcaaaaagaaaaaagaaaaaaaaataaatttatttttctaaataaataaaaaacattgtcagaggcagtgcctgccgaaaaaatacacaaaattttttcaaaaaagccaaaaaaaattgaaaatttaaataaatttaaaagtgaaaaaaatttaagtcatttaaataggcatattttaaaaaagcctatttttttgccttttcacaagagaatttattaaaaaaggcaaaattcgccttaaattaataaggtgaaagtttgaaaatgtttattaaaaaatttcaggatgaaatacaattaaaataatcaaaataaaaaaaataaatttatttttctaaataaataaaaaacattgtaagaggcagtgcctgccgaaaaaatagacaaaattttttcaaaaaagccaaaaaaaattgaaaatttaaataaatttaaaagtgaaaaaagtaaaaaagcttacaacaccttcgattcccaggacgtctccgttccaagtactaagaaggccctacgttgcttaacttgccagatcggacgggatggcgtgctttcaacgtggtatggtcgtaagcgaaaagacagcattnanagtcatttaaataggcatatttagaagagcctatttttttgcctttttcacagagaaattattaaaaaaggcaaaa

SEQ ID NO: 23444 - DNA, 1290 bp, Heterodera glycines
ggcatttttaaaaaagcctatttttttgcctttcacagagagaatttattaaaaaaaggcaaaattcgccttaaattaatgaggggaaagtttgaaaatgtttattaaaaaatttcaggatgaaatacaattaaaataatcaaaaagaaaaaaaataaatttatttttctaaataaataaaaaacattgtcagaggcagtgcctgccgaaaaaatagacaaaattttttgaaaaaagccaaaaaattgaaaatttaaataaatttaaaagtgaaaaaaggaaaaaagcttacaacaccttcgattcccaggacgtctccgttccaagtactaagaaggcccaacgttgcttaacttgccagatcggacgggatggcgtgctttcaacgtggtatggtcgtaagcgaaaagacagcaattaaagtaatttaaataggcatattttaaaaaagcctatttttttgccttttcacaagagaatttattaaaaaaaggcaaaattcgccttaaattaataaggtgaaagtttgaaaatgtttattaaaaaatttcaggatgaaatacaattaaaataatcaaaaagaaaaaaaataaatttatttttctaaataaataaaaaacattgtcagaggcagtgcctgccgaaaaaaagacaaaaaattttttgaaaaaaagccaaaaaaaaattgaaaatttaaataaatttaaaagtgaaaaaaattaaagtcatttaaataggcatatctaaaagagcctatttttttgccttttcacaagagaatttattaaaaaaggcaaaattcgccttaaattaataaggtgaaagtttgaaaatgtttattaaaaaatttcaggatgaaatacaattaaaataatcaaaaagaaaaaaaataaatttatttttctaaataaataaaaaacattgtcagaggcagtgcctgcctaaaaaatacacaaaattttttcaaaaaagccaaaaaaaattgaaaatttaaataaatttaaaagtgaaaaaaatttaagtcatttaaataggcatattttaaaaaagcctatttttttgccttttcacaagagaatttattaaaaaaggcaaaattcgccttaaattaataaggtgaaagtttgaaaatgtttattaaaaaatttcaggatgaaatacaattaaaataatcaaaataaaaaaaataaatttatttttctaaataaataaaaaacattgtaagaggcagtgcctgccgaaaaatagacaaaattttttcaaaaaagcaaaaaaaattgaaatttaaat

SEQ ID NO: 23445 - DNA, 972 bp, Heterodera glycines
tccgtatgttttccttcgtcccttttcagttctcacacaaacattcgcccgttcgcctgtttgacttgcaatttctccttcaaaaccaagggtaacaactcattgttattttgttggatgaattgtccatttttattcgtccatttgtcctttttaggcaatctcaccaaacatttggtgtccaaagcgcaccgacgcaaagtgatggacacggacgacggaatgcgaaggtcgtcgacggacagaggcgggcggaagagaggcggcgacgcggaagacgaggaagaggagggcgaaggacgactggtggtggcggaggaggacgacgacgaggaggagaagaagcacagaagacgcatggaacggtgggaccgcgtggacgattgggacgatgacgatgacgacgacgaggaggaagcggacgacgacgaggaggacgaggacggcagccccaacggcgaagtgccgcccccgccccccggcacgctcagctaccgacgcttcgggcaggaggtggaaagggggaggagagagaattggggaccatcaccgttatgcttttcccccattcattccagaacgttttggttgagcgtgagacgcacacaccgccgactttgtggacactttgtccggaacagagagaatggggaggcaacgggtatccatctggcagtgacgcgggaaaagtgccaacggattctgacgagaaggcgcaacgggaggacgaagatggctcaactgattgggaacgcgcgggcaacaagaagcggtccggtatggccatcatgcaactcaggggatggcctgagccggacgaggcggtgcgcgagaggggctgccattccgcgccgccggccgccctttgctcgccggaccattcgcgcgcgaggcgaagacgcaaccatcaagcgaaagtgctcaagcgaatgcagcagaagcagcgggagattgatgcagaagctctaacgg

SEQ ID NO: 23446 - DNA, 1728 bp, Heterodera glycines
gttttggccacggcaatcagtcgacggaggtcgccgtcggtgtattcaccgcgcagaaatttgaggtcgccgttggcgggggccgagcacttccacaattcgttggccttggccagctcgccaagcagttcctggtcgttgttgctcagctggtccgtcgctgccgacgtcgttggcgttgtgtgcatcgccgtcgtgtccatcgcctcggggatcgtttgcgaagttccgccgaccgccgaaggcattgccgcgttgttggcagcggaaacgcacccaaaatgagccggatggaactgctgggaaaggcggggcgttgagttgttgctgctgttgtggtcgctgttcagctgtttggacgagttttccagaaggtcggccatcacctgccaatggacaattgttgcttggcaaagtttccaatctctttggccaccttgtcaacaattagcatatcccccgggtatcttccgcattggcaatggcattggcacttcgtcggcgtttggagttcgcgctgttccgcttcaatcttctgctccaccaacttcatcagcacatccttgggcactgaaaccatttcctgttgatgatgctgagctttggtttggaatgtttggggcgaattttgaatggacggggaggacgagaaggaattggaggagcttatctgagtgaccgcctaaattagcacagtcacttcccaaactaaagccagggattccgcctgttggttctgctgaatgccggcgattccgccgattggctgcgttggcattgcgttcaccgcctgctgctgcgtggtttgctgttgcggctgaagcgcggcgaccgcgtgctgctgctgctgaaggagaattgtggcagcagcggccgcttgtgccggcatgggcaaaagcgaagtcggcaaagcgccgccggcgacggaagccaacgacgccgaagtattagcagacggggacaaaacggtggtcagattctgctgatgctggtgagcaacggccgctgcggcagcaacctgagaaaaagcgatgtaaaagtggcattttggggtgccatgccaaatacactcgtcactaacaagccacccatctctaaatgtctgaaaatggcaaattttcctaaaaattacgccgtccaatacatgctgcagctgttggctaacactttccgaagacgaaggcgcagccgactgctgttgctggtgatggtgaacagccgcaacattggcaaacgctgccaattgctgaaaagaacgaagttggcaaagtctatgccaggttttggcattcgcttgcctgttgctgaatagccatttgttgcgcatgtgccacaatttgagctgccgccgtttgttgatgctgctgctgtacgacttgctgttgatggattgaatgttgctggtggtgttggctgctgatgagctgctgctgttgctgctcaacttgtacgctcaattgggcatgttgagcgaccacctgctgaagggaacaccaaatagccaatagaaaaagacaactttttgcctgagaagcaatttgttgctgaatgtcttggctcgagtacggcccctgcggcggcgggtgccattaaattggacggtgccgtaggcggtgcgaccgttggcgcgagaattgttgaggaagagtccacggcccggccgctgctgttctggtgttggtgcgcgaagtgccgcgagcgacagccgccgctggtgccgaaaatggc

SEQ ID NO: 23447 - DNA, 1040 bp, Heterodera glycines
gatagaattttcgaatcgcttttaaatcatctcttttgcgtcccttaatcttcactctgagccgagttactggcggtctaaacacgatttttggtagaattgcggccagaatttaaaaatacagtttgctatggcttcgcatcacccgcttcaacgggtggggattgttgtcagcgggccctcctcttcgggtaagacgcagttggtccttcgcctgttggggcatgcccgcgagatgtttgatcccccgccgaaagtgataggtaagtccccaatgccatgagtaatgagcagtccccttgggtttagtttgggcttacggtgagtactcctcgcagatccccgagctcgagaggcagggcgtagtcccgcacgctggtcctccctccgaagaaatgctgaaaaagttgccaaaacccttccttattgtctacgatgacctcatgggcgacattgacgcgaagaagttggctgatctgtacaccaagaagtcccaccacaacaacttttcggtgatattcctcacccaaaacctgtttgacaaggcaatgagagtgccaaggtccaatgcgcagtacatctttctgatgcgtgcgcccagcgatatgctgagcattcgtaatttggccagccaaatgtttcctcgcgagcaagggtttctgatggacgcgtacaagcaggcttgtgccgatccgtacgggtatctgttggtgacactacacgcaaacacagacaacctcttacgactgaggacaaacattttcccagacgacgaagaaaagattgtctttgtacccaaaaatggttaagaagcaaatggtcggacagcgggtgttggacaactacgagtatctgaagtcccttgggagtacgacatctcacaagaagaggcgtcatttgttgagcagtgcaggttgtgaggagctgctgactctggtggagatttgcttaacctacttaacggatccttctgtttgacgcggaaacagaaacaaaaattgttgccttttgctaacaccatttcgacggtggcacgcgtg

SEQ ID NO: 23448 - DNA, 2384 bp, Heterodera glycines
atatcgattctcgccctccacgagccgctccaccaacctttccaacttttcgagccgttcgatgattgggttcagtgtgggattccctgaaccttctaacaacttttcaagccggtcaagacgggcgagaatgtcctctccctcatttaatacttttcaaaaaattaaatttttgtaaaaataagtttcaaaaaaatttttttttactgatcaaaaggagtttgccgcaataaattcaacaatttattttaaaatttttttgaaaagaatatcgattttttcatttctttttcttaccattatattgcagaacgaacggcattcaatttatttaaggattgaatttatacaggaaccaatggcgccgccggccccatgttcccaaaaagtttttcggaaaaagcacaacgcgaaaaaaatacatttttattgattttttctcatttggaataaaaattttaaatgctgaattttttgtcggtcaaatgctgcttttgaacattttcaattggtaaccctggccttaaaatcagcttctttttctacctactttacgattttgattatttttttgctcaattgtgaattaaggcttatataaaattgggcagcaatgaacgaatttgcacgtcactgaattattgaattccaataaaatggatgccattgcgttttccattgctatttcatattacattaatgctaaaataaaacaacaatttctccattttttttaaataccaatgaaatattttgttttcggtatttttgctcggcttttttactccttttcctttccgtcaatttcaaatgcaaatgcttcttcatcaatgtcggtaagtttgctgcttctcacttcccaagttctgtagggtgccgtgtcattagttagtcaaaaaccattcccacaggggaaattggcaccaaattttggaatcataataagagttaaatatgaatcaccaataaggacagctaatgccggttaaggacaaaagcacagagtaataattaaacaaattgttaatttttattttaaatttaaattgattttataatgttcaatcggtgggcgaaagggttagttgttcatgtttagaaattactggggtttaatgtatgaagagacctggtgggactcgcggaatttccgagttttttttttggttcgaagttcctccaaaatgtaaaattcaaaaaccggaaaagcttattcggcacactaatttgtaagcaattgtttttcacaaattcgcagattgacgacaatgcttttctcgcctttctgaaggggtggaaaagctttgacaaattttacaccgaagaagtgctgcttttgggccagaaaaaagaagtgttggcccaaaagtttgaagtcctcctcgccgcgcttcattcgttgcgatgggattggaaatgccatcggattaaaaatgaaaaggaaaagtgcaaaaagtatcgcaacttcgcgcactcattgtacgactatctgttccgtgtgtatgcggtttttcccgcggtgaagccaattttcatgcttaaaaagcaaaagtttgtgaagatcggcacattggccgagttggtgaacagtttggaccgaattcggaaattttttttcgatacggaattcgccagaagcttcgagttcaaattgaagaagctgttcatggtgtatttcaagccaaagctgaaaaaagagctgttggaaaacgggaaaaactcgccaatttccccaatacccgccggtttgaaagtgccaaagttcataaattttgatcgcaaattaaaagcaatgcatattgatcagcaatttgcggcatttgttaaggaacagccgaattcggcatctaattcgggcccacttttcaccctagtggtaaatgacccatatggcttcatacagcaaaagttggcacaaaattacgaaacagcttttggagccgtgtattatttgagaatgaattggcactgtgccaaaattggcaagaaatttgacgaatttgggcagcttaagtgccaagaatatcgaaaatatttggacattttgtgtgaatatttattccgtttgttctccggtattcccgcaatgaagccgatttttaagctgaaaaagcaagaaaatgaagaaatttatgcaagtttaattgatgtcattgagaatttgggggaaattatgaaattctttttcaattcgcaatttggccgggggggaaaattcaaatttgagacatttcttgcgaagcattacgagccaattttgttgaatatggatgaagttggggattacgtttcaattggacaattgggcgacaattcacacgcaaaatttggcaaaaaattcgaatttcaaatgaaaaacattgtagaagacaaattgttactga

SEQ ID NO: 23449 - DNA, 2030 bp, Heterodera glycines
tgttggtgtcattcgatagccctatgtatcctctattagcctgcaaaatttcgaaaaatttcgttcaggttcaaaaaagttatggccagaagaattcaaaaaaccaaattttccaacttttttggctcgaactttttttgaacttgacgaaattttttggaattttgcaggctaatagagcatctaaagagctttcgaatgatacaacaatgttggatttggttggcaaagaaaaaagttatagtccaaaaacatgtgttcgtacgaaaacggcctggcgcctacaatttgtatataaaacagaataaatgttaaacgctgataaaaaagtaatagacagggcccggatttttaagttttcaccaaaaacaaaatctcaagactggatataggtatcgggctgaaattttgcatacgtatgcaacctgggacggggcatctgggaaaaataaggattttccggtccggttgctaactgagtaccaggggcttatttcacacttttgcttgcgtttcttcaaataaaataaaaaaacaaaaaaaaccaaattattttttagatttttaggttaaaattagaccaatatttttacaaaataaaagtaaaagatttttttaagttaaagtgttgactaaaatacaaaaaaaattccaggcctctacctataaaactcttctaatcactgttgtaactcttctaatctctgtaaggccaacaaaatttgaaaaacgggcgcgaagcgcccgactgaggccgcaaagcggcctaacaagctaaaaaacgggcgcgaagcgcccgttttgagcctcgatgtggactaaaaacccctaataatttttgaaaaattcaaaaaaatctctccaaccaattcgatcaatttgaatcgcttcacagcctaggtagcgaagctcaagaagcgcgaaggatataggtagcgggctgaaattttgcatacgtatgcaccctgggacggggcattcgggaaaaatacggattttccggtccggttgccaactgagtaccaggggcttatttcacacttttgcttgcgtttgaaggcccataacttttttcggattttaagttgaagtgttgactaaaatacaaaaaaaaatttcagacctctacctataataggaagggctgcagaaattggcaacttttcagtaccaactttgtccaattcagtccccgtcgaataactcattaagctttgatctgagcggggggggggggggtggccagtagacttattatagagctcaatgagctcgatttttcaaattttaaaatttcgaaaattttcaaaaattttcgagttaggcctaaaagtatgttttacagcagagatgtgcagggaagccatggcatataaaagcacaaatgaaagatgccaaaaccattcatcaccaaaatccaaattagcactaaattctattttgcgcccctatttattttaattatttacccttttttattctaaaatataatttaaaatttaattagcttctgcttctcctttgtttggactcgtgcatttctcattgtgaatgtcttcgcatcccttgggtatgtacagggttcccaactctgctgattttgtaagcattttgctcatttctagtggtcaaagctgattatttgatgaaatgctgatttttggaaaaaaatcctcaaaaatagccgtttttatataaaattgctaccaaattttcaaattaggacgatgtgttgtttttgttctgtgtgtatctttttattcctttgaaattttattgcttatattacatatttatactcacccaaaaaagtcttttaccaaaggtaaaagaaaattaatcaccgaatttctcaaataacaaagggttggatctcagccattcctatgaaatatttacggtaatgcagggcctcccattcgtccttgaatggcaatgacgtccttgaaaatgagcacttggaaaacttttaacaagattcaaagaaataagagaaatttttaatttataacatatttggtgcaaaatct

SEQ ID NO: 23450 - DNA, 1990 bp, Heterodera glycines
  unsure (1)..(1990): unsure at all n locations
taaggaaatacaattatantttttgcaaatttaattccaattcctatttatttatattggatttttaatcaattcgttggtctcccgtttttcaattctccattatttttttttgcccccccccctctccttctgccctcccctcgtcgccgctcgcgcattatctccgattttgatctcgtcaaaaatttccttcaaattgcacatttattcttagccatcaaagcgttccgtggcgtagtggttatgcgctcggttcgctctctcagcgctggtgttcgagttaagccccctcgggggatggcgtgtttggggttcacgccttcgaacgtcccccatgcgcacctttgctgagagggacgagcccagctcggacatggtggtaatgcataatgaacccagttgaggatcagtccaagacaaggggtaccacccgttttttcatttttaatcattttctattttcatttgaatattttattttcttttgcgccattttcaaatagggaagtatataatgatacatttcatcaatttcagaattgttttttgttccggtaattacgactttaccggtccagaaaattaatgcagtcatgcttttaccccttttaaaatttaacccgcaaaatatttcgggttcgtaaaaggcacgacgattttttctaaattcgttcagttcaatttcatgaccgaatttaaaggtcgaaacaatattttcaacagtgtgtccggtgtaagaagcccccgggcaccccgaacccttaattatttctataaattttttaatagcattttcacagtctatcagactttttgtccccagacatatcattttcccggattcccataataatgcggtggctttgatcgggcttgtacatttgataactgcggcattgaattttctagggttatacttaaattcgcattcggtgatcatcagagagtttagtttaatcccggtaccgagattagcgagagcaattatatttacgattatcggtttttgcatttttgatacaatgtaccaatcaaatggttgcgcgaaacatgttccctatgaaaatataaataggtcaaataaataaatgttatgaaaaaatgtttcgcggtccgttcactctaattctctcgggggctaccgggagtggtaagacccgttggctattacggtttttaaaacaccataaaaatttaattgaaccaccgcctaagaaaattctttattgttacggtgagatgaatgatagtattttaggattaatcggggagggtgttgagacttttaacgggattccagacatgaataagattaaagaacaggaaaaacccctcttactgatacttgacgatttaatgcttaatatgcagaacaattttcttgatttactctttaccaggggctcccataattggaacgtaagcgtaatttttgtaacccagagtctctacggtcgggacattaaaacggcaagagcgaacgcccattatctggttttaatgcgcaacccttcaggacaattacaagtgaggacactagggtcacaacttttcccaaaaagactgaattatttcatggatgcatatcatgatgcgaccaataatcaatttagctatctcatgattaacatgcacccaaattctgatgaggaattcagattatgtagcaaaatttttccagatgagactctagaaatttatttaccaattgaatagtatataagaatatgaatttaaattaaattaaaaatgtataaatttagctccgaagtgaaggagaacacagcattcctaaagaagcttgcctccaccagatcagaacaaaagaagaacgaattaatcgaaaacgctacagctgaccaaattttagcagtcgttgaaatttgtgcaaatatattgagttttagttttaaaacgacgaccaaacaaaaaagaaggttggcacaatacgccgatttgtatagagaaattgccaaatctcgttcag

SEQ ID NO: 23451 - DNA, 2859 bp, Heterodera glycines
  unsure (1)..(2859): unsure at all n locations
ttttaccgggattgaccgcttattttgcatcatttgcccaacagtgtaagcagcaattattaattgaatgtccagcaaagaattttcgtgcctttttttaacgttttagcctgaggattttttgaaaaattcttaataaaaaatgtaaaattttcacaaaaaaatccatttcataaaattttttttctttgtaaattttaaaaattttgccacgtactcctctgtcttgtttttattcacttttcccaatttttgttttttttgccattttcatgccttattaatcgtgccaatttttgtgcctcttttaaattggcgttttcctcagatacaatcggatcaaattgcgctcctatttggcactgatcggctccatttgcgtgctgataagctccatcattgcgctgcttttccatgtcggtgccgagtcaatggctgagctgaaaataacaggcacgattggagatttcatgaaagtgatcgatcaatggggcaagcaattgctttgacaaagattgaaattccaggggagtgtcggagacttttacacaaaattcgcactggtgacgaacactttgaccattggcatttacatagccacgggcattctgatcagaaagaaatcaggcaactgttaaaatacaaaatattttaaaatatttcttcatttttctggtttttccagtgaaaaatgtgagcaccgccgaagcgttcaatcgccgcattttccgctccctttttctgatcatttccgtcaacattggtggctatttcgtgatgttcgcttttctcgtcttcgtcgcgccgcgtctcgacccgatcacaatgttttttgttcgctctgtgctcggcatcgttttgaatgtcagcgcagcgtccaacgcaccgatcctttggctgaccaggtgatcaagcaatcactgatcataaaggaaacacaccgactttgttgccgccatcaattcttgaaaatttttaaatttaacaaaatatgtaccctaaaattggcatttatggacagaataatctgttaataaatctcatccgatttttttttaatttcccctccgcctccatcgccggattggtgtttttacttgaaaagaattaattataaaatgacaatgcgctaattagtggaacaaatcggaggggtaataaataacaaattaaataagcgtaaacgatttgaactcaaattttaaagttttcaatttcgtatttcagcaccgaatatcggaaggcgttcaatttgcactttccattcctttccaaattcattcgcggcacaaatgccaatgttgtggtgccgatgacgggttgttgggctgtcaaagtggaaaaagcaactcaaaagcaaacaacagcagcaacagcgatgcgaaaaaacaattcataaaaaggaccaattgaagcaaatggagaagattcacagaatttgaattatataatatataaaaattgccgttatttaaaatttgccattattgtttggcattcgtgcacatttttagttccgctaattaccagggattttttcacgagaaaaaattattaatatggggcgaaaccttccaaaagagtcaagggccccatgctgagtataagctaactctgtagacataagaaataagcaattaagaaatttatggaaatagcacaatttgtcataatttcgattgttccaagaaatttgaattgaaaataattccgctgaactgctcaaccatttgcgtggactttctgccttctgcggaattggtcacgcaacctcagtctgttggccacgtccataaaatcgatggcattattcagttggtcaatcacttcaaaatttgatgaataattaattgaataagtgttaattatgattttaattgccttggtcatttgggggcatttgcccaggtggcgcaactgctgccggaggcgatgccaccggcgtcgctacgtttggccgagaagtgccgcttatcggtgccacctgttatttgtggttttccaaaaatatattaatcgtcatttggtttttatttcatcatttttatttaattttgaacaaaaaacccggtccttcccttaaattgattttattcgaatgtttattgtcttaattaggcacgaactgtttgcaaatgttgtggccgtcgcatgccgccgaacggtggcgtcattggcattgtcctcgttcgtgccaacagattaagccgttcctgattccgctcgttatcagttattatcagtttttaataaatatcttttaataaatcttttttcattcacttcctctctttggtttttttacttttgtttccctttgccattttcccattgattattttacttcttggcattttcccagtggccttttttctttggcacattctctcccctttggcatgtcccattggcattttcccattggccttttttctttggcacattctctcccctttggcatgtcccattggcattttcccattggccttttttctttggcacattctctcccctttggcatgtcccattggcattttcccattgtccttttttctttggcacattctctcccctttggcatgtcccattggcattttcccattggccttttttctttggcacattctctcccctttggcatgtcccattggcattttcccattggccttttttctttggcacattctctcccctttggcatgtcccattggcattttcccattggccttttttctttggcacattctctcccctttggcatgtcccattggcattttaagcattggccttttttctttggcacattctctcccctcggggggcctcctttttttccacctcttcttccaaanatgcttt

SEQ ID NO: 23452 - DNA, 1840 bp, Heterodera glycines
  unsure (1)..(1840): unsure at all n locations
tgcatagatgaaaaggaggggaccaagaacacttctcaatttcagtcnncatataaggagggaagtgaggggtgaaggtggatggaagaaaatgcaattaaatatatgtacggatggcgccgtgggggtgggaggacggcaaaagggcatccatcgccgcccatggatcgtcgagattctcgaagaaggagaatgagagagaaaagagaagagggaaaacagagagaacgagcagagacgagagattgttattttgtagaggaagatggacaagaaagtgaaagaatgagattcttaaagtattttggctcgagactctcctaccgacatgaagattattaagaaatttcggctcattgacaggaaattttttttagaattccgtttttaattattgggcctcaaaatcccgatttaaaaacgcattcgttcattgtcaatgtgaactccacggtacttttccgttatggggtcgcactttcaaattttaaaaagttaactataggagcgaatttttaggttttaacttattttctgaaattttccatttacaaatcatttggcagataatcatacgaattttaatacaaaaattggaaatgtatctcatttgttaattaacaatcaatgaataaaaagtttgcactaattttaatttattttcaaaaaaatagaaatacaatataagaaaagttacgccgttattttcgcccatatttcgcgattttttttgccccaatttaagtttttcatccttaaaaatccgctccctaattatctattgatggatgtatgaacaaatatctaaatgtaatactatggttggttggccaactattgagaaaatggcgcatcatttttattatttaaagtaaaaaaaagaaagtgtggcctcataacgaaattaaaaaaaattaaaaaaaccagatctttaaatgtgtttctcaaatacctaatgcgaattttgaaaatttctcttaccttttatacttttataaaatgcaattctgacatttttaaaatacgggtttttgtcggccatctccaacattctgtcctcccaccaacagggcaggggttcagtgttccgtataaattttttatttatgtctatgccataaagaagcagatttgttaatgaattcatcaagaatttcgaaataaatatacaaaaaaattgaaagattcctaattccagttcccgaatttttgggtcagatatttgaattccataattttttggcaccctcggtctgtgtgctcgaggacccggggagggcgggggagggaatggcatcagagttggggttaacccaccaataaaaataactttaaaatgggaaaaaatgagtggaaatgggaggcccaagcatcagtgatcgtcgggggaaggcgagaaagatggaactcataaaacttggggtttttacgaggcctagggggggggcattcgctcattagcggaggaagacgcggaatgtttaaatttaaaaattttataatttttcattttttttgccatttcctacgatgtggccgggggacgacgtcggaaattttttgtttttgcaaaaattttgggagaaaaaaaggcgttaccgcggccggcgagaaaatgatgaacaataattaattattaattaattgtgccgtcattttttttttgtagagagagagagagagcaaagcaaattggttgtaacttgaaacgtaataaaaatggactgcccgtccatcaaattttaatctcaatttttttaggtacttttgcaatttattaataccaaaaaaatgctttttttattctgaaatattcattaccaacttttttttatgaaat

SEQ ID NO: 23453 - DNA, 686 bp, Heterodera glycines
aaaactgtatagaggaaagagttatggatcccggaatttatggtggaattgcgcattccggaaatttatgttagtaaaagacggaatttccagtcattatgcagaggaaggaatctgggttccggaaatttatatgtattccggaatttaagaagctatttatgtgaaattaaatttttatgtaattaaaatatcactggttacagcgttggttttctaacaaattacagtatcactaacgcattcaaaggtcatgtattgaatttgaacaaataaattttctatgataaaagattatacagttgtcccagcataaaacataccgtaaccagttggtccgttactgatgccgccatccgtccccgcgattgggccaactttgttggcggaagacatcattgaggaaaatggatgccgaagatgatggggtggtgcgttgattggaggaaatggagaaatgattgatgatgacgacgacccgccagggacaacaatgtcggcggaggacggttttgagagattggcactttaataattaattttaattagctaaaaaattaattgtcccataattgtagttatagaaaattcaaaaatagcgaaattgacaccctaatttgtaagctaagggagggaggcggaggggggaaggggggctgtaaaagaatgaaggaaataatttaaaa

SEQ ID NO: 23454 - DNA, 2308 bp, Heterodera glycines
  unsure (1)..(2308): unsure at all n locations
ttcnattccaatcaattcccttattattccccgaaaattccccgtaatgtcgaacgaagtggacacacnnnagaggaagtgagtgcccttgaggcaatgattttggagacaagcgtggacccaatggccacgctgggggccaaaatgctgaatgggaaggagcgtcattcgtgacgaatatcnntgaganaagtggtgaggaagtgaaaaagtgccgggacaaatgatctcatggagacggaagaaggagagaaaaatgagggaatgccattcgtggcaganatcctgaatgtggttaatgaaatgagtggcacggaaatgccatagaaagctcaaaaggagggttttgggtttattttagatgatgaaatgcagcaggcattggacaacatcgacgaaagcaacgacaccgccggatttgggacttctcatcttcgatgtgccattgtccaagtgcaatcatccatggctgtcgcaatgctgaagcgattcaccaagaattgcccttggtttttcggcatttctaacggaactccgacagggagtgatcgccgtctccgattgggcgacgaagtcgtcattgtcaacttcgcctggaaaagtggctacgaagtcctgtggcatctcgaccaggacggcacttctcctccatggctcaatgccggaaacatcaacatccaagcaacggcaatcaaagccaacatcgccaatccgacgaacatcgttcccaaaatcgggattgtgcttaatgtcaaacgccgtggaatgcgcaaaacgaacgtcatccaaagcctaacggttgtggcacccggcatgaaagttgcacaaagcttaccaggctgggctcttggtgagaaggattggtttagaaccgggcaagctgtgcttgtcgaaacggttgaattaatgagacctaatttgtggaaagtcaatcaaatttatgcactgccgctcaattgcccgtttggccaagtgaatgatcggaaagcctaccatccttttgtggctgttggcattgatcaatccccaattttgcacaaatttccattcagaagaggggattgggatgccaccattgcgcaaggcgaacaagcaattgccgcggcagtcacagcatgtttggacaagctggaggaggacatcctgcggtttaccatcactgccgaacctcaagtggaatatggagcggaagccgacactgccataatcaccattcgacatcgcttagacaacaagcaggaaatggtcgacatgtcaaaaatgtggactgaagaccagccaatccatgtgcgtgtggcagccaaaggggccaaaccatgtgccaccggcttcatcatgaatgttgaacgacaggaatcggaaacgggactcagcattgtcgccaaactcttcctagcgtaccaagaagccaagaactacgattgtgaggaggcatgggaccgaataatggatggggaattgaccgaaattgagcctttgcattctaggaaaatcctaatgcaaagggccgaaaaattttcagttaatttattcactgaaatggcgaaaaacacaacgacgggactcggcacaattatgtccattctaatggcacgccaaggggaacgaacgcctccacaaaattcatgggatgagctattcgtagctaaacaaccagcattaaatgatttaattggaggacagcgagagacggctaggctaatgcttgattcagtcccccgcgtcgtgttcatgcaggcaccacccggcacaggcaaaacaaaagtgtctgttgacataatcgccgcccatctgcgcaccaatccggacgcacatgtgctttttgtggccccgctgaacgttgccgttgtgaaagcagtcgaagagatggccaaaacgatggaacgaatgggatggcgagaggacatgttggccttattttcaggatccggcaaaaagaaatacatgctggagctgaacaaaattggccctcatttgttggctgcagcgttgcgcgcaccccaattgtttgaagagctgaaggatgatcagaaacgcacagtgctccgctacatcaaagcctgtgagacgtcgccaagaactgcgaacgagggaaaagctgcgcaaatccttttgagcaaggaaaagcgacggatcatcttctgcactctttcattggctgaacagattggcacaatctttgatgaaaccgacatgatcatcgtggacgagagtgggcaagcttcatacgtccaactcttatctatgctcaccaattttcccaatttgaacaaattgttggtagcaggcgaccgttgggcagctaagt

SEQ ID NO: 23455 - DNA, 1140 bp, Heterodera glycines
ggggaatgatggaatagggtgtgggcagtcattgagggttttttgaggggggaggggggggagacgaagaattgatgcattgaaaaggatgtttgtatgtcttattcggctggttgaccattaactgctgtcaccaatgttcggcactttctttttttgtagggcaaagcgaaaagcccggggggatttaaaagacgcgcgaatggacagagaaggcaaaggaagcggaaggaaaaaaagggaggggagagaagcggacaaatcgaacgaagagacagaaacagtccaagccaaaagtcaatcaacagcagcaaacagagcggcacattttgcccaccttttggctgaaccgagtcaatctctgggacgccgatctgttgcaaataggccaagctccgtttgatgctgatcagctgaaaattgcgaagtgttgatcaatttgcagagattttcttctgcttttgctttgttcattaattaactaattaattaccgggtcgtcgtccgaaaggagcgcgactaatttctctttgggcactttttggaattcaaacgctgaaaatggggggaaatgggagaagaaggagatggaacatggaacagaaggacgaccttggaattatctgatcaaaaaaaagcgatgatttgctcagttccaatccgaaagtgtattttcccattttattttttccattaaatgccccaaggcaaattttattatttatttggaggaaaaatgccatgcaaataaaaaacatttgttaatcttgcgctgactgattgagtggatgagcgcaattaacttgtgcggcatacaaagttcgcccgacaaatccgtcagtggcggcaaattggcagccaacaaaaggcgattggcccattccgtgtaaatctgcgaaaggacggcaattaagacaaatgagcgaaaggcatttgattaatttaaaaggaaaatacgctaatttatatggaattgttcaccatttgtgtgtttttttctgtttgaccattggccctgacaaatccaatggccatttgaaaaagggaagagtcgcgtgatatcgcagctcatccccgccccggggaccggtcactctcggggagacctttttgcagaggcggcatcggcactccccgccc

SEQ ID NO: 23456 - DNA, 1648 bp, Heterodera glycines
aaagccatttataatagtaaaaaaattcactcattgtcgtaatgtccattgtccaattgtccgcttctgtcaaaatgtgttccctgtccaaatgtccactgtccaaatgtcctgtcatgatgtatgggccgcaaaagtcgggacaattttcagaaaactatagaattaccgttttcatatataaaaacaattgtctgagttgtcggctcaaagtgcacgaatttgttaaagatttaaccaagattaaaaaaagaccaaaaactaactattttgccacaaaattcataataactaaaatattgaacaaaaattattattaggctaatttaaatacaattttcattaaaacataatcaattaaaaattaattttacgaatcatttaaaaaatagatggaaaatttgtaggaataaaaatcatttaattatttttttttgagtaacgcccattttgatggtttttgagtaatgacccggcaccgttttgagcccctttcttcatagcatatgcacagaaaaaatatgttaatccataccaagggcgtagccagacccttggcttcgggggggggggggctgaagtcaaaaattcgatttttaagggtgtatttttcttttttcagccgatttttaggagtgcatttttgttttttggaaatccagaattagaggggatgtattttgcaaaatttttctccgtttttcgccaatttttgcttttttggcatcaatttttcaaaaatatggtaaaatgggggtccggcggtgccgataggcgccgccgggaaaatttttaagtattacaaccctattgataatgcaattgcgaaaatagcgattacttctcatcagaatattcataattggaactaaacttgactattttttctaaattttggtttaatgagcatattataaattattttaaaaaaaaacagatttaacaaaagcttttgtcttaatcatagtataaatttttgaaataaaatgttttaaaattacgaatccatccaaatcaggacaatttcaggaaaaaaggacaaattcacaaaaggaaattaatatattttttttttaaataataattgataaaaatatttcgtaccctttcccaaataaatggaagaaaatgcggcaaaaatgagaggaagaacaattcactgacaattgcaacggatgtcagcaaattattctaaagaaattctaataatattttagtttttcaagaaatcactttattaattttagcatttttgttgtggacgccattttacgattggaccgataaaaaacgacgaaaaaaacgaaatggcactgattgtatttaaaatggcacaaaatggcgcgccatccgaggtacaattggacggaaatgccaagaatgcagccgaaaatttcacattctaataattaaaaaattaatattattagggccaagatgcaaaataaatttaaatattattaaaagatttaattttaaataatttttatactaattttgggttgtaacaattgacaaaaatgcacaaaaactaaaaaaaatcggggacttaacttatgaaagcgccctcgaaatctaacacaaaaaattcttttaaccatttttgaatagaaatttcaaattcttcagaattttttttaaatacata

SEQ ID NO: 23457 - DNA, 376 bp, Heterodera glycines
atggatttgggtacacaaagtgtaaatgacgaaacaattcaaaaaggttgttacgcatgaatatgtcaaaacaaaaaaaagaaactattcatgaatatgataggaacagaaaaagagaacgaactcatgatgaaggtttatatttaaaggcccgtgtttttgatacttcaaaaataaaagtatacaaaattggcgaattaaatgtaatttagaagaattattacaataatatcctttgaattacgcattttgtttcaaccagaacttgactatgataaccagggatcattttttatgtaaatacatgttttttcctggattctctatagcctaattagtaggaaaaacactttattttttgtgtttgcgaacaaaa

SEQ ID NO: 23458 - DNA, 783 bp, Heterodera glycines
gttaggctcttccacttcaaaatcagcgctggccgtgccaaacaacaacaaccgcagcagcaaatgcagcagcaggtggtcgtcgatgtgtggacacgacggaacagcgacaaagcacaacaacaagaacaacagcagcagatgaggagcggaagtggcacttcatcctcatcatcatcttcatcctcttccgtttcattgtccgtcggaagtaaacggtaaaaacatggttcggtgtggctcagttgataaacagttttctcggttggagttgttggtacggtactcaccgggcggttgcaaatatgacccgcagcttagttggttgagagttttgttgaagttgcaggttccgagttcctccttaaaacttttctgtctaaagaaagatggaaatatatttaatagctcagttggtaaagagccatgttttggacttttgcgggttcgagtgccaccgggcggtgcaaatgtaataaaatgggacttgagtctactaagctttagcccagttggtaaagccgctttgaagggtaactgggttcgagtcccactaggtgcaaatgagaattgagatccatagccggggtgttaagcttccgacccattgaacggggtggcactggttcgagtcccatcggaggcgtgtgctactttttgttataattttcaagctcgtccaatgtcagtcgcccgccggtgacgacagcggaagcggaggagcaacggcggcaccacgacgcgtacccggaactcagtgagccggaacggtacacggacgac

SEQ ID NO: 23459 - DNA, 910 bp, Heterodera glycines
acaaagtcggaaatgggaaaatgattgagtgataatgataaaatcactaaacatttgaatttaataaaaacgaaaaattggcaaacaaaaaaatttaaattataaaaatggtcaaaatttatttgatggattcggaggaataaaatcgattttgtaaaacaatcagaataaacaacagagaaatagccctatctaggaatgaatggcatatgccaatgattgcctcgggcactttgggatgctttctttttgcctgttgcaactcaacaatatttcccagccttatatttctttttccacaagagattctgaggaggaaatctcaaaataaaaaataggtaaataacgcagaaattttttaataattttgtgaaattttttcgggagaaagagtgagtgaaagtgagaggacacaggcgcaaaagacagacgaaatagtgaaataatacaattaattcgccgctgcattctctgattcattgggccaatcggacggcccctggcgatttgtgcgttttcaagggctgaataaatttttgctttaatccaaaattgtttgaacatgtaaagaatggattgtatctctgtgatcagtgatcatttgcctgcgggcacatcgatcactttcttcttcgctttgaaccattatttttcagcttatttttatttgtgttgctcaagcaacggtggttcagtggtagaatgctcgcctgccacgcgggcggcccgggttcgattcccggccgttgcaattcctttttgcttttattttactattttttgttggaaatgacctgctaaagctgattttattagcaaattacattaaaaatcccagatttttagttttacatgccttgattgcccatttagcaaattaacagtaaaaaagagaatgaatgattgatag

SEQ ID NO: 23460 - DNA, 784 bp, Heterodera glycines
aggaagaatgaccttccttcccagtggcaaacctctttcttgtgctcttcttattaacatattatcaacattcttatatgcatcagccaaaatctttttctgattactctttatccaattcattctatctccttcaatcttaacatattcatcaacacaatactgttgaaagagctttccaccatacaaaatcgggttaaactctctttctctaattgcgactgtgtagcacacatattgcaatctcgttactcttctgttactatttctatgcttcatttcagggtcccaaccaagcgtaccacgcggataaaacagcgggtaagtcattggagtcaccattgaatctgtactcttcaaaatcttcaattcctttccacgttctctcaccacaatcttggcattaggtacttcaccgtcagccccaggtacataaactgcagcaacttcattcgctcgaggtacattgtaccccaaacgtctgtccaattgccttccggtctcaaacaaaagcttgatctcggctggctctctgttctcagttctggctctctcaacttcttcgtcttcttcttctttcatcatcatgtatgcttcagcaaacggattcacatttctaatcacttcatacgcagttctcagcaattgaggttcaatacctacattggcatgcctcattgctctcattgcatgctcagtatctacgatgaaaatctgcccataagcaggatcatcgccttcttctggattcaaagccaaattcattctatgataaatctgaccg

SEQ ID NO: 23461 - DNA, 852 bp, Heterodera glycines
tgctgctcattttcgaccattcattcctttggcaaaccttgattcgttacggtagctcttttacagtatgcgcttagcgcttgaaaacgcggaactttgtggggtaatccgttggctttcgtcttacattagctttctctccgtctgctttcgtctgtttgtctatgccctcgaccgatgtcatcccgaagaagcgcaatttttggaatggcaatgccttcggcacttttgcatcattcgcttctcttctcccttttcgtcgtcactcgccttttaatgcatttctcagcatttgtcctataatacatttacgcacttcctgcgcataatccaacaggtgtcaaaaatggccaaaacttatgccaaatgggaggggggggggggtcagtcgcttttaaggggggagggagggaggaaagggacggcatttagctaagcaaatcccctggggcatatgtgaaacggtttttggtgccaccgcccccgagggtttgcccataaaatatcggtgacgacggagcgcaaaaacggagcggaggatttagggaagaaacagtcggcgagtggaatcactttggacgacgaacgaactttttaagacgaaagcattggccattgagaaacgaacaagtcgagaatatctctcgagtttatactgtcaaagcattactgtacttttataacaatattattgttcagaggtggggaccgaaaattctgaaaaccgagaaactcttacaaattacacccaaatgataggcaccccttaaaatacattgaaattcgtttttgacttccaatcacttttccgatcaatttctggtcaattttcagatcacttttctgatcgct

SEQ ID NO: 23462 - DNA, 1569 bp, Heterodera glycines
  unsure (1)..(1569): unsure at all n locations
attggactgcaaaaaaatcaattttcctaacatggtctcccttaatccggtttcgcaaatcgntacaaatgagccggcttagaaaaacaatctttcgctttcaactgatccacaaaggtgcgctcagaaattttgggcaacacgacaaagaagaggccattttccatgttcttctttcaacttccagtaatagaaaatacaacagaaattaaaaacagaaattaaaaattctcaagaaaattaagtttttttgagtccggcggtgcttgccgtcggaaaaaaattgaaaatttctatgcaatttattaacataaattgtacaaaaattgctaattttttggaaaaaaaactcaaaaaaattccgaaaaattccgacttttcatcaaaaatttcggaagtcggaattccgaggccccaaaaattttcggaagtcggaagtcggaattccgaccccaaaaatgtcggaactcggaattccgtgccatccctgatataaatggcagagaaagcaaatggggagacaaaaatagtacataacaaagaaagaaaggaaaagagagagaaaaacaaagtgaaagaaagaaaattttcagaaatagtgtggaaaaaagagagaaaaggaaataaagtatacgctcttggctggttgagctaccctccccttcgcttacaaccataccacgttgaaagcacgccatcccgtccgatctggcaagttaagcaacgttgggcctccggtactcattgggtttgggtccgcttttttgatcaaatttttcaaaagcgtaaccagacagtcagacagtgcactatttccttctttatttttctcacttcttcccttttcccacacacaatgctgctgcacagcgagcacacggctgtttactgtctacccttccacccgccgcagccccacgtagacagacagtgcactatttcttcctttctccagtggctatgctgaagaaaagaaggaaatagtgcactgtctgactctctggctacgcttttgaaaaatttgaccaaaatatgggatacaaacccaattagtaccccaaaaattattaacaaaaatgcaatacctaaactaccaaatccttcatttttccaaggtttttttttgtgctgctgtactatttattaaacaactaataatgcatgatgagttgcatccgccgccggcccatcgccagtacatcccgggcaacggaaacggcaacaaattgaaccgtcgcctggaaatgttggagcgtctgttgcgcgcctcgggcggcgacgggctttgcgcccgcaccaactcattgcgccaggcgttgcgtcggaaccgaagcgacatggcggacgacacggccaaatcgttggacgtcttacgccaggttgttaaagggtgtaaaatttgccatgacaaattgaaaaaaatgcctatatattttcttaattaaggctttcctttttgttaaagtttaaataataataaaaaagattgcaggttttccaagctgatctgacggaagaaattaaggttttccgttttttcattttttctgtcaaattttgtttttaatt

SEQ ID NO: 23463 - DNA, 829 bp, Heterodera glycines
tcagtataattccacttattcttgcacgcgtcagaataattccgcttattctggtacatcagaataattccgcttattcaggtacatcagaataattccgcttattcttgcacgcgtcagaataattccgcttattcttgcacgcgtcagaatcattccgcttattctggtacatcagaataattccgcttattctggtacacgtcagaataattccgctcattctggtacacgtcagaataattccgcttattcttgcacgcgtcagaataattccgcttattctggtacatcagaatgattccgcttattctggtacacgtcagaataattccgcttattctggtacatcagaataattccgcttattcttgcacgcgtcagaaccgctattctggtacatcagaataattccgcttattctggtacatcagaataattccgcttattcttgcacgcgtcagaataattccgcttattctggtacacgtcagaataattccgcttattcttgcacgcgtcagaataattccgcttattctggtacacgtcagaataattccgcttattctcagtataattccacttattcttgcacgcgtcagaataattccgcttattctggtacatcagaataattccgcttattctggtacatcagaataatccgcttattctggtacatcagaataatccgcttattctggtacatcagaataatccgcttattctggtatatgtcagaataattctgatactccgatacacgtgagaataattctggtttttccggtacatatcatataaccggaattattttaatttttgt

SEQ ID NO: 23464 - DNA, 858 bp, Heterodera glycines
tttttttgggttttcggggcagtccccctgaaccgatgcgcccagatttatggggagaccgaatccttccggaatagcttccctatagcctgtactttaattctgcgttggatttttgctccccataattgtttgagtaccccaaacggacacttgaaaaaatcgatttttttgttttcggggcagtccccccgaaccgatgcgcccagatttatggggagaccgaatccttccggaatagcttccctatagcctgtactttaattctgcgttggatttttgctccccataattgtttgagtaccccaaacggacacttgaaaaaatcgatttttttgttttcggggcagtccccccgaaccgatgcgcccagatttatggggagaccgaatccttctggagtagcttccctatagcctgtactttaattctgcgttggatttttgctccccataattgtttgagtaccccaaacggacacttgaaaaaatcgatttttttgttttcggggcagtccccccgaaccgatgcgcccagatttatggggagaccgaatccttccggaatagcttccctatagcctgtactttaattctgcgttggatttttgctccccataattgtttgagtaccccaaacggacacttgaaaaaatcgatttatttttgttttcgggcagtccccctgaaccgatgcgcccagatttatggggagaccggatccttccggaatagcttccctatagcctgtactttaattttgcgttggatttttgctccccaaatttgtttgagtaccccaaacggacactttgaaaaaatcgattttttttgtttttcgggggagcccccccgaaac

SEQ ID NO: 23465 - DNA, 115 bp, Heterodera glycines
ccaacaccaagctgttcgcccgcgaccgcaatgtctgcgcctactgcggcaagctgtacgacgccgcgcacctgacgcgcgaacacatcgtgccggtgtgccagcagggccggga

SEQ ID NO: 23466 - DNA, 860 bp, Heterodera glycines
ggaattgcgcaaatggcaggtgaaattcgaaaactcgatttgataacttaaccaaaaccctatttaataaataaagaaattttgtttggatggcaaagagcaaaaaatgattttaattagttcggcagaatatcattaaattaatgcgtacatttttagctatttcgggtgctaagctaatcagccgtgcgaattggacatgtgttcaatttgtataataagcttcgaacatttggtccatccctttttgttaatggtggcaaatatggtaatggggggatggaggggaaagagaatgttccattggcaatatttgctgtttcaagaaggtaaccaaaattggattaggcctaaaatgagcccttaaaggctattaaaaattaaataaaaggagaagaaggaagggggaaagttaacagagaggtaacagagtaaggagaacaaaaattaagtaattaaaggaacccaattaggtaatgaattaacacgcgtattattaaatattgtaataacagaaataatttgttgttgactctttacgaatgttatgcttctgttaaaagccgtttattgttatggtgttgatgaatgtgagggagtaaatgaatagaaagaaggaaaataattaaattgcctttttggggtggaagaaaatttgtagtgacagaggggggagagagagagagagagagagagagagagagagagaggaggggacggaaacggggaggggagagaggggaggagacggaaagcggggggaggggggatttatttaaaaaagtgaaaaaaattgtaaaaagggcacgaaattaattaaaactataatcaaacacgaacagagaaaagattggttgggg

SEQ ID NO: 23467 - DNA, 1015 bp, Heterodera glycines
tggctcgggcttgcgtcggacggcaaaattcacctaacttttctgaaaaacatgacccattggtcattttaagcggaaaactttggaatcctccattagatttttcaggtataaagaaaggcctgataagttttttctggaaaaaggtctaaagaagttagttttcctggataaaggcctgccccccccctctttcttccgaaacctttcaactgtgaacactctctctgcgcgttgacttggttgtccccgttgcgtacacagtggtggtcaaactgtgcccatgtcatgttcgttatctcttcagcggcgtcataggaagacgggttttggtagagaaacgaaatgaccatcagagaagcgaagaaataggcgaagagaagggcccacacttttttggagccattttggaacactgacaacaacaaaaaaaatgtgaatttttttaatagaaatatgtaattttgacatttgttggatcagagccccccgggggcttttatttttcaacccttctcccctcaaaatgagagttttattttaggggggagagggggctcaaattcagtaaatgcggtttttgttggactgcgtattacgtttgaaattgaactgtttggcgatgattgaatagcattttcggaccaggaaaggcatgacgaacacgagcacagtggcggacactttcagcgcggttatctaaatgcacatgaaatcataataagaaaaagggatttcaaaaaattctgggcctggatccggaaaagctacatggaatggatatctggatccatatccgggcacgttttccaacaagtacccgggtttgaaatccaaacgggtgcactttatttcccccgggtgcactacgtttcccccccgagaaaatttttaaaaaaaaatttctcgggggggaaacgatgcgggggggaaccgagctgggggggaactgatacggggggggggggaacggcgggggggaaacggcgggggggaaacggcggggggggggggg

SEQ ID NO: 23468 - DNA, 1234 bp, Heterodera glycines
aacagtatacagacattccaatgaatatacaaaatataaatttaatatgttttatgaattgatacatactatctaattattaacggattgactccaaaaggtcctgcctggtctagtcacagcaaatttcaagattaattattttaaaaataaataaaaaatttaaaaagtaaaaatttaccatttaatgtaaaacaatatttatatttataaaaaaatattaattagaaagaaatctacatattaaatgctacaggaagggcctggtatgaggcagcagggacgaaacatgagaaaaattgagcaattgcaacataaataatggaaagaaattaatatttttaaaataaacaaaataaaaaagtaaattttaacagcatctatatcaacctttttaaaaatcaaaaaagcaaaaaataagtttaagattcatataatggacatagaaaataaccaaattttttcggattaaatcagctttgaccccaagaaatcaacaaattgcttactaaatcaccagagttgggagccctggttttatggtaattgcataaaaattattgtttacgcaattttttctaaaattcaaaaatggacaaaaacaaaattgtgttaatgaatgaggcgaaattatgcatcttttaaaagaacaatatgagaatataaaatcaatttattattcaataaatcaaaatatcaattaaaatggttctatttacttaacttctattttttgataaaaaaccaaggcatttaaagaagaaaattaaaaataaattagatttattgtaaataaaaccctcaaaaaataatattatcatttcatttaagaaattatgtatttttattgtttttctatattttttttgttaaaaaaacttacggtaatcttttgaaaaatgatagaacaatttaaaagaatataattgcaatttgaattttaaataaaaaaatcgagtttaaatgaaaagttaaaaaaaaacttatagaaacaacatttaaattacgaaaattttttaatattagcaaaaaaacactaccatctctaatatgacactggatacggttacaattatgctcatataaaagaataaaaataaaaattgtttattaaataaaaataaatagataaaatcttatacaaataacttttaatgattaatgttcaaatataatttattaaatctttaaatcgaaataaatatttagacctttgaataaatcaagtctatat

SEQ ID NO: 23469 - DNA, 986 bp, Heterodera glycines
aaattgcactcaaattttaaaatttttccccggcggcgactatcggcaccgccagcacccatttttcaacggaaaattcaaaataaatttttagtgcttttttaaatttaaatcaagaataaaaaatccatattatgataattatggtttaattaataaataggctaaaatttgcacttttactcagcgtcgcctaagaccactaatttttattagctcaaaatgccaaatttggtaattttttggtgaaatctgttaacaaataacactcaaattttctaaattttccccggcggcgcctatcggcaccgtcggcttttgattcataatttttcagttgaataaatgcaattatttcaaacgtaatagtaatttttcataatttttaagaaataagaaaatttaaaaaaaaagtaattcccctccaagtagttgtttttcttctaatttttcaaaattattcatttttcggtgggaattcaatcataattttaacaattaaattcgtaaaatattttcattttttggactaaatcagttaacaaattgcacttaaatcttaatgaatttttgttttgtgcgtttttgaaatgataaatattgtaccaaattgaatcaaaattaaaaaaaaaaaccaaaaattagttaagaatagagtcaaaaaatgtttttaacgatttttaagcgaataggaaaattttttgaaaaaagtctcgagtctcgggttttttgggtctcggggttttcggtctcggggtcgagtctcggtctcgagtctcgagtctcgggaaatttttggtctcgaacagcactattattttccatgcaaaatttgtcaaaattggacttgcccttcaacaaatactattaatatttcattttcaggctaaaattattgttatttattttatataaagtttttaaagcattatattttgctggtccgttttttgcgaaaaaaggcaccgaacttttttaattaaaat

SEQ ID NO: 23470 - DNA, 217 bp, Heterodera glycines
  unsure (1)..(217): unsure at all n locations
tataataacgcntgcggacatctacatttttgaattgaaaaaaaaattggtaattactctttctttttctccatattgaccatcatactcatactcttgatagtttaaactgaaggcgggaaacgacaatctgatccccatcaagctagctgctgcaggtcctgctcgagcggccgcccggggatcgatccccgatctagtaacatagatgacaccg

SEQ ID NO: 23471 - DNA, 1352 bp, Heterodera glycines
  unsure (1)..(1352): unsure at all n locations
tgtcgtacgtccccaggggctgcatgcaaattacggctttccataattgaaaaccctggtcgggagaccgatcagggttttgaatttaaaattttttggcagtgttttcaagaaatcccctgtttctgctgctctcttatgaaattaattggacgggcattttgtggccctctcgaagaagtacaaccaattgtcgagatcaaaaacctctcaaggccggtaaatgtgaacgagccgagctgtgttggattgttttggcacgttcattaaaagggttgggggtcgaaaagcgccgtcggaaaagttttcaattcaattaatttgttgcttgcggaaattgggcggctaaaaagggccaacataaacccaattaaaaatgaagcaaaaagtggtgaaaatttatttaataaataatttgttacacttttaaaatgtagaacataaaaggtatctcgcccggtgggactcgaacccacgtccctgcaatccgtgccgtgctctaaccaactgagctacgggcgctcctttaagcggttttcccaaaaattcaaaaataggatatttgatccttttggcgatcctttccaaaattttatttattttttctgctttaccacggaaacgcttgaaatgtgattagtttgcaatgttcaacttaagaaacattctattttttgagtttgataaaatattttcttaaatatttttacatttttcttaaattatttaaatattttaaaaatccgggctcaaattattagtaaaaaatccaaataaaattttcaattaaatgaaattttagaaaaatgtaaaagttataaatataaatggtaaaaaagggtttttctatgtaaaaatgcacataatctgtgaatgtgaaagtgcttattgttagaaactaatcagcggacgaagtttaaataaattaataaatataattaatatttattgctttttgctagttgatcagaagcagcaattgatcaatgaacaaaaatgtggagaattaattaattgtccatcggcggagtgtacaaataacggcgatggataaaattgtatattaattgtacgcaaatgacatgataaatgtcatttttgcattgtataattaattctctccaaattaattataggaaaaatgaaactatacaaataaatactagagaccgagatttccagatttgacgggacggaatgagaattccagaatgaatcgtaagccgaacattgcaaactaatcacatttcaagcgtttccgtggtaaagcagaaaaaataaataaaattttggaaaggatcgccaaaaggatcaaatatcctatttttgaatttttgngaaaaccgcttaaa

SEQ ID NO: 23472 - DNA, 1041 bp, Heterodera glycines
cccctcggtaacgggcctgaataaatattatttttttaattttattactatcatttccaaaaatgaaggtgtcatacgtgaaaagtttggacatttttcttggcgtctgctttttcattgtgttcgcctcgttgttggaatatgcaactgttggctttctgatgaaacgccgacggcaaaaaagttcgtccacctcctcgtcggtgatgccacgctcatccaccgtttgttttcgtgaattggaggacggcacgctgaaaatgttggcaccaatgcatcataatcaccatcaagtcaataattaattaatttcttattatttttataaattttatggattagggatggtaaattgacccattttggaattcatttgtatggcaattattaaaactatgatacttaaatgtgtcgggattattcttgggcccaaagacataatcccgaattcccatataagtaatttgagagacggccaagcactaggcctcgagtcttcatttccatgccaggccggaaacattttcaaaaattttttgaaatttacaattcgcagtttttgccaaaaaattttcaaaaacccaactaaattttttctgcggcgttttttttataaatttttttaatgcttgagttttttattaataatattttgacgataaaccaatgtttcaaatccccaaaaatgtaatccgagagacggccaaaattttggcatcgaatcttccagacctggtcaggccggaagtgtttttttgaaaattaaagtcacattttttgccaaaattatctgaaaatccaaataaatttttcctgcggcgtttttttataattttttttttacattaattattttattaatgttaatatatgaaaacttatttgcaaaattataaattttcagcaacgaatgccacccgaacgaaaacccgcattggggcgccaagcgtccacaacaccgccggcacgtaaaatgtcaaccgtactcgcatcagtaaactttcgacaaataaaaatgccaaattttcgcgaaaatgccaa

SEQ ID NO: 23473 - DNA, 1318 bp, Heterodera glycines
cggatgttggagagttttatgtacgcgcgcaaattccttcgccctggcggttagtaaattgttttcaaaataattttctcttttcaaaaatcataccttacaaatgtgcacaccattaattaggaaatcgaattgcaacaaaaaatggaatatttggcatatttaaaaaaattgcttaaaaatagctttttataggttaagataaaaaaaaccatttaaaaatagccttttctggggtaagcaccaaagtgcaaaatggaccttttccataggctcaaaaaaatttttctccactaattaaaaaaaaattaaatatttttgttgcggcgaaaatttttttagcaattttttccgaccaaaaagtacatttatatttaaagaatttaaatataacacttaaagtcgttaaagcgtcccagagatgtcggtagacggcatcggggaaaattttttttttttttatcccgctttagaaaattgcattttccagcgcctaattttcatgttttatttattttttgcattttggtccctttaaattttaaaatttttctagcgattttttggaataattctctttaaaaaataactagtaaatccagtgataaattgcttttaggtcgtatgtttccgactcgtgccgatttgcacttggcactgttcacggacgacgcgctgtacgcggagcagcagcagcgggccgccttttgggcccagcaaacgtttcacggtgttgcgcttggcgttctgcaagagccagcgctggacgaactgttccgacagccagtggtggtaagaagcagcagaacagagaccgacaaggccccccccccattattgacgacccctaaatggtcctattaatttttcggacgggcgaggccttccggtttaaaaaattaacaatcagagtcccgtactaaacacttttctaccgaacctttaatcatttaatctaccccattttgaaaaattggggggggggagagagacgatttgccgccagaattattttatgtgggaaaaaacccttcatttttattgcaaaaattgtataacaaatctcgactaataaatagtacacattatttttgtataggacgcgtggagtggtgccattttggcctcgccaagtgtcaaatggaccgtgaactttgagcgggacccggtggagcggttgcatcgcattcagataccattcacggtcagttttacaaattcgccggcgaaggggaaaagaaggaaatttctgaaaaatttggcttttttctcaacaaaatttgctagaaattttcattttttcttctggcggcgccta

SEQ ID NO: 23474 - DNA, 962 bp, Heterodera glycines
taaaaaacgtcaaatatggactaaaatgcccgaaatatggtctaaaaagctcaaaaatggccaaatatggactaaaatctgacttaaaattactccaaaattttcataaataaagaaaattaaaaaaaaaatttattgaaattcaatttaatatggggtttttaaaataattttcggtgttacctcctcaaccttccagttaatgtactgcttgttgaccccaattctgttactgatccatcaattccacccacgtcgatgctctgccgtacctaccagtcaaacccggacagacagcacaactgtccatcgccccactacaaacatgtgaaaatttaatcctttctcaaggacattttgaaaaaaattcgctaaaaatttttttcaaaatttctctttcttgaatttttctttttcgagaggtggactaggtttttcttcccccgataaattaaaaaaacttgaaatcttgtttttttttgtaggtgatcgttacgggtgcgcgcgagcaccgcttgccgtccgcctacattgaatcgctgatcaacaacgtgccgaccaacggctaccgggggccgatcacgctcaaactgcgggccatccaacacttgaacgacgacaccaccgccataaacaacaccaccaatgctgatgctgttgtcatggaaaatgatgaaaatgttcaacaacagccaccgcagaacaagaatgatgatggtgtgaatggtgatggggttgttgtgttggtggagaatgaaagcaaaacgatggatgtgaattaaaacaaaataggaattggtccccatttttatcgctcaaaaaatcggaggcgtgtctaatcagtcaatcaactaacaaaattatgaattttacggcagagattttgtcatattcgaccagggtgggctgccaactttaaagggaactgaaaattttggcttttatttttttttacgagtcaa

SEQ ID NO: 23475 - DNA, 701 bp, Heterodera glycines
cgtgataggaaattgccaaataattagctaatcattatttatcaacaatttctgcatttaattgcatttccaccaaagcattgcccgataaatgccgaaaaaagcatggtgcccaacatgggcaagcagtactttggtggaatggtgataaactgatgtgccgagcacggcaaacgattccaaataattattccctgacttctaatgcaatagatgtacggatgagtatgcaaattaattaattaatccattttattaacataaagccccaaaaggaccattcatacggtagaagctcttctctttgagcgacaaatgcaatttaattaaattgtaatttgataaaaaattgccaaataattagctgatcattattaggaaaaaacggaaaataacaataaattgtggagtgagtaattcagaaattcacaaaatgaaaaaattcaagtcacgtatccgcacccgcataataaatttgataaaaaattgccaaataattagctgatcattatttatcaacaatttctgcatttaattgcatttccaccaaagcattgcccgataaatgcccaaaatagcaactgcccttttttaaatgcaaggacattatgccaaacaatttcagaatatacaattttgtttgctttctcccatgttttcaactttttcatttttgttcctgtcgttaacctttttacttt

SEQ ID NO: 23476 - DNA, 976 bp, Heterodera glycines
  unsure (1)..(976): unsure at all n locations
accgaatgcaattctttcatcttcagaaataatgtaaaattatgtcaatgttattcgggagttattgcgaaaaattacaaaataattaattaaatagtattgacttaaaaaaggcaaaaaaatgattaaaaaataataaccaatttttattaggtttttaattgaatgaaaataactttttctgcaactaaaattaacaaaaatgcattttattcattagttttgctaattaaattcatctttttgagttcattctcattaaaagaaagcttcagagaaaacccctacctaattataataatattatttaattaattatttataattaagaaatatttgcatttgaatttaaaaaggtaatataataaatagtaccgatggatggtaccgccccccccccccgcctcatcaagttttgtggaatagctcgaattttactgaaattgaaaattttcgactttttgttcgaatccgggttggttcggaaaattgttgtttaactttaaatatacaaatatatttaaataaattattaattttacaattataatatattattttacccattctttgttttttgacactgttcccaaatcataagcaattatttctgtttacatccaaatttgtcttttaaatttgcaattagtgtccgaagaaaagggtaatatttttcattggcggctgtgacgaacacaaattttggatggccagggtatttgacatgaaatttaaaaataattaaatttcaaattttaaaaatggataccttaattttctttttaattgcgtatttgtctgaaagtttgtagtgatccaaaagccatgttaatgagcaattaaattttctgccacgaattattcgcgagtcattcattttcaaagtgtatgccatctaaaaataaattnttaatgggcctaatatagtcattgattagtagggatgctatttttaggcnaatgcccctaaattttt

SEQ ID NO: 23477 - DNA, 898 bp, Heterodera glycines
  unsure (1)..(898): unsure at all n locations
tagattntggtcaacaatgaaaaaaggtgtagtccaataattgggctggcaacgaaacggcgggcaccgaaccggcgggcaccgaaccgtcccctaccgaaatttaaatcatatcaactgatttgaaaatatttgaaacttaagcgtatgtatttgttaggggtgtatttttccaataaattacccgaagttcgaacccaaaaaacgcgaagttttcgaagctcgaagtttcgcccgtccctggtcactgcggaaatgaattattcttttctattaatttaaaaaaatgcgctgatttcgaatctgagcccggcatttgaaaacattgattttgtctatgtttttcatcgagtacttaaacttcttaaacccctagggggataacaccgcattcgcccctcaaaatgtcctccgtccgctccatcagtagcaccgctcgtgctggcaatgtgctcgtgctgctcgatttgtatgcctcggggtttgcctcttcaaacacttcgccaactattccgatgctcacttcccgaacgatgtaagtgccgacggagagaaagcagagggaaagagtgccatttctgatcagagggaaagagaggccataacaaataactccaagctgctttttcccttctgttttatttggtcttccttccttttacatttcttccctttttcacccttccctctctcttttcggcacactctctacgccatttctatgctcgtctactcactgaactcccttctcaattgggtccacatttattttgtcctctgcggttccctcagctctttccccctcaacttttggcttgctatgcttctcgtcatcgctttctatttcgggcactatgctaattatccttctngatgggtaattgcgataattgccttt

SEQ ID NO: 23478 - DNA, 917 bp, Heterodera glycines
  unsure (1)..(917): unsure at all n locations
cgcgagaagggcacgcatttggtgcagtcgccggtgtccaccgcaacgttgcgctcggacgtggaggaacgggtggacaatgtggccaaaatggtgcacgaactcgagacaaaattggccagcatcagaaaagcggcagaggtaagcacattcgagaatttcttggattaacaaatttgcaccattttcttctaagtccattaattatgcataccaatcaccctcgaaatttgcacacatttctctcattttgctgtttttgtataatttatttttcggcattttttgtccatttcattctctttcttttcctttttgaaaaggcttcttctccatgttgttgctatgattgtttcattttatactaattttgacatattttcccaattgaaaaaccaaaaccaagagttttttttgtttgatttaaattcccgagacttttttgattcaaggctcgagagttttattgggtcgatgatacacaagaaaattaaggcctctcggttttacaacaaattttatgattgacactggtcctaccaaaattttgttagaagcgcgcggcgcggcaaggtcatctctttgttggaccatcgccaattagcggcttaatccatgacaaaaataaataatctctcttctgttattcctctcgctaactattgtttgctttttgttgttgcacctcaaatctcaacagcatcatgatcatcatcagcataattgtgatcaattatagaggtatatgtacctcaatcatcatcattggatgaggtaatattaacgagcctccccccccccccccccccgcattttctgccnggcgatcggcgcgcaactgtccgtccgcgcgcgccgcaccgcgccgatggacaaacaaagcaaacacccacacattttgggtgctcatgatgctg

SEQ ID NO: 23479 - DNA, 1023 bp, Heterodera glycines
cggcacttcacaatgcgtaccaacttgcagtgatgcacctgcatgccttccagccggccaacacattttttgccgaaaattctgtggagttgcgaaggaatccaagcgatacgattgttgcagggccgagttgtgcacttgccggttttgtggcgcttatttctttggcaattggccgttcacccgaacgctttggtctgacggggtgcttcgagccaaacggaattattagccaagttggcggcatggaaaagaagctaatgaggctcgtccattctggaatcaataatgtattggttccgaatgacaattataagaagcaaatgccatccgagatgcccacgatgccggccatgacttgggtcccatccctcacattgacttttgttgtgcatatcaatgagctatggcatagtttgtttcctcttttcttggatgctcaatgaaatatcaattttaatttgttagattattttattttttttcgatacttctccacattttgtgttttgtcaaaatggtgaataaattctttatataatatggtattttaatttaatctccttctgttcaaaaccattggaatttaattttttaaaagaaacctaagttgtgggtatgactaagtccgaaaaccttggcaagaattgtatttcgctttccttctattaatgcttttttatgtcctatactctttgaataatcatcaggtcagagaatttaattgatgataaatggagttaacaatttcaaaataaacacgaaaattaagaattattcattttttaaattgttttaccctataattaaagggtttcctttttaagacacgaaaaatcgcaaaataggcacaaaaatcctcaaatcaagaatagccaaataaattttattaagccttttaggtagcaaacacataaaaacttaaataaatatttttattttttcgagtaatgagaaatttattaacccataaatttttattaaaaaaaaaatagttgaccaaagttatgtttggaaaatttt

SEQ ID NO: 23480 - DNA, 849 bp, Heterodera glycines
ttgtatgattttatgattatttaactcttaaagtaaaatttctcatttttttattttaaaattactaactaactaataatgcatttttaggagcttaggttttttgtgaaaaaatttatttgatctgtcaaatgataaatgcatcgagtgattcattcctttacaccgctttattttgtcatcgcttcactattattttcaaaaaaattatgcaataataattcactaaaaataataataatattttttaaattttacatattattaaacaaaaatataaaatcccaatgaaaatagtcaaaaaattattcgaaataaatttggaaaacgtacctttcaatgaatttaatgaattaaacctgatcatccttttaatcgcttttaattaattttttaattactttttattgtgtacgccacgcattaaattaaatttggtctttcagctataaaatttccccaatgccaagcatcatcattacggccacttttgtagcggtggtacttttcacttgcgcttttttggacctttgccatggtaaaaaaacattttcaatctcaatatatttaattgcttttttaataaagcattgacttgcaaaagccgttcgataatggagaaaaatggcaagcaatcaaaagattctgttctttgtgagaatggccaagacgtttgtcgtgcgttcttctgcgtagcgagtaattaaaaataatttttgtgccataagttttttttgaaatttgtcaaattaatgaaaccgatccatgcaatctggccgattgtaattaaattactaattataattatcacagaccattcccttttattcatcctaatgggattgtgcg

SEQ ID NO: 23481 - DNA, 1487 bp, Heterodera glycines
cccccccttgtccacctatgcggtaaagcaacattgtagcattacaagcaaaaagtctaatcggtcaaatcatcttcagataacatgttgatcgcaaaaaatggacatatcaaattggcggactttggcacgtgtgtgaagatgaacacggttggtcaaaagcagagacggaaccaaaaaccccactgacaatgaccgttttataacttaattttcaaaaaaataaataaaaacactcagattatgatacagaatggtcattttccttacaaaaagccaagctgttcctccttccaaccaattcaatgctttcccgtctctcactgacaacattctttccttcccttaggatggcctcgtccgatgttcgagtgccgttggcactcccgactacatcagtcccgaggtgctgcgttcacagggcggggagggcgtctacgggagagaggttgtctgtccggcaaatgactttgccatatgccaatatttcaggtcgattggtggtctgttggcatttttctatacgaaatgctggtcggcgagactccgttctactccgactctttggtcaacacttactcaaaaattatggaccacgaccgacaattgcaattccccgccgatgtgaggatttccgcacatgccaaagacattattcggaagtttctttctgaaccaaacgaaaggctgggcaaaagtggcattgatccgatcaaaaagcacccgttttttggcaattcgaattggactttcgacaccatccaacacggtcggtgataagaagtggaagagaagagattggcattcaaagcaattgccattgtttttttgttttaatttttattctaaattcgcagggttttctccgtttctttagcaactccgccctttgtgcccgaactcaaaagtgacgacgacacttctcactttgaggatgttgagcaggccgaggcagtcaatcccgacaactttcaaatcccgaaggcttttaccggtaaccaattgccattcatcggattcacttactccagtgaacaagggtaaattttataaaactcccttaaatgaaaataagattttcaatatttttagcccattggatgcaattcgaagacaaatctcttctccctcagatgtgccattaattaatgggacaaatcaaatcacaaattgtgccgaaattgaacaattaaaagaagagaagagacttttggaagttcgatttggcgaccttcaggaccaattggacacagtcagttcgacatcgagacaagaggtgggcaaacagagaaaatggaactgatcggacgataaatgatttgatcagattgaaacattgcaaagggacaaaaacattttggaagaaagcgcaacggaactgaaggagcaattggaacgaacgaaaaacgaagtgagacggggaaaagggaaggcaaacggagaaatggtgggacaagttcaggtggaacagctcaaaacagacaaaa

SEQ ID NO: 23482 - DNA, 1746 bp, Heterodera glycines
aattttttaaaaatttttcttgcaattttcttataaaaaactttgttttttttcaagtttataaattataactgaagaggtgatttattcacgcctaaagtgaacaaaagccgaaaattagtacacgatttttgtaaatcaattttgggttgaaatacatgtgagaattagggatgggatttttaggctctaaaaactgccaaaatttgtaggctctaggctctaaaaaaccccaaaaataggctctaaaaatggaaaataggcactaaaaactagagtgaagcgggaccgggaatttagggcaaaaccgggaccgggacttgccgagacctgagaagccgggaccgggacctcgatttttcttcgggaccgggaaccaggaccaaccgggaaatttagaaattcaaaaaaattttaaaaaatttaaaaaaatttaattttaatttatttcaattgaaaataatacaaaattaaatttttattttgtttttattaaataattaaattaatgaaaattttcaatcaaattttcttcaatcatttcaaacaataacggaaaaattgaaaaaatctgtgacccgtgatccgagatcacggcaccccaaaaaccccgtgatttccgtgatcacggccagccctgatcctgagccgcggatcgccaaaaatgatccatagatcgcggatcataattttcccttgtaatgtggatcgtgatcagaggatccgatctatgcatacgggtactggtgcatttgaatcaattatatttagacaatacatgtgaactttggtaaaaattaattctcgaattttgttagaattcgggtccaggtttgcaattgaccaaaactagggctgggcgcaattgcggattacggcaattgcgtggtttttggagttacggattgcggattttgggatttgtccgcaattttgatccgcaatttgacttttggattatttttcgagacgatttcttgcgagatttttttttattagagaccggaaaatttcggggaccggtaaattggacaccggaaaattggacaccagaaaattggacaccagaaaattggacaccaagcagaaatttggacaccgccggaattttggacactaaaggaaaattggacaccggaaaattggacaccaaatttcgcttttaaaaaataaacccaggaattaggttgaaaattaaatggtgtggataaatgattaaggcacttagagtggatcaggcattcggtaggcaattgccctcaaatattggaggggatgacgatcggcacgcgttgcaaatatttcccgaagattttcatcttgctcaatataaagctgtttgcgcttcattcctttccctcgaactccgaacgcaggatttatttcatactcagccatttgtcgttgccaatattggtcttctttccgaataacgcggaggaattcactcaaacttggcgattgtgatcgaaacaatgagttaaggttgcgatgccaagcttcgacactgttattcgtacgaaccaagtcgtcttgtaaactaattcaaatttttcatgtttgacagaaattaataccgttcacacatgttccaaatattcattgggaacaatgcccgacgattctgaaagccttcctcttgaatccaatttcggatgtgctggtcaacaaaaccataagcaccatattctgcctgttgatcaaactcatcaattggctccacctccataacagcttgacaagcaa

SEQ ID NO: 23483 - DNA, 849 bp, Heterodera glycines
  unsure (1)..(849): unsure at all n locations
ttctctttacaaaccattatttttatttttaaaatgattatgtttaggatttttagttttaattttaactaaatctagagtttttacataaacgttattaaaattaaatataaattagcctgcctgttaatcaaaatgatgaatatattaatgatacctgattttaaaggaccagaacacgtccattgtgggaaatgtggcttcgacttttatttctacaatgtcaagtggcaagactgtctggtggatgcggggatgggcccaggacagtgttggttaggagaggataatatagtaattttttatttttgatggagtggattttgattttaagaaatttgaaataatttaaaataagcataacttttcccggcaaagattgggcgcaaacgggcctaggttttcttttttccaacagtaggtagtgcttgacacttagcaatatttaggaatttagataaatatttatttcccaactcaaaataatgttttaaatgcttacagccgcccggggcgctaggcaaatacaatgaaaaattgctttccgagatggacaaagtggaaaaaatattggatgatccagaacgcctacttgaccaaatagtcggaatcgttgaagatgaagatacaattccgttaggagcagaagtaagctaaatctggatattttaattgtgtaggaccgcatttgtagtgcagaattgtaagaaaaatcttgaaaataattttttaatgttttattattaggattttttgcttatttcgatatgtggaaaattttttggaaatagtaaaactaaataaaaatgaacaaanacgtttaaggcaagcaccctcaacaaagaaaaa

SEQ ID NO: 23484 - DNA, 1051 bp, Heterodera glycines
atacaaaaaatgataaataataataataggcagcaaaattcattaattaataagaaatgaataatggatgagagaaaaagggggagagagagaatggaaagaaaatcggcgaggggagtgggggggggggagattccaatttggaagtaaaagtgattaaaccatcaaaaagccaagctataacagcacagtgatcaattcttcagaaacaagcagtgattaaaatgaagaggctgataacattgccttttcaatcaatagaaagtgatcagatagatttgtgagtgtcgactttagtgcccgatcactttcttttacgaacatgacaaggcacaaaagtgaaatgatcaacatctaatcacaatgccagtccgatcagccaaaatcatttcactgttctctgatcttttaaggatagtgaccagacatttgtacaaacaacaatgctccgttgttgatcagacatttgtgttaattttttgactcgtctccgatcattttccgtcttcagtgtgctggttgatccatccgatcagtccgtccatccccatgcattttttgttgtttttttttgatcaccaatatggcccgtcagtggtcagctgcttccatgaggcgaatgtggtggacgacaaaccgttgggcgagttccaatcgacacggtacgggtcgtcacgatcgcaaatgccggtgccggcgcagcgttcaatttgcattggcgacgaactgcgaccgtaaggcttaaaattcataattaaaatttaaaaaatatatatttttggtaattattaaaatagagaatgtggaagtgaaagaatgaaatttttagggattattaaaaaaaaggactttgcattataattatatattgccaccaccaaaattatgcaaggactttttatcaatagcaaattttcaaaattatctaatttatttatggctgtttttatgatgtcttatttaattttcgaattatcatttgtatttactaatcaattttttttttatttcgcatattaaattgaaaagaaggcccgacgaatttttaatc

SEQ ID NO: 23485 - DNA, 1500 bp, Heterodera glycines
taacaacagtagaattaaaaatcgatctcagtcttctcgtctcgcaacgcacgccgcaaacaacaccgttaccactaacgcactcctaacgaaacgagtccaaatctaggtaaatcacgatcaaattttcggtttttcacttcatcaatttttttttcaatctcatactactttttttcttcgcctccttttcaaatttccatcactcatctaataagaagctcagaaattacattaatttaatttcttcatttcttcatcatctttctttcagaattctttttcacagagaaccggtttcgggtttctcgctccaaatatagttatttctaattcaataactaaaatttttagttaatacttatcactgttgattttatttttaccatttatttttgattgaatatattatttcattttaattataattacaatatttcattgcaactcaacatgaattcgaacgaaatcgcatgtcttaagcacaatagttgtgtaaaaaatattattacataatttattttgtaataatctaattctgttgttcaatgtatgttaagtaattatgtttcttctatatataatatttatgtccatcctataaaactttaaaatttcatttacatttatttgccttatgtatgacggtcgaaatatcattttgaaaaagtttagttcattgtctaacatactaatgaatgggcgcttttatgaatttatcacgaaaactcattctgatggttatcttttaatgataggaggctttgtaataaatctaagccgatgattatttgctattactacaatacctttttgatgtgataaatatattttatttctgttagtgtttaattttacgccattaagtgttgtattttttgtattttgattatttttttaaaatttacatcaaatgtataactattattgagaaatttatcgtttaaattagataataagttaaatcctatattattaatttttgaaaacacccgattgtatgagattataattgtttaattttttggtattttaaagaatttagtggataaattaattgaaatataaatttttgaatatatttaacttgaaataaattttacaatttattatatttgataattaattcatttgtaattacaaaaccttaggaagattatttttattaggcattataattttcaatatctatatatagctcaagtaataacaaaacaataattttttgcattatttggaaaagttagtcattttatgtttttaggttgagctccggagaacttgtgatttctcaaacaaaccactcgcgatctcaaaacatgtataatattttcattttatttttataaagttttttgccttatatccacgaatatgtcattcttagaggtattttcaccacctgcccccgttggggcgaaggtcgcgggggcggtgattgcgggggtctgagttgataatgatattcatcagacataacaaaaattaatttgtttctat

SEQ ID NO: 23486 - DNA, 1557 bp, Heterodera glycines
  unsure (1)..(1557): unsure at all n locations
gcaatcgcggacagttccatccaatgatgactgctgtttgggggcaaacccgatgagcacatggctaacaaaatttatcaaattattattgaatattttagatgtgcttacgatttcacattaacgacaaggatttcgaagtaaatgatgtcacaattcgtgttaagccatgaatgttttgtgaagatggaacgccaagctgcaagaattatttgaataattgaaagctaacggaaaattatgtcgaattttcaaacggattcacatggagcttttcaaagaaaaagtcaacaattaagaaaaattaaaataattatccttgctttctctcttcattaaaaatttaaaaaagatgcttttatatttttttattatggaagtatttgaaatttcaatttgttggtgaaaattttgaacgatggttttacggtgttttaaaaaataaatgataatttatattatgacaatctgagctataattaaaataatattgtcaccatttccatttgctttgtaattgaccgtcgataatttatcgccaatgatttcgagatcagagtgacgatcattggcatcccagcaattctttttttgttgtttagaaaggcacttaaaatggaatcatttaataaataacgcaattatttaattttatttgaaatattaattttacatttataaaaacggcgggaacattttttaaattccagttcagtttattaacagatttgtctaaaaaaaccaaattgtggtgccgatgctattcaaagtaaagcatggaaacaaatgatcagcaatggaagaaaaggaagaaatgaacaaatcggatgtatctaaaaatttaaaaataaatattatattatttcatttttatttttatattaccaataatttgtccattcttcgtgaaaataatccgtcccgaaaaaccaaaagaaaatgttagcctaaatttaaaaaaatgttttcattttattgaaattggcagtatttttaaatttagtgctaactaacattgtcttagttttgtattttaagaattggcaaaaatttatttaattcaatattatttaattatttaaaaatatgaaaaaataattaatttcatattgtaagagaaaaggaaaatatgataaaatctataattttaagataaattaattcatttctttctgtttcttagaacaaataattttgtttttaatcaaaaattattattttttattgtattataaatttccaaaattctcggtcatcgcaaaatccatgaggacgttttttcacttacagctcattgatgaaattcaaattataatttatatattcaaatcaattttatttgttatcaaataatcatcatcaaaaatttaaatcattgatataccaaactatacgtacnataaaatcaatgaaatttatgcatattttttagttggtaaaagggggttcagttcaattgaaagagatcggacctagacatgatcagaatcataatgaatcttttttatttataataatctaaggtggtgaaaaaatgaaccaactccccaatttttg

SEQ ID NO: 23487 - DNA, 941 bp, Heterodera glycines
agcagcactagcttaacttcggaacttttagtacatactctctgaatgagctgagaaataatatatattttttcaaggtcatgaaaaattcaagaatttttatatgtgcacgacagtatgatatggtactttgggtataatttcctctaagcagcactagcttaacttcggaacttttagtacatactctctgaatgagctgagaaataatatatattttttcaaggtcatgaaaatttcaagaatttttatatgggcacgacagtatgatatggtactttgggtataatttcctctaagcagcactagcttaacttcggaacttttagtacatactctctgaatgagctgagaaataatatatattttttcaaggtcatgaaaatttcaagaatttttatatgtgcacgacagtatgatatggtactttgggtataatttcctctaagcagcacaagcttaacttcggaacttttagtacatactctctgaatgagctgagaaataatatatattttttcaaggtcatgaaaatttcaagaatttttatatgggcacgagtgtatgatatggtactttgggtataatttcctctaagcagcactagcttaacttcggaacttttagtacatactctctgaatgagctgagaaataatatatattttttcaaggtcatgaaaaaattcaagaattttcatatgtgcacgacagtatgatatggtactttgggtataatttcctctaagcagcactagcttaacttcggaacttttagtacatactctctgaatgagctgagaaataatatataatttcatggtcatgaaaaatttcaagaatttttatatgtgcacgacagtatgatatggtactttgggtataatttcctcctaagcagcacaagcttaacttgggaactttttagtacatactctctga

SEQ ID NO: 23488 - DNA, 1636 bp, Heterodera glycines
tacgaagatacaatattaaaggtcaataatttgtgcaattttatttaacaattcaaatgactaatttcaaaaggacaaaaaataaaataaaaatacatccattggacaagtcagtggatcaaacctatcctatctttggatcaaagttattatgaagagggaaggctcacaaatgaagacaaatcggaaaccaattacaacaaatctacccaaaactccatggacacttgaggcctctcttttgttagaaaattaatgttggagccgaggggaatggtgagggtgggatccagggacggtcccaggatttcggcttccgcctgctcaggcggcgacttgcctttttttctcttcctctattatgttacccttttctcactcttctctttatttctctctctatcatattgttttctctgtcctccttctctttctctcttcttcctcttttatttcctttgtcttacggaccaaaatatgtctaaccaattctatttcatttttatttttctcttccctcccatgcatatttttagcattgagaaatcaataccgaaattttgaaaaaatggactgacatgaaacaaaacgaaggaataggtaatggtcatttatttttatttgtcttttttctttttcatttattcaatagtaacatttttatataatgaaaacttaaatttaaatctttttttagagtaccaaaactcaaaaatgtcaatttcgaccaattcaataaattgtggagatgattttacaccagcagaaaacaggggtaaaggaaatgggagaaaaatttaaattttgaatatgaattaaattaaattattctaaattaaagatttaatttatttaaatttcagaagtgaatggcgatgcaattagtttggaaaatgatggacaatttgatggaaacagtgaaacgatcactgatcaacaacaacagcttaaggtgggcggaagaaaagctaacagaagaaagaattggagaaaaattgaattaatgtgagacaaaagcgattttgttaatttaaattcaggaatttcatgaaaagtttgccaaattggaaacggaattgaaaatggccaaattggaaacggaattgaaaatggccaaattggaactggaaaatgtgagtttgctataaaaatttgagtaaattataagtgccaaaattttctaattatttttagaaggcactaaagttaaagcaccaggaattggtaggcgaacagaaggcattgaaggaaaaagtgatcaaaattgaacagaaaaacggtaggtaaaatgaaaataaataaagaaaaatatatttttaacaggatcattttttacgaaaagaattataaaaatgtttaaatttagattttaaaattaaaatgtcatcattcacgacttcttcatcggccgacgaattttctcctctccaacgtaaatttttttcttaaaatgcataattaaaatacaataataataaacatttttcaataattaaatttgctaaaataaatttttttttttaaattaatttttcattttcagcaatttttccaaatctgagcacatcggaggaaatgagtgttctgattgcccgaatttctgagctgaatcgagccaaaacaacggagccatcaa

SEQ ID NO: 23489 - DNA, 1495 bp, Heterodera glycines
aaatttatttgtttattttcttgatgataatttttgattttgaaaattatttatatttttaatgactttggcaaaatgtattgttttttgaagaaaattttcgattttacacccataaattcggaactttttagcaattatttacccatttttagtaaatattttggggtttttataaactaaaactaattatttggcagtttttagcaactataaattggagtcctagtaattatgtgtttttttgatttaataaataaacgtcaagagcttattttgaattgctttcttttctaattatttctgtgaatttttttatttaattcattgcaacatccgtaaaatttagtttttatttatttagaatccaattctaatgctgtctcaacccttaaatctaagattatacaaaatctaaaattttaaaaatttgttatcattatcacagaaacatttaaacttttatattagtaaataatttgatattcaactagttttattttttaatgttcatgcttattattcttattcaattatatataatatatgtttattaatttttaaattaattttttgactcgttgtaactcattttctggcatgcgatgaatttgtttttattatcgaattaacattgtaacatttactctttcatttaatataataaaatttttaataattatcattttctttttgagggttgttttgaaattttttaatgcattattttttataatcaaatttctaaagattgttttaattaataaatttcacattgattcttacaaattgctccaaattatgtttttctaatgaattattataaaaaagaaatttctcccaaatattttattgtctgtgctcttattgggtcaacgaaattttctgtgcgatttttctctttgccagaaatctcttaaagtttgtttaaaagtaatctttattttttaatttgttttaataatatattattgggttaatttatataattattcgcgctacatttttagttgtaattgctgaattaaaatttttaattcttattttttttattccatgcattctccatctgggaaatagacgttaattgcttgcggtcattattccaatgtgctcattagtttaaatctttgtcatttccgatagttaatttagattctgcttttaaatgattgttttgtaaaatttgttctaactctcacgatatttattatacaaataagcttctattggcactattaatttgtattattgattttaataatctcaactaattatttattattatcattttttatttgttattaaaaataatgaatttgctagtttgacctaaaattcaaaatttattattaaaatcaattaaatacttaattttaataacttttaataattttagattctttttgaattctggagttcttacgttttaattgaaattattatttgttttattgtgttaatcgtaaaacattaataattttccatttcagta

SEQ ID NO: 23490 - DNA, 1459 bp, Heterodera glycines
ggtccatagtcaggaggatccggccaaacaaagctagaagttccgagcgcaaatgggcatgctttgtgaaataaaatttcttatgattagggatgcaatttatagttgttaaaaactgccaaaataattaatttttagtttctaaaaaccccgaaaataggtgctaaaaatgggaaaatagttcattcaaatttaggggtgtaaaattacaaaatttattcaaaaaaattttcaaattaagccaaatcagtattgagctatatatgtaaataaataaattttggaggcgaatttttgggaaattttttttcatcttagataaatattttctgagattttgaattttcgcttttttgggcctttcgcgtttgcttttcgcctttcgctttttggctgaaaagcgaaataaaagtacacccctaaagaatgggttttaaaataaataaaattttcggagaaagtctatagaatttattatcttttaagcattttgccgaaagcgaacgtcttttttcagcggcgggattgatcataaatgtcttgagaaaacgcttgacgcccaaaaatgctgaaatgttattgtttttgctagagcccgacgggatcgggactcacgcggggtttttacggggttcccggtcccgcatttttcggttaacggggaatttttacgggagcggttatttttagacaaaacaaaatctgacaatgtattgtattcaaattttttccaggcggcgcctatcggcaccgcatgcctccctcctcctcctttgtcccaaaaaagttttttcgaaaaatacgccgcaaaatctgttaaaattaataaagggattcgaaaatactaatttaataaactttttgttcgaaataaattaaaaaaaataatttatttgaagcaatttgaaaaaattttccgattttcgaccccaaaatctaaaatttcgccttttcgctttcgccttctcacttccgctttttatttttatttttacacatccctgccgccagtcactagttgacgaaaaatattctttgacgcgaaagagcccgggtttttcgctttggtgatgaaattttaaaaggtattcggattcctccttccaaatttttttctggctacgggtctaaattagggaatagaaggtttagatgacgaaaacgaaaaatgacggaataaaaaaaaaaaccgaaaactttttataatttttattacgataaaatagaatggctgtgataattatgttacgaataatttaactacgagaaagacgatgattgatgaattggacgagaaagagcggaacggaatgcgaaaacgaagaagtgtattgtttttgtgtaccgttgcactttgatcgagataatcagaggagatgtgctgcgacggcgacgaaaagtgcgagtgttgtaagaggagtaagccgttctgttttaaacgaaaatcagcataaataaa

SEQ ID NO: 23491 - DNA, 700 bp, Heterodera glycines
  unsure (1)..(700): unsure at all n locations
cccccccccccaggaaaacactcatatataaaaaaataataaataaattactattaaatttatttcttttgttaaaaatttctaaaaatgttcttaagttttgataaaatttgatttttaaaattatttttaaaaataaaaaatttttgttttgggccaaaaggggggtaaaaaatatttttgtggggtattttgaggtgctgagcacgaatttgatgtttatttaacgcttcggaaattttagaattttttaaaaattcaaaaatatttttcaaatttttggccctcgggattttgggcggatatttgaaaattcataactcacctcagagaaggtcaattttcatgcaataaagcattaaaaatagcaaaaaataaggagaattttatgggctttatttaaaatttatatctcaaaaaagaaaaaagttattccagaatttctggaaaatttcgactttccagaaaaaaattcagaactcggttctgaaaagttattctggaaaaataaaaagctacaaaaatccgcaattttttgctctataagataaattttatttcacctttttatcacatttttaaaaaaagatataaaaataaaagtgtttttggcatttgggaccaaaggggggagcacatgctttttgagtggaaaaaatttttcacccanaaaatattaaaaacatgtccttaggggtat

SEQ ID NO: 23492 - DNA, 962 bp, Heterodera glycines
  unsure (1)..(962): unsure at all n locations
ggatccaagaggaaangggatcaatcggaagagcaaaatgatgaagaaagccggtggaaggaagatttggtgcgaattggccgaagaaatgatcacaatgaggcctggcgagagtttctgaccacaacgacttccttggacagagaaaaggaagagcgattaaaagcaatgggcaaaattggtttgggggaaaatggccgaagaatggcagagaaaagtatgagagcagcagagaaaacaatttttgaaagtccgtgcttacagccggaggggatgagaaggaatgtgattaatgaattggagagccaagaggagcgagagcgaaggaagcgtttcgccacccggactcctccgagtggccaagcatttgcaaatacggtttgggcggaaaaagattggaaaaaggatgatgagggggaaaaggatgaaaaagaagagcctgtcttcaccaaaataataaaaattcaacggaagttaaaagaagcaaatgaagaattaaaaatgctggcaaaagatgttgaaagattggtcagcgcagaaaaaagcattgccgaaaaggaaaagaaatgggacggttttccgacaaatgtcaacgaatttggggaagcagggacgtccaacagatggagataacacgatgacggaagatggcgcggaggtcgcggaaaccgcgggcgctggacgacaaatgcacgggcacgaggacgacaatggcaaacgaacgagtgggatgtgcgcggacaccagcaaacggagacagaacaaccgagaaacgaaagaggactcacaccatgggaattcacaaaaatggcgggatatggcccgggatattaaatttttttgatttattactgtgtatattgcattagtgttataacacaaaaattcaaaaatatatatattcaaaaaaaaaatgcaaaatacaaaaaatgatatgcttaatcatattgtatgttaaattg

SEQ ID NO: 23493 - DNA, 1526 bp, Heterodera glycines
  unsure (1)..(1526): unsure at all n locations
ttgtgataattgctcaaatttaaaaataatcatcgaaccgtatatatatantggagaaaaaattgcacactaattgcatctttaaataatttttcattcatcataattagtgaattcattcaaggtcatattcattaaaatctttaacaaagttctcaaaattttttccgtgattccccaatttctttataaaaaattgattaaattaatgtttttggctatttctcatgcaaaaaattgaaatattttattaaaattgagtttaaaatgtaattaataaaaaaaatgtttatttttcataaatattttttaaacatacatttcactatcatttacgctttttatgtccaaattgtcttgaattttgttaataaattatgaataaaaatgaagctaacatggtcagacatattcatgtcaaaggtcaaatcttgagaaagtgcacaaatgtgattaaataaattatctttataaatagtcgttaggacaaacaaaaagccattaaatttttttttaaatacaacctaatttaattattaaaaaaccattataatttggtttgttaaaaatcgagttctaattcaatcctctaaattattttcattcttcaaaaatcgccattttctttttgctttctctgttttggccatgtttataattggcgccaaaatagatgaattaacgggagtgatgacattgttcaaccaagcgctggaggttatcaggtagaaaaattaaattaaattgaagattagatcaagcttaagcttggcaaagcatcggggcaaatgcaaagggaaaagcgccgaccaaaaaatgatttccaatgttaaaaattgttggtggcgttgaagcttgaatgtgaatatgttttaggctatttaaaacatatgaatttttccatcggttcttttcatacattcatctagagaggttaaaaaaataaattttgtcaaaatcaattaaattttacaaaatttcatctgtaatcatgtaaataaaaaaaaaacttagaaagttttttctaaaaaattttgtaaaaaattaaattatttttcttgcttttttaatttacatgattatagagccgccattcataggcttatccaaatataattaacacgaattttcatttaactactgctgttaaaatttctgaatgattttaacaggttggacgaatttatgaatggtataatagaaataaaattaaagtttgccgaataaaatataagggtaattgggatatgtactggaaaaataaatccgaatcattaaaattatatatattttttaatttgtacaaaattatcaacattttatgcacataacataaattatgagcctttaattgtgtcatcgaaaaagaagtaccaatagtagaggccaattccattgatcccaaacgacatcaaaaagaacatgtgctaaaagtgttcttttattttttggggggattttttggcatataaatcgattaaagaatttatttttttataattttttttttattaatgaaaaaaaaa

SEQ ID NO: 23494 - DNA, 1577 bp, Heterodera glycines
  unsure (1)..(1577): unsure at all n locations
gtttgcaagtgtgctttgagatgggacgaattgctgtacgcctttctgcatatcggatgggcacatcggtggtgattcagtgtcagcgactggggcagtgtcttgcgcggcttatgccgctcattagatttattttggagggggcctctctccgtcctttttcctcagtcagtgtccatattaggatgcattcctctcgaatgatacatggaatcttatgggtattagattggaaataaaaatgcactgcttgttgttcaccggtttgtccgttgtccatggtatgatgtccagaaagatcagtttcaaaggaaaattgtgacaattctaaaagatagttggacaaaaaaccttaaacaagaattaaacaataaataaacacatgaaaatttgtttaattccatgggtaaagcaacaaaaaaaagagggagaaaaaagttgcgatatttgtttttgtgttgtccatcattatgatgacgacaacaacaacaaattgacacataaaaagttgtgagtgcagcacaaatgcccatttgttttgagaaagcccaaacaaataatttaaacaatagaaaaaagaaaataaaacaaaatggtcaataacaagaaaaaaacagtggatgatttctatggaaaacattttcttttttgttgttgatgttttgacacagataaataaagagagagagaaagcaaagaaaggaaggaaaggagaaacaccgaaatttacattttacaagaaaaaaaagagagagagaaaaagatgatacaaaaaaatacacaaaaatttgttggacaaaaaaacaattttggttgagagagagagagagaaactgatggtgcctgccggcgtatagtatgggtgtggtgtactgtagtgcatgcaccgtactgtgactgaatttgcaacaaataaataattgtccatgagccattttagcgccagaaaaaaaagagagaagacagaaaagaaagtttcggaaaacaaacaaatttaggggctaatgatggctccctccctagacatcacaatatccatcagaactgtttacagttcactctttacagcttcgtctttctccgcctcctttttgtcttgttccacctcttttttgtcctcttccgcctccttcttcacttccgctgcttcctcctttttgacctcttccgcttcctttttgtcctcttccgcctccttcttcacttccgctgcttcctcctttttgacctcttccgcttcctttttgtcctcttccgcctccttctttgcctccacttcctccttatccacctctccttcctcttccttcttttccaccgcttccgcctctgcttccttcttctccgcttcctttgcttccgcctcggccttctttgcctccgcttccgcctcctccttggcctttttggctgccgcttccgcctcctcgcgctgtttgagcgcggccgcgtaatatttnggacgtaggaaacgcacttcgcccatgatcgaatttgtctgaaaatttaaaaatttgttttttttataataaattaaaaacattttcgaaaaatggttcacccatgaaaacattttg

SEQ ID NO: 23495 - DNA, 915 bp, Heterodera glycines
agcaaatggcacttcatttcatccaatggcacttcttttcaccaaatggcacttcacttcacccaatggcacttcattttcactcaatggcacttcatttcactcaatggcactttattccacgcaatggcacttctattcactcaatggcacttcaattcagcaaatggcacttcatttcatccaatggcacttcattttcactcaatggcacttcaattcagcaaatggcacttcatttcatccaatggttcacttcacccaatggcacttcattgaaccaatggtacttctattcactcaatggcactttatttcatgcaatggcacttcatttcactcaatggcacttcatttcatgcaatggcacttctattcactcaatggcatttcattccacgcaatggcacttcatttcactcaatggcacttcattttcactcaatggcacttcaattcagcaaattgcatttcacttcatgtaatggcacttctattcacacaatggcacttcattccatccaatggcacttcatttcagtcaatggcacttcatttcactcaatggcactttattccacgcaatggcacttcatttcactcaatggcacttctattcagcaaatggcacttcatttcatccaatggcacttcattttcactcaatggcacttcaattcagcaaatggcacttcatttcatccaatggcacttcacttcacccaatggcacttcattgaacccaatggcacttcacttcacccaatggcacttcattgaacccaatggcacttctattcactcatggcacttcatttactcaatggcacttcatttcactcaatggcacttcatttcactcaatggcactttattccacgcaatggcacttcattttcactcaatggcacttca

SEQ ID NO: 23496 - DNA, 989 bp, Heterodera glycines
tttttttttttccggaaaaaaaatggaaaaattttccgaaaaaaaatacccagtggatagagcttcgaaaaaactaagttttgggaagtgccccttccgttttttctgggggaaaattcggttaaaaaattcttaaaattcaaaaacccaaaaaccggttttttaggcctagctcgaaaaaatttttgaaaattttcgaaaattttttaaatttggaaaaatcgagcttttaaaacactacaataagtctgctgggcacctttccctcagatcaaacgccgacgcggtattcgcctggtactgaagtgtactttttgagcacacttcagttgccattttctgtaggccagggggtggctctattaaaaaaataaaaaataccagcatgtagaggacactttggcggggtgccctcgcagcgggcattttttgattcgagttttagaaaaaaagttacgggccttcaaacgcaagcaaaagtgagaaattagccgccgggactcagttggccaccggagaggaaaacctatagttttcctgaatgcgcctcaaaaagttgtaagacccttccaccactttcagacccctcccgacagccgttcgactcaaattagtttttaagacgaaaccccctttttctctatatatatataaactagcgtgtggcggcgcagtagttgctcggtgtagacagtatacttttggtagatatgggcgggcgctaacatgagcgcttcgcgcaaaggacttcgttgctagtgcatgctcggcttcaaaattcaaaattttaataggcttatgtttttttcaaaattttaaaggcgacatttgcagcttcgcggcctcagacgggcgcttttgcatccgtttcttaaaattttgttgggcttgcgggcgcttcgcgcccgttttttaattttgtggggaacattcggccgcttcgcggcctcagaacggtcgcttcgcgcccgtttttagactttgtgggg

SEQ ID NO: 23497 - DNA, 879 bp, Heterodera glycines
aggattcggtctccccataaatctgggcgcatcggttcggggggactgccccgaaaacaaaaaaatcgattttttcaagtgtccgtttggggtactcaaacaattatggggagcaaaaatccaacgcagaattaaagtacaggctatagggaagctattccggaaggattcggtctccccataaatctgggcgcatcggttcggggggactgccccgaaaacaaaaaaatcgattttttcaagtgtccgtttggggtactcaaacaattatggggagcaaaaatccaacgcagaattaaagtacaggctatagggaagctattccggaaggattcggtctccccataaatctgggcgcatcggttcggggggactgccccgaaaacaaaaaaatcgattttttcaagtgtccgtttggggtactcaaacaattatggggagcaaaaatccaacgcagaattaaagtacaggctatagggaagctattccggaaggattcggtctccccataaatctgggcgcatcggttcggggggactgccccgaaaacaaaaaaatcgattttttcaagtgtccgtttggggtactcaaacaattatggggagcaaaaatccaacgcagaattaaagtacaggctatagggaagctattcccgaaggattcggtctccccataaatctgggcgcatcggttcggggggactgccccgaaaacaaaaaaatcgattttttcaagtgtccgtttggggtactcaaacaattatggggagcaaaaatccaacgcacaattaaagtacagactatagggaagctattcccgaaggattcggtctccccataaatctgtgcgcatcggttcggggggactgccccgaaacaa

SEQ ID NO: 23498 - DNA, 1918 bp, Heterodera glycines
caattttatgggttaaaatcaaaaacttaattttcttatataggccaaaaaaatgttgccacaataaattgagaggaagcaaaaaaaaaaaaaggcatttctgcgaaaaaaccccaagggaattggcggcggcgaatgccggcgcacttttcacgcttctcttttaattatttataaattagcggaaagggacaaaaaagaaaagaaaagaaaagcagcacccaatgtctgggcaatacaaagataaataaaataaataaaagataaaatttaaattaaaaaaaaacatattcttataggggagttctatcatgaattacatcacgaaaaatgaacgggcgaagtgaaaagaaataattaaaaagaagggcgggggactttagaagcgtgtaatctttgctttcaaatatattaaaacttttttttgcagaatatttggccaaaaagggaaacagcaaattaatgttgaaagtgcgtgccaatggcactctccgtttttcagagggtttatgccttttaaaatccggcacattaatccgttgtccatcacgtgcgatgtctagaccatcttaacatttcattttctaaagcacaaagttcgattccgttactgctttttgtcagagtaaaaaaaatcagacaaattaaaaaatcaaatttaaaaaaggaataaaaattgaaagaccaaaaagttttttttaaacaataattatttttctcttggcaatattttgtgtcgttaaattggcattttttttttttgctttgccgtgggacaaaaaagacccactctttgctcttttgcgtgtcgcgtgaagcgattgtccgtgcccgcgggggccttgttgctgttccgtctgtgtcgcgtgcgtgcggcgcgttactttttcctgtctggcgatctgtctttctctctctttccctcacactctattttctctaaagtaactgcagctgtctctatttcttttacatacacaaaataaactccctcattctccctctctctccactctttctctctccgtccctttctctcccctttatctctccgttttggcaattttgtgcctctttttttccgctcggcacttaacagtgaaattaaatgggcttcgaacgtcacgcggtggaaagcgcaaaaaaaatgtacccaaaataagcatacaaatgagctgcacttgcccttggggggggggggggcgacggagcggaccaaagtgaaaatgcgcggcacggcaaaaagtcaatgaatgggaaagtgtttccgcttcaaatggcacacacttttttatgtcagggggaagaaaacggcaaaaaaaaagcagatttcacaatattatttgcttttgtgttcttaggaatcgaattattggtgttatttatgtgtttgagtttgatgagagggaatgatttttataattcaaataatttttaataaaattatttaaaaaatttaataaaaccccaatagtctggtgcacacagtcaatgctcacaatcatcggtttggtgggaaatcggagggttttttgtgtctgagaattaatggttttccctgggcattttttaatgtttccgtcagacttttttccgtgtgaaaaacattcacaaccttttaacttttgattgagaaatgtgcataaataaaaaataatgtttcttaactttacaacatggaaaacacactttaaataaacattaaaatttaaaaattgtgtaaattaatctctctctcactcccctctctctctccatttctctttctctctctttttgtctaactctctctctctctttctctctctctctcttactcctctctctctctctctttctctctctctcactctctctttctctctcctctctctctcccactcctctctctctctcactgtttttctctctctttctc

SEQ ID NO: 23499 - DNA, 1843 bp, Heterodera glycines
  unsure (1)..(1843): unsure at all n locations
aattttggggagccgagtcttttttgtatcgcttaaaatcaaaaccttgacccttctgagtgtttatgttgttggctgctttttcgagaagattctttagtcctgccttactctcactaacgagagactctttgaggtcttttccctctagcacattggtgagtacttgatttccgctttccattccctgacgtccaattgctgagccaatttgctttccaatcggcagcaaatatctcataagacttctgaacactgcgccaactcccgctccacgctgatagggcaacccccgataaatgttgtatccaccaaattgcacatactcggacgagaatgtggaccaatctacttgtagaggatcaaaatcaacatgcattttttttaaatttgacgtttttacattatttatattctttgaaaattatgctttttacaaagttgtttacgagcttatccggttgcatctttccaaagtgcaaaaagctgacaattttttcaaaggtcattccaacacatcgacaatacaaaaagaaaatgacatgtcgaccacacgcacttgagttgacagactgaaggggaagagaattatattgaatttgtttgtagcgtgacaaatgatccacaatgtaaacactgggcggtggccagaaccccaatgagtcataatactccaaatgcaaaggagaagcgcaatatatgcccacccaatgagaaccatgtgatgtgctggggtcaagattaaccaccatacagtgaggaaatttgacaattacaccggcgggtatttgatctgctgcaaaacaaccaagatagtagtggcgagtcacgttgtttcttgtcaatgttttgttaatttccaacgtgttcatcatttaaaaataggacatttttctaaagtgtaatgttaatgtacatgttccgtattggaatggcatcaagatgccgctattggtacgtatctcaatcagaatttcagaaaactcctttaataaaagtttatgatactgtatggcaaaaaattgttcttcaactacttggtcggggtttccgcgtatggtcactatgcgcaacactggggccgtcacatctccaatcatcattggttcaataagatccggcgtgtaaacgtggaatgatgacacaccaccgctcatgtccggcatgaattttgcctcgttttcagattgaataaactccgtgttgttgaaaccgagaatgtaggcaagttgaggcgagacttgaacctttttaacgtaccgtgggtcggtgttcagaacaaaacgatttctattgacgtcatagttaaattggcaaacaagacgtatctcacggtacgcctgaatccatgcttccgtccccatttcctttgtggcttcaaggatcacacgttcctcttcggtcaaatttttgatttcggcgttcaattttgtcatgcccaattcatcaagaatgttcaaatttttgtcacttaatttcgaaaagtactcatccaatttttcttggtacgaattggtatcatcagctgacattctcaacggtacattactcgttgcagcactcttttcgcgtgccagaaggccttgggccacgttgttgaggtcaaccaatgttccagtatctgtcaacatggcctgtaggagcagctcttcgtcacggacgccccgtttttctttagtctttcgcttaatgtactcttctctggcccatcgccgagccttgtttatcaaaagcatganagaattctgtngtgatcgtaccttttttgctaacggatcacttccctcacccaggagcctgtataaatttttgctaagctcatggngggtttgtgacatttgat

SEQ ID NO: 23500 - DNA, 820 bp, Heterodera glycines
ttatgctgtatcattgtgggcaaaggtatagattattggtcccgaaaaattctttaaataaaatttgagaaaattgtttttaggggtagtcttaggcgccgagcacgaatccggccttattttggctgtttcgaaccccgaacccggatttgaactaaagttcgagaattcaattttttcagttttagttcaaagcccggctatatacgtggaatcaaataggcacattaatacctcaataaaaaaattatttaaactacttagggtggaacataatttttgatacccaaatttttttaattaaaaattttttttttaatttcaacaaaccacaatcatgattcaaaatacccgccattattatcaataatatgttgccattattctggcaagagatcaataccaatggaaaagtatttagggagttagagtaagtaagtaaaaattgtcattttataggtacgtatttttgatggctgatttaaagaaaaataaaagagatacagagccagagaaatagtgattaaatagagcaaagttaggactataagaacacaaaaatataaaattttaattacaaaaattgaattattggagagctgagactgaaagtggtctccaaaaacggcatttttcaagaccaccaagtaacataatgttttaaaagtggttttggaaattctgaatttaattaaacaaggtaaatcgggtatgttgagttcgaatatggtcttagttttggtctctgggatcgcaacaaacctgtacagctcgaacttcatgcatggagttggagcagtacaagctcaggtgaaaagat

SEQ ID NO: 23501 - DNA, 1703 bp, Heterodera glycines
  unsure (1)..(1703): unsure at all n locations
actgaaaattttcaagatcagcatttntagattttggcttaaaaatcagcatttcaaaattttatcccaaatgattaaaaatccacaaaaatgtttttttgcggcgcgctttttctaaaaaaaaaaaaaaaaaattttgttgaatttggaaggtgaggtgccgatagagactatacatatatggcaatttttgaggattttcaaaaaatccagcgaatttttaaaaatttgaatcaaaaatttgatgaaaaaagaaatttcagtgactcataaaattatttgttaattaaaaaatgtgaattcgtttaaaataactgcttgattttgtgcaggtgcgcgtccgtgccggccatgcgaacacacgccagtacatcccgaagagtgcgcggtccaactcgggccagtgccgcattgttgccaccaatgagaagggcacggcggagacgcgtgggctcatatcagtggttgaccggcccgaccccccagagggcccgatcacttatccggccacaacaaagtgagaaaaattcaaaaatataaaaatattttttctttagccaattttttcatgacaaatttcagtaattttaaaaaaatatatttttttctggcgtcgttttgcctaaacgtactttcaaaaaaaaatatagttagtttattatcagtccaatcaaaaataattgagaatttatcaggattcacacatcaattcggaatttatggcagggtgcaatatgtttccatcccagaaaaaaataataatttaaatactgcaaattttcctatacgtttttctagtagaatatctaaaaaaaattcttaaacatgtttttttaagaatttttctttgaaattactgtaaaaatctttttgaaataaattcttttgagaaatgataatatttaaaaaatgaaatttcgagcaaatttataaaaatttaaaaaaaatgtgcctgatttttcttttgcaaataattatcaaaaaatgcctacctatgccccttcctctcaggcattccatcacactgtcctggcgcccgccaaaggatgatggtggcgcagaactaagcgcctaccatatcgaattcaaaggattggacgaacgcgactgggaacgtgtgccagatcacgtgacactgccgaactacaccgttcgcaacttggagaaaggcgctcagtaccaggcaaaaattaatttaaaaatttgaaaatttcgtaatttttaattattattttttaatttttctttttacagttccgcgtctttgccgagaatatggttggcatcagtgaaccgctgaatggcgaaccggtgaccgccaaagatccatttggtcggtttttgatgagaattttttgattaaaaatttatatttaaattttttaaagaattaataacacataaaattttaaataataaaaaatgttttttcatccatttcttttaaaacaaatataacaattttattttattgtgatttcaaagattttgataaaatatattttaatattttttcaaatttgaaaattttcattgaaatttaaggttgattttaaaaaaaaggatcaaaattagcaaataaaaaaattatgtctacaatttttaaatatttcgaaaatttatttttatttatttattatattaaaaaaattgcgttttctaggcccacccggtccaccttccaccccggaagtgacagcata

SEQ ID NO: 23502 - DNA, 1724 bp, Heterodera glycines
tttctaaaaaaaaaacaatattggacataaaatttaaatattctacaatttttgggtcgaggtaggcgaacacttcgacttcagctttttgccgtgcggttatttctgccactgttggaattggagaagtcgagtcaaaaagtttggattcggcagtttgcgaattttcgaaatccgcaaaaatgtcaaatacaccaacaccatcacatcgatcagtttcatggcatggtgattcctgcagttggttctgaaaaactggccatttttcatgtgaaacacaataatataacttcattcatggcaagcttttctgcctcggaaataagccaattaatatagtcgtcgtgccgcgttgtttcaaggtacggactcagtttaaaccgcgggtaaagcaaagtcgcaaggaccaggtcatgattgttaaaccacgattctcttttgacattctgtcgtgcatcttttttttcctccattctcttattcaaaccgtcaatgatcgcttttttgatagagggaaaatcatttttgtccttttcaagagcgtgtatgatcactcgaaaaagtggaataattgttgaaattgttgtacaccgcccttggattagattatttgcattgaaaattggagccaaaatctaaaaattttcaattttatgggtttcaaaagaattttaaacttcttttattgccacaatggacgaccaatcgccggctgaaaaggctggtaaatcagaatatttcatgctcatcagtttgattgttggcgcatttgtgataaatcggtcaagcatttcatacgttgagctccaacgaacctattttttatgttaaaaatttaaaaaatccctaggagacctccatttcctttattaacgtgagctggggcaattgctcaagcttttgaatttcttgaaattcttgacggaacaccgctgattttttgtactttcgaataaatttttttatcctctcaaaaatatccttcatttctgtgtccgaagttaattttcgcattccatcccaaatggcctaaatttttacttcataaaataagtaatatgcaaaaactaacaagattcaacttatgcgcgaagcagtccattgatcgcaatccaaggtcatcaaaaactttaaccatgacctccgctgcgtctctaataaaaatgaaacttttttccttgacactaaactcttcgagtgcttctcgaatcagctctttcaatgcaggagcattgtgccggcctttgatcggttttgccgcaagcaaaacagatttttgacggcttttgatgagaaaatgtgcagtcaggcacaaaagagaatgagcgccgtccgtcgatgaccaacaatccgttgtgtacgaaatatattgcgcattacgcaactcagtgcaaatacggtccctaaataattataagaaaataagaattgaacgaccaatataagttactttaaaatatgaaaaatgttcggcaacatcttttccgtaaaaaattttcgacttggaatatggtattccggctgaagctcgttgatcaatcgcttaaagccaacatcttcgacgacggaaaatggctgcaaatccacggcgataaactccataattattttatgcacactgcttgctctttccccgccccatttcccatggacttcttgtccaaattcgatcgatcttcggctgttcatcgagctttttgggcaacgaaatcgcttcgatttcc

SEQ ID NO: 23503 - DNA, 704 bp, Heterodera glycines
aaccaccgaggcggagatttccaaatttatttttctttttgactatgtaaatattattaattttgaccttccaaaaatttgctaaactttggattttgactagacacttttacctataaattttttcttgaaaattgtttttccaccaatttaattcataggagcaattttacaaacttaaatgtcagtgcgtatatctaatggagctggaaaaggatacgtcggcacaatttatttcatcttttttgaaccaatcatttccgatgtaaaagtcccaaaaagccaaacaaaaattaaattatcaaacgaaagcaacaaataaattgtaaggggcaattatcagatcagtttccgtacataatgatcggtcatttgtcaataattcattcactttttcttccgctgggcccaggattcattctcagatgactttttgcgtttttgaagaaaattcatttccgagaaaaatagaaaccaattgtgtagaattcctcttttttaattaggtgttgacttacagaagagtgcccatttttaaggaaaatgaagcatataaaaggcagaggaaattgacagttaatgtccttttttgcaatcataatttaccgggccaggacgttttcgcgtggcccgttttcgcgtggccgttttcgcgtggccgttttcgcgtgagggacgttttcgcgcggcccgttttcgcgtgg

SEQ ID NO: 23504 - DNA, 2450 bp, Heterodera glycines
  unsure (1)..(2450): unsure at all n locations
caataaaattatttctaatattctcgtgtttaaaaatttctataaaagaaaaaannagnaagacaaaancaagatggcgcgcctttacagagncangnaanacccgcacgaaaaancaaggnggacaaacaaccgagggggcnnatgccaaaccacggcccaggaaaaaaacgncgacngcggcgagcaacgcagcacccacaaaccgaaaagngccgnaganatcaatnaactggggacacaaaaaaacggctgaacactcgcgcagtggcgcaaaacatacccgagaataccattagggtggggctttagagttgccgctgtccctttacaatttaatcgtttttccttcttttagaaaatactctttttctctgtttctctcctctctcctatagtgaatgcgcatctctctgcccagggggggggccaagatttctgtcccaatactactaacattttaaaatgaatatatttgttttttagttgtaataatgtaattcaattcgacctttaggttatgtatttagaatttttaataaaaaaatttacatttaggtctgctttcacattacctaatcgaattttgcaaagacaatagtaataataagttaaattaaataagattgaatataggcaaatttttaagttaattatttttattaaaattattaaattgtataaaaatcgtaaatttattaaaattaaagctctatattatttgtttatttacagatatataagtaaattatgaggaaaaattcgaatttagaaaaatgctttaatatataacttatttttattacgaatatatttgtttatattcatcttatatgttgaaacaggttcatcttggcaatggtcgcgtaaaatgaaaggcctgaaatcatattttttaaattgctctcaatttatatatttgttaattttcagaaatcatatttaggccataatttatattttgattaatttttactcgtaaatcatattcagcaatttcttgttttgaaattaatttaaaataataaaattatttaaaaaatttttttatttaaaacaattattactgaaataacctaaaattttcatgattgaaatattttttaattaatttgataatgaatatttttctaattaatttgataatgtttaactgtttttgcattttcagactattacttatgataaattcataaacctttatttttcaaaaagaattttttattattatcaatctttatttgctaaacgggcgttcaagttataaaaattagataattaattctaaaatacaatgatattaataaaattattaattatatcatagaaataaaatttctaaatgctgttgtcgcaaagatcggatttaataagttgaagttgcacatcctatttacttgcttctgcggcaacaatcaatgctgttatttgcttgtggacccattctttttatctcattttgaatttgaaaaaagtttcttaattacattattataaattaattctacaatcgcacttcttgcacgtttcttaatttgtataaaaaataaagtatatcttttgagtgctataaaattaattacagaggaattatacttaaaatgtttaaataaattttattacttcatgttaatgttaattattgccactgtaattgaatgtatatattcaacatgattattttaatgtgctcttcgtgggcagtctcactttattttcaattaatttataaaatttgaagtttgtatttctctgtggaatagaactttttgctcttacgatcattttttacaagtcggaatattttttgttgaattaatttattcgaatgtttattctatcatttggatgaaagcccttctaaatcaatagaatttttttcatatatttaggattttgacccaataccgaattaaaaacgaaaatatacaaaaacaaacgcaaacaaatgcactcttttaaattcactttatttccactaattgcgtccaagggaaaaaggcgatgaagcaaaggttaatgccagggctaggatcgggcaacctccctttccaaggaaggtataccaatttccaaggacataaggggaaagttccattaaattcaagcacatttaaaattttttatatatccagggcgcgcggaaatcaaagccttttatggccagtcggccgttgggatggaaggggtgtaataaagcgcaaaaagaggggggggggaataataataattgtaaaataaagggattttatttgtcgggggaacgaagagagaaaaagagtttttattgttaatttttaatgttattttatattttgcattacaaaaactaaatactctagttaatggagattatttcagtttagtatttttttttgcaaaaattaacgcgaataatttttttaaaatttttaattaactttctgaaaaattcagtcttttttttttcc

SEQ ID NO: 23505 - DNA, 1637 bp, Heterodera glycines
aaacaaaaacggccgtaggcccagtgggagtggtcgaacagccggtgcttggacaatctgctgatcaaaatgttgcttcaacttcggaggaaatgccatccgacacttcttcgacttcggctgtcggggtttgagggttgaccgtccccccgctcccgttgcgggggcgggaggctgtctacgccatattttttgattatttaaaaaacaaaataaaacaaactaaaaaacaaataatttgcaaaacaaaaaaaaaaactttttcacattaataactttttgggtcgaggattagtaatttttgccaatgggccaatttgttgagtaccaaataaaccactaatctgtaatcagggtctacggcccccaatccccccccccttttggtaatcccttaaagtgaattggtgaatttggggcgctgaggaatttggacgctcgcgctgatgctatcggggccaattctgtgcgatggcgtgcccttctgctgttagtctccccattggctgatcatcccctccggcactgttctcgcctaaacaatttgcccaccaaacgacgccctgccccctcgacaatccgcccaaaacgacgccctgccctcccgacgatccgcccacccaacgatgccctgccctcccgagcgagtataaaagaaatgatgagccaagactttccgttgcctttttgctttttactcttcatttccgtctcctacctatcacttttttgtgcttcgacgaccttttcctctgctttacaaaacccaaaaaccacttatttttccttgcgtttccattcgtttttcgttaataaaccccttttttttgtggtgaagtcttgcctctaggctttctcgctttcgttggctttaccatttccccctcgttcccatcgcttctcccccccgtttgctttccccatttttgcacccttttgctccattggcttacagggactcagtctcaatttgaacttggctttaccatttgttggcttgtcgggacccaaatcggaacccccgggccattttctccttttcctggttggcaaggcatttacccccttgtccagcacaccccggcttcgtgaaattctgatgacccaaagcaaaaatatttcaactccattggctgaggcaaaaaattaaagacatttttattctaaataaagctttaaggtttgtttttatccacaagtttccgaggatcaaatcgaactaatcaaagctgaactgaatccggtgattattaaaccaaatttaacaacaacaaaaaaagaaataaaacgcggattcaggttttactccgtacaatcatcaaaaagtttgtgctcgaggaaagagttttcgtcaacgaaaattggtttaaaaatattgctaattattagggcgcgtatttatacgcattttttttggtaattcgtcgcttatttagtaatttcttgcgggaatattccctacgaatcgaactgttggaaagcgagaggcgcgactccgccactcagcatttgaagggacggcgaattttgacggaattggagcggagatttgggcgacaaatggccatgacagtggcaaaacgctacaaagaagtgcgggagtaccaacagattcagcacaagttcgtatttggtgt

SEQ ID NO: 23506 - DNA, 1374 bp, Heterodera glycines
caatcatggtcaatcagcaaaaccaataataatgattaataaaaaaaattcgttttttttcagattacgccttttgactggttttttgactgggtccgcctctacagaaactccctcaacaatgacactttgtttcttttttcaaaactatttttcaacgcattggtgtcgcttggctgtctgtgcattgtcatcatggaaatgttacgctctgtggaagaatatgaagtgagtgagcgcaacgcgtggccaccacagcaaattcaacttgataaaatcgcgtccaaaaaattgcttttaaattgaaatccgttcggatttttttgatcaaattgagagattattacatagtttttttgttccttttgtcgcgttaattttcagtgttcgcacgtgttgtaacaaattgtgtcgcataatttgttttgaattttttaagtcctcgggcattttactggccttcgcttctgtcttgttttggggtcactctgttgcgttctcattcaatttgctgttcttttggtcgcacttttggacttgcttcaacttccgtgcggatcgcacaattgtgccgtttgacactttggtgagttttgtttttgtttttattggcatttaaattttcgcgcatatcccttcttttaaggtgctcagcattgtcatggtgtgtttgtacgtcttcgagcttttctacagaattcgcgatatcgccacgtatgccatcgaagaggatgatgatgatatatgagataaattggattatgcattttcttggtaaattgttgttattccattgcatttctgttgtacccgtatgcataaaaatttgatttggtgacctgctttgagtggtgttataaaaaaaaccaaaaatgtcaaaccaatttgggatgtttttgcccgtgaaatttggtccatttttgcgacaaccattcgccaacagttcatttccagagcggtatttctagagacattggccatttggacaatttcgtcgtctcatttcaccgacaaatctctccaatcattcaattgaaggctgtcgcccaattgtccctttccgcgacgtacgattgactggcgagggctgatggaaaatttcgtcaaaaaaaatacagtcaggtgtaaaactaggtaggtaggtatgtcaaaaaatctgaaatttttgtcgattcgacctcgattttggcgtttcgtcccataaaaacgaatcgagtaataaaacgatttgttcttcgtccgcctatataaaggaaacgatttgaagaaaatgctctcattttttgcgtccgtcagtattttcaccattgttttctatttgccaattgtgtcaaagcatcgttctgctcctccatctatcacagcaaacggaag

SEQ ID NO: 23507 - DNA, 768 bp, Heterodera glycines
ttcgaaaatgcgggaacgtatggcgcaattttattaatttattttaatttaaatcaatttttatgcatattaattaattaattaattattattattaaatttaattaggcaatatgttaatattttaggccgagcaccggtttattagccgatgcttttcaggatgatatttatcaatttttcatcggtggagtttacagcatttcatttggttgcatttgctgttatgtgaccatttttttgattgtcaggcttaaaaaaagcggtaaattcattggcatttgtcttaaagtgcctaatttaaatacactatacatttgttacagtaacccagcaaacaaatacccgactgttacgttctttggtcatcattttgtccataaacattggcggctatttgggcactttgatcatgagtcagcttattggaaccattggccaagtgtatttgtgagtttttttttctttttttccaaaatttaaacccccaaaggtccccaattggagtttggcaatttactttttgtgcttacattcttttaaatgttgttgccggatcaaatgctattgttctttttttaaacaggtccaaatttaatttattaaaatatttaattgctgatttaatttaatttaaaaaatttattttttttcatttaaaacttttcattaaaatattttttaagcacagaatatcgtcaattgtttaaaaaggaattgcgtgcagtgaaagatcatttctttaaaaggaatggtaaaaaatatttt

SEQ ID NO: 23508 - DNA, 1187 bp, Heterodera glycines
ttgcatttgtcaaataggtaatttaaaaaattataacacgtaatagagtatttttcaagtcaatattgaatcttaaaacaaattggatggaatgccaagagatcaaacaaaataacgcttcattcattcattcgataatctgcacttcttcttcttcgtcgcctttgtcacttttgctgcccccgtccgtttccattttggcacttcgttcctccattttgcaccgttttgtcatcaccgtcgtttcgccgttgaattggctgcttctgctgctgctttcgttggtggtggtcggcgagccgtccgccggtgggtcgtcgagactgagttcggcgatcggaatggcacgcgtcacttcgccactcgatgagagagggccaatgagagtgctgagacacggaatttggaaagagtcaaatttgctagggatgaaagagtatttccgaagagattttcaagaaaacccaaaaattagtgtaaaaaatgtcaaatgtttaacaaattaaaattcactccgcaattcgcgccgcctctctcagcccggaaaggaatgcgccgtgaacggaggaagggtactgtcggtttgtgtgctcgccggcgaaaaacacccggggcgctgtcgacgacgcgtcatcattggggtgaacgggacgggccaaagtgtcgtagtcatccgctgaaagaggcaaacaaattaaaaaaccaaaatgtcaattctattttttgagattagtttcatcgcagcaaaatatatctgctggtcataaattttgggacatagccaaaaccgttaaaaaatcttgcattcgtagctaattggaatggactattaaaacaaaagctgacgcgatgagttcactcccatgtaactgtacgagccgcgtgcaaatttgtccatgtgccaccgcgtcacaatggaactgttgggctaaagggagcgaaagcgatgcaattaaaaaagacctttgttaaatcgttaattatgttgaataatttggaatttccactaatgaacattggattggaagcgtcatggaattgcattttttgggtaattgacatgttcggagcaagtgattacttgatgtagcttctctatgtggcaccttcggtgtatctatatattccgataatgttgtacagtgctcttcctcgattttcgcgtgatgatatggtcgtcagggggg

SEQ ID NO: 23509 - DNA, 1420 bp, Heterodera glycines
aattcaataccacagggggaggacatgattcccgagtgagtaaatttttcaccacaatcttccgaaattattatcagcagttctttaagtcgctgatcagtgatcactagaatataatcagaaggatcttaagattcgttaagacctaagaattcatccgtatcagttgattctgaagggatggcgctggtcaggttcggatcctttcgatataattttttgtgcattttgggtcttgtaaactttattgtgaatttttaaccattttcgtctgcttcaaaagttgcagggccttaaaaatcagaaatttttttttggcgccgaaacgaccctggcgccgaaacggcgtcgccgaaacgaccctggcgccgaaacggcgtcgccgaaacggcggcgccgaaacgacccgttcccctatttactgttttcttctattcccggtttcgcatatactatgtagtataaaaatgtaatattatttttacttttattttacatcgcgataatcgatttaaaatacatattgattcactccccttaattagtgactgtgaaactgaaatgttttaatggctcagattgtttagtttttagtcgaattcgagaaaagcaataattttctccatttatccataagcagcatagaacgcgatgagcagcagtggtggggcattgagttggaattcgccctgctcgtcgacagtcggccaacccaagcagcagccaatttcttcgtcgtcattttctggcaaacaacgccattcgccaatctttcagcagcagcgagtgctttcccggcaccatgggatgccattccaacagctagcagacgaattgttggcattgatcacttccaattgcaaagatgcggcggcgaatggagcagcctttgagaaaattctaaccattttgaagcaattaaaacagcaattttagagggcggaagaaacccaaggcaaaaagtatgtcaaaacttcgcgtcaggatcagtcagccgaggacaactcagctttacgagaatttacaaaaggcaactcgtacaatggcttgggcctaggcttaagcttaggctttaagttttattgtacggctgatgtgagttgtcctcagctgactagtccagaagcccaaaactttaattccttaaatatcatctccatttaaggcaaaatggccttcagattttgcaaaatgcctacgaaattctgaaccatttgttttttctgaggagtggcgctgtctttggccacaattcgttggcgctgcacgtcgaccgaactttgaaagcgctcaaacagacgacgtcactttcccacgaccaatacgtcggcccggtcaaggccctggagaatcgtaaattgcaagtgatgttctgtgagttacagcaccttcccaggtttccaatttgaacccttttttt

SEQ ID NO: 23510 - DNA, 1151 bp, Heterodera glycines
catgtcaaaaaacgacgacgccctcacaaaaaagaaatgtaaataaaattgaaatttcataaaaattttttccattttttcagctttatctgcggtgattgttggcttttggtgttcgattttcttgcgccttctcagctgggccttggaattgcactgatcaatcgccgctttgaccgtatcgtcgacgaacacttcaagacacgcaaatggaaattgggcaaaatgcgaatttgccacaaaattggaaagaatggcaccaagcaaatgcaaattgtcaattccgatggaaatccattgccaattttgcaaaatccgctgccgaacaaagtcgtcggattccgaggcattacaatcgcgtaaaaatggattagattggaaatgttttatccacattttctgcttttcagttacatcgatcaaaatgtcatcgcatttctccgccattttcaccgttttttcgccgtttgttcaacggatttgtacgttatcactgaaaatgttcgcatttcggaatttattttgttcgacatttggccaacgcttcgcgatgccattcatgtgattaatgtgacttccatcgtttttcgccgtttgcgccaattggtcccgtcacttctcaacgattgtccatcccttcgcggtgtctctttctgtggcggcagtttgcccgaatttccgcccgatgacagtgccaatgcgtcggatggccaagcggtgaccaaatggctgttctcgcctcgtccggatggtctgccgaagtttctcagatactctttgaatccaccggtgattcaatggtcgtcaacgatgaaacagattagagcggtgattatgctgcatatttaaattggtttttctatggttttttgtccccttttaaggcattttccaatgcttcttctccggttacttttctcatttattttcactttcggctgttttctccgttcatggagctatttgattggatcaacgaagtgactggagagaaattgacactggaacatgttggcacagatcgttatctgctcacacgttgtccaattggatgggatgagcgaaaatgggacaatgcgattgacgaactgaaaaatcgaacgaacccaattgatatttggatcgaagatggcgcattcgacaacgggtga

SEQ ID NO: 23511 - DNA, 1602 bp, Heterodera glycines
atttcggcatgtactcttttgcgggggttgcctttctgcaccgatacgctggtggcacctgttggcaaaagtagcggtttggtgcgtgcgagtgcgcccgaattaggagtacgtaagaaaatttctggggagaaggttttgtgtatcccttcctctacatacctttacaaaacacagtaaatttgctgttttaccttcaaaaaatgattttttttttaaatttatcctaaacaatgtcaactataatttaaaatttcaaaaggattggtactatcactttatggaagcttgtgagatggattcgaaaacgcgacctcttctccgctacattgacccgaactttgagaacgatttgggtgagcaattataattcaccaatataaaaaggttgtcggctttgctggtccttacggttacttcgacatttatgtttcaatacagtaattcccgattaaattttacaaattttaaaaattttcagtttgttggcgtgcacacaaagaagtcgaagcaatacgagtgccaaattgggaacagaacgtcgcatttgtgaacccaaatgaggagccgacggagccgcgtgacccattgaaatactcggaactccggaaatttcccgggggtatgggcggtgtccctttgctcgttatttttttgttttgtttcttagatttgtacttcgagccggacccgtaccaattgcgaccctaccaaaatgagctggtagttcatgcgaataagtgagtaatgcatgagttaactgtgtaaaatggatgaaaattagagacaattttttggtggaaaaagccatgaattgccatgtttttcactttcagcggcaaaaacacgatcatttgtgcaccgacgggcagtgggaaaacaattgtggccaccgatatcatccgaacacatttgtcgcgtgccaagcaggagggatgggtggcacgggtgaggccgaattgggggaggggggtaggaggccacgtggccaaaaaacagtgactggaatgggcatttaccaatccacaacccgtctccgtatcttccgttatttcctaccgttttttcatatgtttgttgttgtacagtgcgtgatgttggtccctaccgtaccgttggtggaccaacagagctgcgagtttgtccagtacttggccggtagctactgggtggatggcttctcgggctgcgagaattgtaccggacgcgcccagcgcgtgttggcatgcggtgggaattggcatattttcttacgcgttgttaaatatttcccctcttccccctctcattgtcagatttgtgtgtgatgacgcctcaaatttttatgtaagtttatttgtttttttggggttttctgtcgaatgttcccataaaaaaggacagaaaaaaacgttgactaattattgtatttaattaattgttagagggttagggcaattttttttgttcaaatgatcagcaattgaaaatgccttttcacgtttgaatgggtcccggggcctctcaccaaattgcgtattttgcgttcaaattacaaaattggagtccacaatttcgtgcttcagcaacatgtaagctcggtgctcgagtcggaacgcctgt

SEQ ID NO: 23512 - DNA, 1710 bp, Heterodera glycines
  unsure (1)..(1710): unsure at all n locations
agttttcaatgtgaaaatgcaccaatagtgattgactttgggtaaacttaaaattaatatatatttaaactatttacttatttgcgttttttcgcatgcttggtcgagtggtagttctttcggctcttttcattatgtttcctttgggtcagttcccatcaaagtagttgttgcttttcttctaatttttcaaaaatattcattttttcgacaaaaatttaataaaatttaacaattaaaatcgcaaaattttttcattttggactaaatctgttaacaatgcactaaaaatttcaaaaatttcaccggcggcgcctatcggcaccgccggagctcccanaatttcctttatttttgaaatcgactcaaaaaccgtgaatattctaagaagtataaaaatttacaaaatatattgctcaaaaagttaattatatttatttatcgaaaagggttggttggtctctagaaactagagaccggcgcgggacgggatcccgcgcgggattttgcgggatcccagtccgcaatcccgcattttttgaaaaatttccgatttcttgcaccgcaaaaaagtggttttgaaaagaaaaaaaatagtcaaatttatgaaccgttaataatttgatttccgatcaactttttaccgtcggatccaatcgaaaaatcttagtcgacccatcagccccttttaatgcatcccgccagcccctaaaaatttattttcagcattttttgatttttggaaattttttgaatttaattgaaattttttcgaattttccaaaatcccgcaatcccgcacgggatcccgcaaattttaaatgcgggattttcgtgattaattccgcgggatcccgtcccgcaaaaaattttgagttccagtcccgcagcgggatccgcaaatttgaaattttcggtctctactagaaactgcgtcaattgattaaatttgatatttaaccgaaattatgtgatgaaaaaaattttggaattaaaaaaaaaattttgaaaaaacttcggcttcggcttcgaaaacttcgggttttttgggcttcgagcttcggacttcggctttgaataaaaattgggcttcgccttcggcttcgagtgctaatttgtaagccgagcttcgcccagccctggtcccgatcaatcccgataaatttaaaaaatagcttggattgataccgaggtcgggatcccgaatttaacccgcgggatcccgaaaaaatccctcgggatcccgatcccgtccggtttctactgcgtattcaagttccccgaatcaggctgtacgcgtgccagctcggcatggcccaccccatgcctagctgcaagtgatccctggccgaaactgtttgtggaaaaattactcccttctgcagcatttttattttctaattaaaaatttttagaaaacccaaattaaaaaaaccacaggcataagatgccataagaaaacatacacttgggggtgctggtgttgcggtggctgcatttgctccactttgacagtggtttttctcctctaaatcgcatgaaaacagattttttctacaatattttgtgcaattataaattgagtcttgccgccccctccccggtccccgggggtaagcttttaattatttttggcaaatccgtatcaattccaaccaggggtgttcgaaaatcacaaaaaaaatttcgtatacgaaaacgaaacgaaaa

SEQ ID NO: 23513 - DNA, 1795 bp, Heterodera glycines
gggggggaagaagagggggcgtccgaagacagcttttgctcaagctcattcactcataatcagaagaaacatttccaccggaaagtaaccgcacacaaacaaaaaacagcaaaagagaggataagccaaccaaaaatggtaatgatgccaattccgtcactacaactgcttttgccatttttgccaattttaatgtttcctcaccaattccattgtgatgctaaaccgtcaaaaatggtaagattttcgtgtaaattaaatgactgtttatgggcgtatattttagcaaattcgtgccaagcgcgactttatgccacccgacaatccgggccagccttgcggctgcgcatccaaatacgcgcccattaattgccgctgcaccagcgcatccggcaacagcggcgaattgctgtgccgttgcgatcgggcacgaatcccgcccataaacaggtgaagcgattagcaagaaataaaaaagtggcacaaaaattgaagcatttcttaatttgaatatatagagtagtgctaatgatgttcgccaattaattaatgtaattaagcaaaacattggaatttttaagggaagacagcagtagtggcaatatcattagcaacagagtaggaggaccaccaccaatgacggcacattgtggtggcaattgtcgaatgctgacaggagagccgaatttgttccgacaaggagcgcatcagcagcagcatggctacggcacttatggttatggcggtggaggaggaacagtgccatcgatacattcggcttgccatccggtatgatcatggcataataatattttaattaagggggtcttcaagggaatatgatggatgtctattagaggaaaaatacggtatctgtccgattttgcagatctgtcataagtcatgcatacattcatgcccttcaagccgatcaccgtcaacaggatcaattgaccagcagaacaacaacaacaattttggcagcgggggtttttctccatcagaatttcatcaccaacagcacaaccaaccgatgccgtcaatggactcattaaaaggcaataataattttaattgcttcccgtccaaatgccgggcaaattgcctgggggcatgttcccgaatttttgatgctcaacaacgccaacagcagcaacaaattcgcgaaaattttggtgtgctatataattaaattattttgaaattatataaaaaaattaagtgccgagcaatggcatcgaaaatgacattgatgttgagccacattaccaagtggaaatgggtggtggtcaaactaaactgagtagcccagaccatggcaataacaacaacgaaaatataatgtccacgggcaggaatgtgtgccaatgttcgccatcagcggcaaacgtatgcgaatgccaagagtaagtgacaaatggccaataaactttgaaaacaaaatattacttagtgagatatgcatttgaaaaagatatttattgaaaaatatttcaaagaaataattaaaagaaattatgattttcttagaaaaaggcctggttggtctaaaatttcgggtttttcttatatttccttttcataaacccacatttcttgcccagaccctgctacccaatttgtgtcgacacgtgcgagtccaactgtcttcaacagcaaatgcagcaatcgcctgcaaatcagcgtgcacaatgtgcccagttttgtcacttggagtgccaacatgactgtgccatggaacaacaacaacagcaacgagtaccagcacgaaaagcggtagaaacgacgatggggg

SEQ ID NO: 23514 - DNA, 2287 bp, Heterodera glycines
ccccccccccccctcccttaacctccgcagaaagggtcaaacgtatcgttggcttatacgctttgcgcccgtctttcggctctttcactttcaaaattgtccgtcctaccgcatcttatcaggtcagaattattactgcaaaaactcacaatgttcgaacattcgcaggtacaaaacggcgaagaaagtgagccgaaaatcagtcgaaaaagtcggcggcgatggcgccgggcgctgcggagctttccgattgggaaaagacgccgaagggcggaaaaaaaagaaacgcggaaagcggacggagaagcggacgaattgcgacttttggagacggaacacagccaattcgaattggtattcgacaggggcacctgtggcagtgagcacaaatacggggcggaaccgctctttgaagagcattgcttgagtgaatttgcacgcaaaccgaattggaacgacagagagtggcgcaagaaaatgaacgtcggggggaaatgttcggccgaaattatggtaaggaaaacaagcataaagcatacggtaatgaaagggaagcatacggtaatggaagggtaagggaaagaagcatacggcattggaagggaaaacaagcataaagcatacggtaatgaaagggaagcatacggtaatggaagggtaagagaaagaagcatacggcattggaagggaaaagaagcataaagtatacggtaatggaaggaattcgaactttgaaatgttttcaaatcattcgctaattacccaacaaaaatgttacagaacaaagacaaagaccgcatttgtgtgcagagagtgggcgaagtgaattcggagaccgaatttgtagagaagtcaatgggaccaattcgggtggacaaatgcacggggcaagaagagaatgagccgacaaagggaggcaaaaagccccggagggacaaaccgaggacagaaagacagccgagacgcttttggaaatcgtagtcaaacggacggacggacggacaaagaaaaatgggacaaagtgccgacagacaaaactgagagagaaaagagagagagagagataagagataaagcggagagaatgccaaagcgatgtgagaatgatgtacaatgtacataatgaaatgatagctattcactcgttgaccattgacaaatgtgtgctaattgtagaataaagtctttttgaatgtgaaaaagttcaataaatggcacagacggcgattactgatcagaaattgagaaattcaaaatgaaaaaccttttatagtgatcactgatcagatagaaattcaactgcagacagcacttaataaattagttgcattttccgatcagagttcctttatttctttctgttcatccataaactgccctttcaccactttctgatcaaatccctgctaattacccctctaatcgatccgccgtttctttttgcctttgcttttcccgcgcgattttccttcttcccaattagtcgctttataaatttaatttttttttaattaattgaggaattatttttagaagataaactgaagattttctgctttgcttttgaaatgcctttgcaattttcgcccattttcccattttccgatggctccgaaatttctcttccccaattacggccccatcagcaattatttgcggtcttttttcttttgtcttattgcgacatttccaatttgttcagctcttttgcaattccttctgccaactcttcgccttttgcgatgcgtcgccgacgcacgagcatacggtaagagacaattacggtaagagagaattacggtaagagagataagagagacatacagggaggtatatacggtgggagacatacggtagtacagcggaatttaataacaccaattaaggctcgcccgcataaatacaataagtggcaattacggtcggatattttcagatttccttttctttcccaaaatgccattctgtgccctgtcaattaattagcacataaagtgccgtccgcagttccctctggtcaattgttatttatcagtccctctcccccccccatcatttcccctctccaaatgccgttctccattggcactttttcttcccaatttgctccccccttttcccatttagttttgtcctccctttttggcttccattcaccacttttgctccgtccttctccgttttctctccgcagctgtcccccgaactccgatgcaaaattattgagcagcgaccgattgaattgtcaaatttcgccattcgattgtttgctattttccgctatttg

SEQ ID NO: 23515 - DNA, 983 bp, Heterodera glycines
  unsure (1)..(983): unsure at all n locations
gtgccatgttcaggcaaattcctggcaaaattaaggaaatattattttaattttcaaaatgaaagctaaatgattaaaattgtagttgatcgtcaattttaataatgagcgaattctgtcncaatttgttctctccattcccattatgattcattcgaattccattttaaatggttctctcggattatcagtaaatgtgaaaagccatcgctatcccatttatgaaagccaaatcatcaaccaaacaaacagaatggaataaatttatttaataaaaaaaataattttgtacttaaagtaaattgtaaattgaaaagaacgaaatgaaataaagagaaaaaaggtaaacctatatttaacaaaattaaaaacaaataaaaaaactttttggataaaaatgcctataattttaaccaaaaaatcagaaaatgctcatattaaagaagaatttattatttttttttggtgaaaaagtcaccgaaaaaactgccaaaaattgtcaattcattttgttgtaccgaaatcgaaaaattttgaaaaacagcgtcttttgtgtaatttcgagagaatctttaagaaaatacgaaataagttgggatgacgagatcaaaaggccaaataattaatcaattatacagtatttatttatatatgtattttacggtagtgtggagatggtatgcttgtcaacaatgtttgtggttcctagactcggaccctttcatttcgttttcgttttggccttcattttcggcccatgttaatttcgttttcgtgtttcattttcgtccacgaaagttttttttgtttagttttcggttttcaaatgtttctttttctttcgtatttcgtttttgtatcgaatgccctttttggtttcttttttttttggacaatggacatctatctggacagtggacatttggacagtggacatttggaaagtgaagtcatttggacagtggacatttggacagtggaca

SEQ ID NO: 23516 - DNA, 1018 bp, Heterodera glycines
tgattcattttcaaaaaaagacaatagcaaatgggtgccgcactaaattaataattcggcatttctctgttttggggcccgaatttggaatttgaaaaaaaccaagaacaacaaagggcgcatcttgcaagaaacacacgcccaaagcacctctgttgatgttttcagaattcaattccgggccccaaaaacagaaaagtaacaaaactgaaaaaaagattgacgatttaaattgtaatggaaaaagacttatttaaaaatcgaattcccctacaagtccatttaaaaaaaagttgtcatttctccttcaaaaattttaagcctgttccccaatcaaatttgaaaaaataaaaattttaaggtatgtatttcatagatttttcatttacaattttttgcggtaaatggcgaaaaaaacaatgaaaaagcagttccatttgattgccgccgcccctcccacttttgcatttcgtatacccacctccatctcctccttgtaaatgtggtcatggtctgggtgacgacagccgaagaacaagtgcatctcgcccacctccttgccctgctgtttgtgccacaatcggtcgtggaggaagccgcggaagggggcgaagccggtgccgggcccgaccatgatcaccggctgctgcacccggtggggcaagcgcagcgtggacttgcggacgaacaccggcgcggtggacacgcccggggcacggtccgccaagaagttggtgcacacgcctgacgattaattcattaataaatgccagcaattaacagaggcctcgcttctcgggatcccaattctcagcgaattttgcatcgaacaaatgaaattgaaaatgaccggccaaaaatttctacaaaaatcccatttcaaacttttcaaaaaaagaaaaatcgggatacactacgttgcccttttttgaatttttagaaaattttcataagaaaattacaagaaaaaagttaaatttttttttggcagtttttatggaatttttttgaaaacatg

SEQ ID NO: 23517 - DNA, 1302 bp, Heterodera glycines
attctgtttataaaagccgcttttccctcttttagcctcctcggcgatggtgccaagccccgtggtggtgcccgatgttgaggcggatgcattcaggacgatgttgggcttcatttacacggacgatttgagtgggatggacggcgacaatttgttcgacgttctttacgcgggtaaaactttatttttgggttttcccgttcaatttaacccccaattttagctaaaaagtacaacattgtcggcctggtcaacgcctgcttggacttccccatcccttcgctgcccaacgttttcttcgcctttgcccaggcgcgttttctcgaagaaaaggttggcatttatttatttacaattagtcgataattaggggattggaaaataaatgacataccatttgtaaaataagcagcgatgctgaaaacatactaggattaattttcaaaaaaatggaagcctaaagcctctccccaaatcaaaaacaaaaaaattcaacgaaaaatataaaaattaaatttccttttaattttaatttgatttttcaatttattttgggattttgctcgccgttgcatggaatacattgaacaaaacatggacactttgcaccaatcggacgcctttttggaaatcggccaaagtttgctgtgcgaagttttggaccgagaaaagctggcaattgaagaagaacttacgatttggcggatggtaatgccaattcaaaccaaataattgggtcaattgttttttctcacatttaattgggcctaattatttaataaagtaatttgttaattttttggcactccattgggcggacggacagtgccgccaaaagggcctcgaatgttcggcagagaatcggcgcaaaatgctcggcccggcacttttcaaaattcgttttccacgcatttcgaagaaggacttcaccgaacacattggtaatggacagttcaaactcaaatgctttacaaattttatgccatcaaaaacattcatttcattagacaaatgcccaatttttttttgaaaaatttgtgctttctttaaaatcaaagattaaaaaaacgatatttttttaattttgggatagatccatctaacaagggaacctcgcgaactgtcagtcaaaaagtgggtacaaatttggtatcattggatagagcagagtcggtcgacttctattgtgaatttttaatattagcggtgtgtgatgaaaaataaaaaagttatgggcctcgaaaatcgaaattttggccaaagggcccatttccaacttttttgacttttctattaatttcc

SEQ ID NO: 23518 - DNA, 814 bp, Heterodera glycines
  unsure (1)..(814): unsure at all n locations
ggtaaatttggccanatttgaggggcgggagaaatattttaattcgatcggccgaatttatttttttcaaatttttgcttccggcatttataaaaagattaaatttgccagtttcagtgtccattccaacgttggcacttcgtggcgatgcgttcgactttttcggcttttccccgcaaacggtggaaagttttttgaacaatgtgcgcaacgccatacaaaacactgcagggaaagcgctgagttcaggtgaattgtacaaaaatattctcataacgaaccaaatttttaattgttttttaaaaattatttattaattatttaaatggaaaatattttatccctttgtaaatttaacacactttggcactattttttggtgccgatttttatttttatttcaataattcattttggcattgcgttgctcaaataattcgcaatgtttttcgcaggcgttagcctcgtcggattggaaacgcgtctctgcccgtacggcatcagtcagccgggcattcaactgctggacgacggattggtgttgctcaacgctgagttggacgcgtacgtgctgctgtttgacagtggtggtggcattggcacgcagcaaaaacgacggcactgttcaccaacggaattgtgaaaagcgggaggcaaaaaacaaagaaaaataaagccaaaagtcacacaaatagggaatttggagatgatcaatttcgatttcacaaatgttgtttcaatccttctctttatataaattattatgtcaaaaaaaggaagctttttgtactttattgttgaggaaaatacatga

SEQ ID NO: 23519 - DNA, 2223 bp, Heterodera glycines
  unsure (1)..(2223): unsure at all n locations
gttggagctcattatttttttcagccatcttgaaattgtttaaatctaagccatcaaattttcaaatatttatagctattagctaaattaaaatcattttaaacttttgaataaagcatatttttatttttttcataattatgtatacaattaaggttgcttcttcatttattctcattaaaatattgttatactctcgtttctgcagcaaaatttactcacataattttattagattctggaatgtttttatcgttatagtttttctttctatgtttatatatttctttctaaataattaaaaatttaatttgaaatgacattaattaagtttaaacatggctccgtctcctaaattttttgacaggtttcacggaattggtacgcatatgatggtgtttaacgatcatctttcaatattttattcatttacagggttaaatatcttttctctttattttattttttaaataatcattttttagtttcaaaattattttaattaaccaaaatgaacagaaatttgaaagttgaaaatctactgtcatttggccataaagtgatgattcattgaaaaattaaataatttatttaatttattattttaataaaatttgtaggttatttttaaatgatcttaattaagcatatcattgtcaatgtctgaacctgttattttttatttataaacataattatttttattttttcactaattcatttaaaatatttatttttttactttcatttgtttttgtgtgtgattttaatgttctaaagaataaaatttttattctttattttctgttgtgaaaaatatactcctanattcaattatttactgttattatatgcttatttctcgttgtttgcgttaccaattattcttcttaattctttatattttatattactgattgttttttcagcatttcacgaacattaatttaccgctgaatttcgacgccttgaatcaatttttatggaaattttatttttattgcatgtaaaaggttttatgattatgttttctaaatattcgaattttttaaatttttactagaaacgctatttttaatatattgattaattgagacagtttgcttttatgtgtcatataaataattaattaaaagtaatgaattttatctgatataattattatatatttctgcttaactttttaccttaatgtcatttttaggttacaggttcttatttgcatccatattttattattattagaataaatgaaacagataaatgtgccgaggaatacatgacatatgtggatggctatacggaatccaaactgttgttataaatgttaaattgtgcaggttttggcgagatatttatttctttgtagttgaatattattattgggttttttaaatttttttatttagatttaaattaaaataaaagtttttgaaaatttgtcgtttttgatttgtttttctcgcctgaatccatttcttaaatttgatttcttacaccgaatgcttataaacaacattaaacaataataaaattgttatattcaattatgtaattgtatttgtacttttttaatttataaaattatatttctttttaaattcatgaaattcgcaaattattctttttccatatcacatttaaacgaatattgtattaaaaacataaaattcatttagaaaattattcacatttatgtagaaatttaaggttaacttgtttactttcttgttaaaatatttctatactctcgctctcggccgcaaacgccgtggcaagagatgtgataaacctacccgacatcttcgattctggatcggcttttaaagttaaattgtgtttctttctgtgtttatatattattattattattaaaatttattctctataatattttcaggaaacaaatcaaatatttggtatgtcaattatgaagaaattggcagcactttttcagattattgttttatcttggggatgataataatttcggattccgcataaatctaattaaatagagaataaatttcttcaccaaaataatattttttcatattttacctttttgtttaactggtaaatttttctttgagcattttgctttagcatatgtaaagcgatcagagcgaaaatggtaatgcgaattgtattcgacanataatttatttcattggaaaataaatgtttttattattgttttttgacctgcagnngncatgcaag

SEQ ID NO: 23520 - DNA, 929 bp, Heterodera glycines
cggcagcgccttttttggcactgccggtccccgacttattttgttatacagcagtttattgggcgacgagtaaaaaaaaatataaggaagagcatgtttggaatatgcttacctaaattgcatttattttcgggattttacaggatttgaacccttttttggcacttttattagcacatgcaccaaaaatcaccaaaagtctataaagtaaaaaagtatttttacttaccagccattgccactgaacagttcgccacataacagtagtgctcatttggcttgcaaatggctacggtatcttctgttttgcctccattgcttctctcccacaaaaagccacctttgcaccaatggtttgtcaggtcttttgaaaaattaatacatatcaattaataaacaaacagttttattactcgcattgttaatgaccgcttcttctttattgttggacatgtcgtcattttttcgcccaataaaataattacatttggaagtttttgaccaaattggattgttcataaatgattctttggttaagctgcagccccacactgtggtgaagccgatatatccatcgacggaagaagaagctataattcaccttataagaagtttctacccatgatcaaagcttaaaaactaatttaagactttctagcgagttcctacggggcgggacttctgtgcacatctcaaacatctagccctttgaaggatccctgggctgtatcggtacggctccgggaactgccctagaacgcgatcgacatgcgttccaaggcgccggttttgaccgggacagggaaattcccggcttttttcccggttttcccagccaaaaagtccccggtttttcaaccccaaaagtcccggtcccggtcttgcccaaatttcccggtcccactgcactctagttaaaagcaaaagaa

SEQ ID NO: 23521 - DNA, 1264 bp, Heterodera glycines
tgaattctgaaccgttttgagtagattagactagaaaacattgaaaattttgaaatcatgtttcccactcccttctcccaggggtattattttgtaaagtctttttttcaaaataaacttttcaaaccccatttttcgcaccgtgaatgttatttttattgaattctgaaccggtttgagtagattagactagaaaaaattgaaaattttgaaatcatgtttcccactcccttctcccaggggtattattttgtaaagtctttttttccccaataaacttgtcaaaccccatttttcgcaccgtgaatgttatttttattgaattctgaaccgttttgagtagattagactaaaaaaatatgagtgatcaaactttcactaaaaagttaagcctaaactttttcccaaagttaaaaagcaattaaaattttattcacctccattattgatagaaaaagcatcagagtgcctaaactaacatgtaaataaaatttggtgcgtttcagaaccctttctgaaaaaatatttatgaattaattttgcaaataaataaaaacgaaagactcagattttcgaaaaatttttttgagccagctagctcggcgctcatttcagtgtaagttagtcctttaccggggagtatccctgcaaagtttggtacgcttctgctcaattagcaaaaaatatgagtgatcgaattttcactaaaaaagttaagcctacattttttggcatatttaaaaagcaattaaaaaattttaaaatttaataattttcctgcaccgaaggtactcactcggcctcttcgcggcctcgtggtgggccttcgccccccccccctcccacgcccttcagagcacgacaaatatttcaacaaaaattttgaaaaattgactagagcaatcgaacgctaacggacgacctaatggaaaaaaatccccgaaggagagaatttaattaaatccattccttcgggggaccgtgccgggtgccgcggggtaagcagtgctggttcgtttcatcacggcaccgaaccttttggctagtcagcaatcgttgcttaacttgccagatcggacgggtgcgcatgactttctgaaaaaaatatttatgaaacaaaaaaatcgattttttcaagtgtccgtttggggtactcaaacatttatggggagcaaaaatccaacgcagaattaaagtacaggctatagggaagctattcccgaaggattcggtctcccccataaatctgggcgcatcggttcgg

SEQ ID NO: 23522 - DNA, 1241 bp, Heterodera glycines
caacacccccgaaaacccaccgaatagtaattttaggaccaatatataaaagttaaattaggcaccacaattctgcaccatttgctagcaaaaatggccgcgccaaaaaagctcgcgccaaaaaaacctcgcgccaaaatacccgcgccaaagtggctgcgccaaaatggccgcgccaaagtgggcggttcccgttttttgggtcggtgtttaaataaattagccagccactcacagttaaattaataaattgtaatttcttatgtttttagttttcatttttgacatttattttaaacactaaacacaatgagtacaagcacatcgagctcatcattcgacgacagctcttcagaccaatgtaacggcaaaatggcatcgtaataaaaaaacacaaatgttggcaaagaattcttgacttggaccttgatccaggtctgggtttttcctagatccaaatccgaacgacaacctgaaaattttcatggttttttcataatttatctctgcttaaatccatttaaaggctcaactccgtgccattagttagaaagacaaaaaactgtgtcttaatattaaaaaaagtcaagtttccggacatttgtcgagaatcaggattcttcatggccctgtatttttctgctggatttttgcccagaaaatccagggcactctggaaattcttgtggttcagttcaactatggaagccaagtccagttttttcataagtcggcctatttaaacccagtcaaattgcctaactccgtgccattagttagaaagcggtctacgtcactgggccctcacgtttgggcctggccccagcacgtttttccactataacttttttccttgtcaaccaaatacaacattattggtatcattcgaaacttaatctgtttagaaactttttctaagctattgcttgtcggttagataaatgctaaaaaaagttatagcataacaattgcgaaaaagtcgaaattaaaattcttaatgacttttttatatgcgagaaaagcccaactgacgggttccgttagaaagatagcaatttatttataaaagttacaaaaaccataaaattcgacataaaaatccatctccctttttagttccccgtcttgaactggccgacgatggaaatgaattggaacggttggaagccgagcgaaaagcaattgacgcaaaaattgcagcggaattggcacgacggcaaatgataacggagggcaacgaa

SEQ ID NO: 23523 - DNA, 485 bp, Heterodera glycines
ccaaaaaataaacatccgcgtcctcacccgtgctcaacaaattcttcattcgttcaaccaacgatttggacatgataggcaaagtcgaaatcgtagataaatatcggctaaatgcctttgttctacaagataattaatcgtattccatgccaaaaacaatgaataatttaatgtcaaagcccccccccccctcatttctgtttttttttggaaaattcgaaatcacaaaatggtcaggggaagacaatggcacaaaattgatgcgcattgttttattcatttttaacaaaatgcctatggcagtaaaaattgaatttcaattttttatagaaaatatttttgaataaaataaatttattgaaaaatgacttcctaataaaagattgttcaacttaatattataattatgaaaggattaaacaatttacggcaaaacgatgacctaaaaaggcggaggagaacagaaagaaacaaatgtaatttga

SEQ ID NO: 23524 - DNA, 1471 bp, Heterodera glycines
ttataaggaactacaaactgattggtaagcattttcccttttttgtatacacagcggccattatctggccgtttataaaggggataaccatcttcagtaatttttgtattttcagtaaaaggttttggaaatttcttgttgcattttctttttttttcattccaacatggcgatttttcattacacggtccatgcatcatacaatttgttattattttataatgttcgggatcctttttttcatcaggaatttcagcagatataaaattatctatatcattaattgtatgccatttattttttgggtgtagggttattaacaaattaagtgcggtaaacctcttttttggtactctataacccaacaatctcctatcacttcaccaaaaatttgtttgttaaaaattaaatctaaaaaatgatttttctttaaatgaaatacacgtgaaactaaatcaggtctatcagatggagtttgattcggcaaaaggcattttaaaatatcgtaatcattagaattacatgtgaacgtgataaacaaatcaggtttgcctgtttcgttgactatagctaaagcatccataaaatttcatgcacactccttggccctcctgtaaaagtagacggtagaattacctttttttaatttatgcgcctgttttagaagctctattcttaagaagatcttcaacatttaaacaattactgctacacaattccatctgatgcgtccttatatattctaagcgatcccattcgattttagcagcttgatccaccaaccattgttgaaagttttttgcgtaaaaatgagggaaaaaatttacattttcccgaaaaaacaataaaatttggtatagtcacacaaagaaatttttttcccagttaaatttttgatgtttacattaaacccttcgcttcttattggatataataaaggataacacatttggtctacacatttgtctaacggataaatattttttaattgtttttcacctttcgggtaaaccactattctcgctggcggaatttcatcattggcatcacaaactacaattgctccaacctcattacaccttggaatactgtaccgccttttatcataatttttggaatttttaacccattttctttacagttattttcttcttttttataaacctctttcatcattaaaaaggactgtgcaaaagggtttatttttcttaaaaaagtttcaagaaactcaattatttcagagcggcattttttataattttcagaacgaatatctatagcttcttcagaatcaataaaatataactgtccgtttgtaggaatttcattatcttttggcatagcgttctgattaaatttatggtatatttgtccttgtattttatagcatggcgggccaggactttgaaatttaaaccgaaaacaactaattgatgcacaggcgaacatactattgtaacgacgtatattt

SEQ ID NO: 23525 - DNA, 1105 bp, Heterodera glycines
  unsure (1)..(1105): unsure at all n locations
aaaaaataagaaaaattgtgcttttcttgaaaaattatttttacaaaaaacaatttttcaaaaaaagaattaaaaaacaaatatttaaaaaagtaaaaaacgttacttggtggcctaccaacaaaaattgaaaaattacaaatcaatagcttttgtttaaataacgaatttatataaaactcaatttttggtttttatataaaagaaataagtaatatgcctggatgcgacattaaaaaatatattacatatttcatcaactaaatattgttttgttgtttacatgtgaagagatacaagtaaataagaaagaattcaattttaaacaaaagttaattttaaaaaatcaaatatatttccggattctaagcaagtcaaaaaccttaataaaattgataattttttgtgggaattcattaattcgttaatttaaatagaaaaaaacgaaatgaaaagcataacggatttaattgataacattaaaaataacaaattataagaagaaaaaaacagaagaaatttaaacaatatataagtatgaaacagtaaatcccgttgacttttgtcatggaggatggagaaacattgtcgagaaaaaaatccaatcggcaaataaaaaaaatagaaatttcgctaattttatttttttagaggaatgaaaaatttaattttgtagtcatttaaataatagataaaattaatctattaataaaacatttatttttaaaagttaatgaactatataacataaattatttatcaaaatatattaaattacaaaaagataaataaaccaatgaagataaaccaaatttataataacaaaaaggaaatttagatctaaactaatcgcacattaaattattcattaaattattttcttcgcttatttacattaaaataattatgtctgaacaaacttttattcaccaatactgatatgctgatcagaaattggtgaaattaatttttggcctaatataggtaaattttaaaaaaatccgagtcagaattcgcaaaccccgtagttatggtagacaagcaaaacaataataagaaataattttttaatttttatttataagaanaatataattaaataaaa

SEQ ID NO: 23526 - DNA, 1314 bp, Heterodera glycines
ctttacccactcacatgtgcggcagggggtaaattttggtggaatatttggttttcttttcgatgttgcaaatgcatgccaaagtgttctcgccgcctatgttcattgcgcacgaaccgcaaattccttaattattcggtgattttattaattgtttcaatagaatggttaaatggcatttaaacaaaatattggaaattgttttttgggcaccatccaaagcaatttccgatttttttgttttctgatgacaaaaacaaatgactttcaatgaaccgaccttctcgacaagaacgacgaaaagtcaaagttggatccatctcatttttaattttgatcagtgcgtccaaaaccatcggcccgcattgattcaaatccacgtcatatttctaaaaaaacacaaaaatccaaagacataatccaatcggctaaacctggagaaagggtttttgttccggcttttcagggttgtagcggtaaatttcaaaggtttttacacttgggccacgagccggcggatttgtggaagcggcgcgcaaagcaatacaaaaaggaggtgggattttcgaaagaagcattactctcgccaacccgtttaaactaaacttaattaaagaagattttcactcaaattatggatgaaaagattttaaagttaggacaagaattgtctttgccgcccccgccaccgccaattcgttttttttcaacgatatattggcattttgttttttaatatttaaataattaattaatgccaaaacaattcaatttcttttacagtaaaagaaattaccaaattgatcagacaattcagtagggatgcgatttttaggcaaatgctaactttttgcgcacttaatacgcacagataagcacgaaaaacgcattttccgcttggtttggggtgtctaggatgacttttataatgcctaactttgcctattttggagtttttgtgcctaatgtgcctattttagggtttttgaaaaaatccttaacaaaaatgcaataaaaacgaaaaaaacacccctaagaaatgatcaaaaaaatttcagaaaatacatccccctaagaattgaaaaaaattttcaaaaaattgatcatcaaatttactattttttcacgataaaagtttttgactaaaaaattgtctatcgaaaaaacaattaaaatataagcaaaatttttttttttttgattaagtctacgtgctttgctacctaaaaaacgttaataaaaaattttatttgcctattttagtgcctattcgagggtttttgtgcctatttcgcgattttttgtgcctaaaaa

SEQ ID NO: 23527 - DNA, 521 bp, Heterodera glycines
tttttgtttgttaacccccgcccgaatcccccccccccctcattcctgaccacaattggtttctgttgcatcggctgttcaagttcagagcggtcggactgcaaaagaaaaaaaaagattatttattttaaattaaaaaaaagtattatttatttaaattataaaaatgttgtaccctaggcaagacttttgctaattgttcatcggttagctgaatttttggaggaaattttaaaatataaaggtaaaatacagatgaactcacagaaggaataaggacctcacatttgggcagttttggaagcgcaggacgagccgggcgacgacgtttggcagccactttcggtgaacgtacagttgttggctgtgaagtttttatttaatttatcaagaaaaaaaaactttaaaaaaaactcgctttttctgttagcaataagaccgcactttgaaaagcggcgcgcttatggcgcaaatgcaagttcctagcaatatcgtcaattttaggcattctaaaattgatg

SEQ ID NO: 23528 - DNA, 1868 bp, Heterodera glycines
  unsure (1)..(1868): unsure at all n locations
ggtatagagtgcgtacagaactcaaaaagggatattcaaattttggtattatattatatatgaaatgtttaattattaggtgttctattatatgcatattttttcctgaactgcgggaagtctgaaacgtatgaaaaactcgatttaggcttgttttgagcatcaaggacgtatttccatgtgtatatgccgcgatttagtgcatattttgatctttcgaacgtattttatgtgcataatttggaatcctaataattatatacactgtacacaacttacatttcccggccttgttgatttccactgggtcatttgcttgaagttgtccgataattgcctcgaattgttttttgtaaatttctgatgtcgggtaatttatggcttcttgtgcctcgtcaacggcgccgtggttgttggcaacttggaaaaaagctgccatcactaaagggatttagttcgggagtgttaatttaggattcacataatcaacttactaatgaccatctgtctgcggtgaattggactcaaaaacggctcaacagttgccaacaatcgttttgcttcaccgatgtaattgtttgccttctaaagaaaaaaatgtctaatattagcactattttcggttctagtcggttttatgcgtcccatgaatgaccatccccagtttcttaggccataacttttttcttactttttcaatacccatattcttggtaccaagcgaaagataaaagcctcgagattttataaatgcaagaaaagagcaaatactctggggatggtcattcatgggacgcataatctggcatgggacgcataaaaccgnactagaacccaaagancctgtatacatattgtggattttatgatctttttaaccgtttaaatcgtagaaaatcccaaattccatcttcaaaattttaaataaaagacgtttcgccaaaaataattattaaatttttcaaatttggggcggtttcactggtgaaatttagtcccgtttttccgacccaaatgaccggggccgggacttggaaaatggacccgggcggggccccgggaccgggactcccggtcccggtggtttgtccaaaaaaaccggggcctgggtcccggcaaaatcccggcggggcccgtgtttaatactccaaacaagaaattcacaattattcgccagacaaatttttagtgtgactttatattaaaaaataacttttttacggtactagtaaggtttgggtccacatttttggacaaaattttttcaaattttttttttcttttttattgtagcaattgctttaaataagaaagaaaaggagatttatgtgtttatttcgactaggcaaaagttctaacttgaacttacagtaagatgtggcaatcacggatcactttttttcccatacgtttctgattttttgtggtgtaagaaatttggatgaccgtgatattaatacataatccgcgcctacccctggctgatggggattcacttgatatttatagcgcacgtgaactcccgtgtgctcaataaccaatttgctcagaatatcgtcatcctccttctgttggacattcccattctcatactgtacatatttgtttacggtagcggtgtcgacgacggcccaagtgccacccaacaattcgttgacgtggacaatgacgtcacggtgggagaccagcacaatatgttcgggtgaacgaaagcaaagtgcaaaagaagtatagttaaacgattgtcctaattgctgattaattggcttattacccaaatagttccatagaagacaattaaatgggccatattgcccaaatggggggccccgtttaagccatgtttgttaatccctgctgagtactgt

SEQ ID NO: 23529 - DNA, 1339 bp, Heterodera glycines
ctccaatataatttatcattttccttctgattttgtccatcttttttcagtttccgattcttcaaagtcagtctcggcgtttctctcactccccgagaatcatcggtcaaattgggggaactttgaatgagcggatgttggctttactactacaactattgtgaaactcggtgtttttgggcactttttggttgcataaaatcggcggaaaataaaaatgggaaagcccttcccccggctaagtgtcatttcataaattgtttcaatttaacttatgcaaccaaatccgtcgcccaataattaaagcattccccggaatctcaaattgtgttgtgcttttcacacgccattcccataatattaaacaatgtctggcattcgcttcttctccattcagtcgtattttttgtttctttttctcttcgccgctcatttcgctttttctccgctgtcttttcgttgtgccatccctttccttttccctaaaacaacacaaccaacaggggaatttttataatatttttgttgtttttgtattatgagtgaattaaaccttacaataaactctccactctcgggttggttgtgttttgtgaagcccatgcaaaataaaattcgaatacgactaaataacaaaaaaataccaaaaccgatggttcgacataatttttcatttttgaatttgtttgaaacattctgtacaatggacgaataaaggaaagaaaagcatttctgacgtatacaaacataaaacaaaacatcaattggtcaatttttcattcattcatttttctttgacccgcgctacccgacagagacgacgttttggtgggcaaaaatggggggggggaggggagagatgggatcggaaagaaaggagaatgaatgaataaatggataaaaatggacgaatgaaatgagtatggacagcgtaatgaaaaaataagtaaaaatgatgagaaaatgtaaaaaaaaaacaaaaaaaagaaagaatgtgtgggaagggaggcgatgacttagcaaatacagcagcagaagcacgtgcgacttttgctctttttcaaattttctgaaaaattaaaaaaatgccaggaatttatttatgttaagaaacaaaaagggagaagtggcaaaaaaggcactgaccgcttgagtttggttctggcagtgtttccctcgtgacaagatgcatcacctgaggcggggggggggggaggattattactacagaaatgagtacggtacgcgaagctgaactctacccaacaaacatcaaaaaacagattcaaagcgcccatcctgacactgcctagcaacctaatgaacactcaaaattata

SEQ ID NO: 23530 - DNA, 1353 bp, Heterodera glycines
  unsure (1)..(1353): unsure at all n locations
taaaatgattcccttaatgaaaaaattaaaacttaaattaaataacagttcttttattttttgtaaaataaaataatataaataaaattattttattatataaatattaatcatttttgaattgaatgaacttgcaatgacttcatattttacagccgcatttctgctttttcacaaaagttcaaaaaataccctctaagacggaaaaaaatttatggaaaatagaaaatgtgaaaaatattttcatgagaaaattatcgtaaaatgaatttattaaaaaaattatttggtaatagttaaaatatgaatatttttataaagagaaaacaagctattatattattattttgcaaatatttcattcatttgcaatacaattttgattttcattattatttttttctttttgctttttccttcaataaatcaaatttcaattgtgatatttatatgatttattatcctttcactttcttgcattttcatcgaaatacattactttaatttaattataaatttagtttttatattatgaaaacaaaaaattaaactattgtattagcaatgcacaaacgtactcaactaatgaagttcaaataaattgttttttattttaaaaaatattaaaaattgaatttttataatatatttatttactttagcctcctaaattcttgtatgttttccttcctattaatacatttctattttcatatcaattggttttatttttattttaaaaattaatagaaagaatttaatacttttatttgcatgagattaaatttaaaatgagtgtagtaattttttatttaagctttatcaaattgtttgataaaaaaatgtttgaatattttaatttaataatttctcttattttttagattaaataatattttttgggtacttgtttggtatttgttaagacttacacgcaaataagccaatgttgtcccaagtcaatgttgtcccaacttcttcccagttattctttttagagtttttatgtccgatgaatttgcattaagtatttttgattatgctatttttttaaatttctttcacttgtcattgcaacttaaaacatttttaagagattctttgcttttttttttgctttgtaattaattgctaatttttttatcacaaaatattttttttcttttttattctatattattctttaattaaagaatgttgttaataaatttaataattatatagttatttttttaacctttgagacataattttttaacattttgtttcccanaatattatcaatgaaaattcattnntcatttacgtnaatattattgtataatttttataanataagactctgatattctc

SEQ ID NO: 23531 - DNA, 897 bp, Heterodera glycines
tttcggatttgccgacaacacaaacctttgctgtcccttttgaaccgttctggcacttacgcatacgcaagcaccggcaactttttgatcaacggctactgggagaaaggcacttgcaaatttgctcgtggggacgtggtcggatgtggcgttaatttggccagtcggcggatcattttcacaaataaaggacaacgtttgggttggtatttcggaaaataccacaaagccttattaatgaccccgggacttggggttggataattaaattcttgggttggcattttccgaagagaaattgacgaggaaaattgagaacaaattttgaatagactgagcacagcgaagtgaacaacacacaaattaatgagatcaaaatcagaagacaacaaaacgccacaataatttaaaattaaaacgaacccatcaaattaaatatccaaaattgcccccggcggggggggggtcttctccggtgtgcttttttatctaatttttaaatttagatttttttaaacttttttatttaattgcgttcggttccccccggctcgggaaacttcttttttgtttttttggggttttgtctcattttcgaggtcattccagacattcagtaaaaacggcatttcttcgtatttattcattttcttttttctttacagacactgacttttcactcgcccattcttcggctgaccaattgttcccgtgcgtttcgttgtgcgactcgggcgaccaaattgaggcaaactttgggccgaacttcgaattcgatttgaccactcttcgaaacttacattgacgcttctcacaataaataaaattaaatgaaatttaaaaattggtaacgagaattgactcttaaaaggtggtagtaatgttcccttttctttg

SEQ ID NO: 23532 - DNA, 1651 bp, Heterodera glycines
aaatcttgtcggtggtgccgttaagcaagcagcaaatcgctgcacaaatccatcaagcaccagtccaattttgtcacccctcccccctcccattctcgtccccctttggcgctgatcggatcggtcagcagcatcagacccatcaggacgaacggcgaaagaggggaccattccctttacggcacagcgagcggagtgagcagaggaaaaagggacgagagcggtgaagaggagcgggaaccaatcccgcctcagctgggccaagccacacacttggcccgcccgagtaaaagattggcgacaaactggtgccgttagcaggggcatctgcaacgacaaatcgatcggtcaggcaaagaccagagacttcaaattcgagaagctaacggcaaactggtgccgctaacaggggcaactgcagccaccaacaatcggtctacgagcgaccaacgatcacgaattcgagaagctaacggcaaactggtgccgttagcagggggctccagcgaaacatctcggtcgacgaacggaacaggcggaaacgaaaaatgcaacgactcgaattcgaggacgggagcgaaagcaacatggacccagcgaatgagggccatcgcaacggcgcacagcacgacgaaaatgtgcaggacggggatggtcccgtcgcttcaacgaacgaagagcaacaaaaattgccagagtaaacgaagcaacgagaggaagcaacatggcgacaggcgtggcgacaaatcagcaagggatgctacccttcccatcacgcaatttgcggagtgtatccatcccggtacggacagcgcgggacagaatcgagagagcatccgggactctcgccgctcgaattgcggaggctcgagaagtgatcgaccaagaccttaccgaaggggaggcaggctaccaagcagcgcgacttttggccatggagagaggactcaaggaggcaactcaaatcttccaaggacatttcgagattggaatggcagcagcgggagcagaacccgcaggtcaccaggacttcttctacgacatactgacgacgccactgccggcagcaacgaaacaattgcagttgcgaacccatccaacaccagctgaactgcttcaaatcgcggatgagcacatcggagacttaacgggcactcgaggatgaagaagaagcaatcgcgcggtcacgattgagcgggtcactcgggaccaacaacagccatccggtgggggacgacccacctccgctggaaaatcggaacatggaagaatgggagagatccttccaagtggcggccaaacgatggcaaaacgacggacaagttgtacagcaacacaaccgaagaccaatggaacgagtcgcgacacccgtcatgccgaatttggatgggattttccaacggcgtgccaaagtgccgtccgtcgccagcatgagagtggcgaacacagcgcgagaatggatcaatcgaaatcgagacgagatgggggcgtttcccccagcaacagcccatcggcggcactgatgcaaccaaaaatcgaaaagcagcaggctcacgtgaacgacgactatcgggagcgtcagacatacccgattcgacggcatgctcgagacgagggagaacatgattcggaagcacgggaagggacgaaa

SEQ ID NO: 23533 - DNA, 467 bp, Heterodera glycines
acatttgcgcctccacatttgcgccccccctccagtatttacactttttcgcccattttttggaaaaaaaatttatcaaaaacctttaaagacattccctactaacgcttaacaagaattattctccaaactgcctccgaataaaaaataagttcaagttcgacccctccaggtggcggttgattacttagaacccaatttattagttcgccaggcaatatatgttgtcgaaaaacactcggagacacaataattgacaaggggagaagtaagataaaatccttacaatataagtaaattatattcagatatttggaaaaaaaagtgtcattttcgtcattactattatagataaattttcaaatttaaaactttaacgtaaaatttaaatttcttgtaataaaaattggctttgctggtgcaaaaaaaaattgcgaaaaattaaagtgtaaatgctgggggcgcaa

SEQ ID NO: 23534 - DNA, 1884 bp, Heterodera glycines
tcgaccgaaatgccatcgattttctccaccgttttcgtcaacttttcgccgcctgtccaattaatttgatttttcacacgactcctgaccaaattttggtgttcattctgcgcaacatttggccaatgatcgcgaaaaacatttgtgccatgctttttttcgcgaaaattttccaatcttggcgaaaattcgccacatcaattctcaatgattgtccatcgcttcgctttcttttttgatgaatgcctcaccgaattccctgccgatgacagtgccgcggcatcggatggacaagcggtggccaaatggtttttcacgccacttcaaaacgatgcgccaaaggtgttcgaatgctggatatcgaggaactccaatactttcgaccgtgactgtacttctaaaaataaataaaaaaaacaaatatgtgtttattcatctcactaccagcagaacacttgatgagccgcacagcgcagaatttcccttccccctttatcaccaaaattactaaattttcacattttggctcttttacaatttacgtatcctaatgttagcacaaaatttcgagtcgatacatttttcaaaacttacaaaatccaatacgcaattagtgtgtgaataaataatttaaacacgtaaagtaaattggaggcgtaatgtaatagagccaaattttctgaaaatacagagcaattaatggccgaagaaaacccaaaatggagagaggctaaagaacgagaggaagctgcagaaactatgcggcggatttacgcttctcaacagcgggaccattcgccctatatcacagacagggccaaattcgaaattttcgacaaattggaatttcgtgggccatggagtgccgatgtaaattttttttttcaaaaaaaatttacatttgctgctatttaaagattctacgcaaattgcataaattggcgtataaaggaagcgagtttgagaatgatggatgggttggaaagtttcgaggtgaatacggcgcccttgagccggaggggatgaattttagtggagtgaagagagagaaagtgaaggacggagttgaagaattggtcaaatggatgaacctttgtgatgccactaacatgccaacccaaggatttgctgcgcaagcatttctctcctttgttagttaaaatggggagtagggggtgagagaatttcaagtaactaattgatttttaccaatagattcgccttcaaccttatggggacggaaatgggcgcaccgggcaattattaattaatttgattcttcgccgcagttcacaccccacattcattatcaaagaggattgtcgcaaaaaaattaataccttattaaaagaaaaagatgaacagagctgcattaattttcttgaggtattaattgtacctgagtgtacctctcttccctcaaattagctgcttttttaaaaaatccaaaaagtggggacttgtaataccaaacgtttttacggatacgctcactacgttccgcgccccgaaattaaaaaaaacaacacttattatttcctattaaaaaaatttcaaaaattcattaataattaaaaagtatcaccgaaatcaaatcatatctttttgcaggttggtgaagcaattgcgtgagaatgtgctcaaatccatcgactttgaggagatggccggcgatgtgaacaaacggcgactcatccaaaagtcggtgttcatcgaatagaatttgattccgctttccctataggatgaagcaaatgcagggcgcctcgggcttcgatggcagtgccagcggaaggcataagtgaatatgagaaggagggagatacaaatgatgatgaacacagaaagcgttcaaattgatgagaccaacgacagatacggacg

SEQ ID NO: 23535 - DNA, 2287 bp, Heterodera glycines
  unsure (1)..(2287): unsure at all n locations
atagtgactgactgagcaatgtaaggggaagtactcttttatgctagtgggaggggtgaggtcaaagagcatatagagtaggcataacatacacaacagcatagaataaagaggaaaataatgaaacgtaatcgattttttgacttacattcctttattcaaattaatacctcttcctatttttcgataattaaatttaattagaaagaaacagaaaaaatttttttagcttttttaaataaaagcgtttactattaaattagaatgaaagtgaaaaagaaaaaaattgttagccaatgaaaaaaaggaaagatgagaaaaattggcagataaacttttctggtttcataaagaaaataatgcaaaatggtcataataatttctctattttgaattaattaaaaaataaaaattaatcttaaaaataaaaataacactcacaaaaataaattaaataatgcatgaaaacatcaggaatcggtgggacccgaaccatcgagccacaaaagcacaggcagacgcactaaccacttgaccaccgaatcgcttgcctccttcccatttaattcccttttccttttccttcttttttggaagaaatcccgaccaaaagtgcttgaaatccctttttagagcatttctcggacccggacccaaacaatactggtatcattcgaaagccaagagtttgtatatcatgcgaaattgtttcgatttttgatttgaccctttttaaggtatgcaaaaagcgttcaaaaatgggacacccaaaaaaagtgcaaattttgactcgtttttcgaacacagttcgaacaattcttaaccgattgggatgccgatagtttttccttatagccagtccaaaaccctatcgaatgataccactagcgccccgtaaaactcactagaaagtcttaaattagtttttaagcttggatcatgggtagaaacttcttatatagggaattacaaataaaatgatcactttaatttggcaaaatattgtcaattattgaattggcaattgagtgatcactctgatttggcataattatagtgaattattgattggcaatttaattcaatgcaaaaatatgaatttgcttaaattggattgatcaataaaagtaataaatagagaatagtaataatattaaaatatttgtaaatatgtatacagctttggcacaatgtttcgttaagattacccggcgcgggattttgcggaatcccagtcaccatctcgcataagcaaaaaacagaaaagaagggacaaaatgcaataaacccattaaaaagagctttttcaaatgcattttgtggttcaagtcatcaaactattgtgacgaagaaagggatgaaccgatttcatcaaaatcacctattttaattgggctaaatttttttaataaaattgaaaattattttttaaaaaattaaaattttaaaaattgcggattacggattgcggggtttttggacccccgtaattgcggattgcggatttccgtaactgaaaaaatctccgcaattgcggatttccgtaactgaaaaaatctccgcaattgcggatttccgtaattgaaaatccagttgcgcccaggcctgtttcagtgtcgctgaacataattctgaaatccaatttgtataatttttaatttttcaacgttatattacattacatttttgttaaggattttttcgaaaatcgtaaaataggcactttaggccacaaaaaaaaacccgaaataggcagacataatacgttaaagggggtgggccgaaaaaattttttgcgaatgcgggtcgggatttgcggaagtaatcccgcgggatcccgtcccgatgagttccaatcccgcagcgcgatccataaatttggtagcctagtggttaaccctccagtctttgttcttattttgcttgggttcgatcccccatcagaataaaaattctttcatatttttttataattcttttcactcaaatttaattaaaaaatttttcctattttaaaaattttccattgttttttagaacatcctataaagccagaaaataatcaaagatttgatcatttttggataaaatctgttaacaaatctttttcctggcggcgcctatcgccaccgtcggactcgccctcttttgcccaaagtttccgaaaaagcacgcaggaaaaaagtggggtgaaaagcaaaataaaatnttattttcattaattggaacataanaaaattgtccaatttttcagcattcatttggattttaaaataatagataattt

SEQ ID NO: 23536 - DNA, 1708 bp, Heterodera glycines
gttttccgctaatggcaacggtccagccgctaattaacttttgaacaattgaaattttggcataattgatgtacaaatttggcacaaatgagaatttcggtgccataaaaatttaggaatttgagaattaaaaaaaaatttttttttttctaaattcggaatttgcgcttatgtttagacttttgcccaagtattcctgctctccatgatgaacacaatcaccagctcaatttatgtgtacatgcaattcaacgaaacgcaccaatggatgatcactctggcccaatttacatggtaaatataatttaaaatgattttgtatactttataattatcccgccggacctcccccctcccgcccaaaaaaggtatatttttggtgccggaatttccgataaatgccttccttttttcgaaattatgaaaaaaaaatttttgggggcggggagcggagtgggcagcataaccaaaaaaaaatatcaaaataatataaaatatccaacttctttttcctatcttccaggatacatgtccatggtaagtgcggtaacaagggtgttctacaattatataccgtatattttaatttatgtaatgttattcccttgtctcactcatcaaaggctttccggcggtcatttatttggcactgaacaaaaccatacgctcggattgccgtatgctgtacatgaaagtgttccaccgtaaccggatcagctacgtcagtggcattaccatgctccgcccaattgggacagttgtcagcggagcaccaccaccagcaacagcagcatcgggagggagtggcaacagagtttcaccctctgttttctgatgactatggttataaatagggctccaatttttaggcactaaccgccaaaataggtaggctttaggccagggctgccatccgtccttgaatggcaaggacgtccttgaaattgggccctctttcttgaaaataaaaaatgtccttgtatgcaaggacgtccttgaaaacgagcatttggaaaagtttaaaaaaaatcaaagaaatttgagaaatctttgtaattttcaacaatattttgattaaattatggcattatgtcatttaaaaatgtaatttttgagaatttttgaaattttatggcattaagtcactagtcactatttttcttaaaaaattagccaaaaatcgcaaattttggtcatttttggacaaaaatctgtaaacaactcgcattaaaaattacaaatttttccggacccccctatcctcaaaaaaatttttaaaaagcgcgccgtaaaaaaaacccattttataaacaaaaaaagtcgtcgcatggcttaaaatcgcaaaaattaggcagtttttggtgaaaatctgttaacaaattgcattcaaattttcaaaatttttccccggcggcgcctgtcggcaccgccggaccccccccccccctctgtcccacaaaatttttggaaaaagcgcgccacaaaaaaagcgtttttaaagcagaaaaaagtcgtcgtaaatgaggaaaatgatcagcggaaataaaaaaatattggaaaaaatccattccggtgaaaaatacaagccatttgaataaatattaaccatttttcattgcatataataaaaattttaaatgtccttggatttcatgaattttccccactatgtccttgaaaatcggcatacccgtccttggaaacggag

SEQ ID NO: 23537 - DNA, 1096 bp, Heterodera glycines
tattttctatgaaaattcattgtaaagagtaatttctgggccctttaaaaatgagatttttgcatttttttagaataaaacatttattcatgcaattaaatagaaatttttttgtgcaattaaatagatttttttctttttagtgttttagcaaaattttattgctgaaatttattaagtttcaagatgtttttttcatcatactttatttttagattaattttttgggatttatttttttagaaatttgttcacaatgagaatagtagcactgaatatacgaataattagaattcaattctgttttccatatcaaacattttacaaattttagcaaaattaacatttataatgttgtaaaattaatttaaaaaattaaactgatttcaaattgattttgtaatttgtagaggcgaaaatgtaaaagtaagacgtgaggatccatgccagagtgggatgggaggagacggattgtcccaggactgaaaggtcttaatcttaggaatcgggcccaatccccaagaagtccaaagggtccaatcgttcgtgtggctctttattatgtcggattaaatgcgcgaaatgtgtgaataaataaatgattaataaataattaatttgtctttgatcgctccgacgtccaactctcatctcctccgactcgactgactgattggtgggggaaacaaatgaacggaaagggggcggggatttgtgagagttagagtaaagagaaatagtgaatgaaatggtgaacgggggaatcggaaaagatgaataacatcgattggccaaaaagggaaatgtgtgaaggattcgtcttcgctcatgggtgataattagaatatgttacaataataagccaattgccaattaggacaatcgcttaattatccgttttttgtcgactttgcttttgttcagccgagcacattgtgctggtctctcaccgtgacgtcatggacatgtaaaccaattgttgggcggcaattgggccgtcgtcgacgtcgctaccataaacaaatatgtacagtatgcgaatgggaaggacgaacagaaggaggacgatattctgagcaaatttgttattgagcac

SEQ ID NO: 23538 - DNA, 2351 bp, Heterodera glycines
ttgttttaatattttaaatccctttgcttcgattgtccgtctttcttcttctgttccctctctccgtccaatggacaattaatcgcattattttagtggacaaaaataaattgtgaatgaatgaattgttggcaatttcatttcaaaatgggattcggatgaagccaaaaagcggaaaattttaatattttattttctgcgcttagggaatgtcaacaaaaatatggggaaaaagaaaaggaaaggggaggaagcaaggcataaaggggaaaggagaatggcacaatgggaaggggaggaagaatggcatattgggaaataggggaatgaggaatggcacatttgggaagggggaggaagaatggcataatggggaacaggggaatgaggaatggcacatttgggaagggggaggaagaatggcataatggggaacaggggaatgaggaatggcacatttgggaagggggaggaagaatggcataatggggaacaggggaatgaggaatggcacatttgggaagggggaggaagaatggcataatggggaacaggggaatgaggaatggcacatttgggaagggggaggaagaatggcatattgggaaataggggaggagtcgcacactggtgaagcgacacattgcgatgacgaacggaccgaattttcacggggggagcgtgagaatgggctgaataatatgaaaaacaaacaaattttggaggtgataaatattataaaaaacggaaaaagatgagaaaatgggggaagcaaaagtaatcgccaaaatccatcacttctaaattatcgaatcgaaagataatttattaccaaaggcaaatttaaaatcgaaattcttttcgggcagagaattagcaaaaacaaagctttggccaaattgtgctatgaatgtgccgcgctgatgtcggaatgagcattcattgtgccaatgccacccaaaggcaattgcaatgaaagcgaagaattccgtcggttgccacgcaaccgacggaaaggtgcccttccggtgccaattcacttggcactgtttctgagggagtaacggcaaattacaaaagcaaatgggcggtaattaagcaatcaaaggaaagaacaaataattaaacggaaaagagcagcgcaccgaagcattgcttttagacgcaagaaaaatagagctgtgatcgcattggacgctgaagacattcattctattggcctttccccgatttgggggtgccgcttttgctcaaaaagcctttccctttccctctttcgctgcgggaaattttgtcaggaatttaattggttgagttggtctcggaaaaattgacattgggacgataatttacgttcttttataagagaaagcgaaggtaaagagacacagaatgccattcgttcgttgggacgacgaatgaagcttcctagtgaaattttaattaacaatagaaatttgacttcggtttttggcattgaaaatacttcttgctcatttcaaatgtagctaaagttttttaaatccttttttattttattttaaaaatgtttattttttggaccgttaaattccggagaaaagatggcttaatttgttaatctcagtgggctttttttgttgaataaatgaaaagggttgtactgctgaagcaatataaaattacaacgaatcgaccaattattttgccaaaggaaaggcaacggcgcattgcctcgccgtctcgggtaaaatttgcccttattaatggaggttttggcactgtgccgacaatggattcggttgccaaggaaatttggtggaaaattcattcaatgggcacaatcaaaaagaaaactcaaagaataaaagctcaaaatggaaaaattttaagaatttttgtacatattttagtcacaattaaacgcaaaatttgatcatttgcaaattgccctaaaatgtctttcattcattcgtcgccaaataatgctgacaaatgagggtaactcatactaattatattggaaatatttcaggcgtattcccaagcaaatgtttcagactttgctttcgactttagacccccccccccctcatttgtcaggtcgtcgctttaatcccctgggggtgttttgggcccacaaaacagctgatgaccaatgaaaaacacttttatcgatgtataaaactgacaatcgaatttataaacccaatcatccatttgacgaaataattaatcaaagaaaaaaggctcagacaaaaataaaatgttaaattcgatcaaaaaaatggtggcgcataaaatgttcataaaatgccatgggacgcgtaaaacaggacagaaccataactttttaccgtaataaaaagtag

SEQ ID NO: 23539 - DNA, 201 bp, Heterodera glycines
cgctcctgctcttgatcttttcgggagtatcaccggccgactgagttccgcttcttcgcaccagcgctcggactccacacgacgtctgcgagttcatttgcgttaccgcgcaaaacagctcttgcgaaccgtcatttccctagcctggcgtgggaatgttaacccacttccctttcggcaaccggatggaccaactgcgca

SEQ ID NO: 23540 - DNA, 1476 bp, Heterodera glycines
ggaacgcggcgggggggggggggggggggcggggaggggatggggtgtcaatcgcagcactcaattaaatattcaaattttggtaatcttaggacgccatttatctggttttaaaattaaaattgtcctataaattttaaatattttcacttttacctttctattgtttttttattccatttttagcaaaaactgtgaaggctaagtcaatcgtaaataagtgttttatgaggggggggggtgaaggtgaaaagcgaatgaatgggcaaacgaacaaagaaaagagaacgaatgatttgtgcgcgacttttattccttttcattggaaaagaatctgatgcttttggatttaattagtttttatttctttttaggccgatgatttgataaaggcggaaatgtacgcacttatggaatgggacacggaaaagaaagagccgacgcatttgtacaccttcgaagagagggaaaaggcacgcaaaatgatagaggaagaggcgaccaaaatggcacaagaggagggcatcgagcccaacttggacgcacacatgtggcaagtggtggccaattgttcttctgaattggtgcgccaccaaagccgcttcaacagactgcaaaatctgcacaaaaaggaacagatcgaagtgttgtcggaacgcttcaaggcgagtgggctgttgtttttggccaaattggtgcattttgggcctcttttaatttgttagcctttgctttaattgaccgctaatccgctaattccctcccccattaacctaaccatccgagcaatttatgcaccaaagcatccttttggcaaaattccttattgatgcacagtcccgagttccctctgctctgttttggcaatttgtttggatgcttccaattattaattgagtttgtttgttcaaagcggggactttgcctttccccaaagattattcccccgggcaaaaggcatttgatctctttgcctttgcggtataatgtggcagccgtgtcaaattacgcaaaacttattcggaagatggggaaggagcggcaaataatgaatattaatggactttatggtgaaagaattttgagaaattagacgacgagaaaatccctggagaaattggggacaaagcaattaaaaatgtccaattggtccccaaaatatgcaaattcagaaaaataaatataaatttttatcggttaagcttttattcaattggatgtcacagcaggcgcaacgcgtgcaaaaagtggagaagaaagtgaaagtgaagctgggcggatacattgtcagtgaaagggcaattggggggggggggacaatcagtcgggaatttattaattgtcgggaactaacggcttttcgaaattgcagaacattcattcgaatctgcacgcaaagttggacgaattgcacagggagaaggagaaacttttgttggagctgaagacatttcgccgttggaggagaagaacaaa

SEQ ID NO: 23541 - DNA, 1889 bp, Heterodera glycines
  unsure (1)..(1889): unsure at all n locations
cagcgaatntaaaagcgatgttgtgaatgcgttggttctttctgaaacatttttgaccgacgaagtaattataaaaatataaataatttttattcatttaaaataaacaattttaatacattttttatttatttaaattattatttttattgtttaggtggtccgcgctgggctcacacttttaccatttttgctcatcggcttctcaattatggttgtgttttcgtcctgcacgatgagcatgtaaagattatttatattcatcaatttaaattattaaaggcccacaattagcatccaaaaaactgactataaaattcattttatctgtaaaaaaatattttattaaataaattttttaataatttttaaattaataaaataaaacaattttattcgttaagaattttatttacttaaattaatattcattatattttaccttttttattaattatttttgttgtttgaaattagttttaataaatagcaatatttagtttaaaaaaaaataaattatttcaataattaaaataatttacaaatttttaaaattaacataaattatttttaaatttgtacagctccgctttttatgtgcgtcagatgggcgcacagaaaatactgctcgcggtcgtcgcttgctcatgcccgttcatggcatgtggttggtttgaaaatggggtaaaaactccaaggacagtttattttaaaggacaccagtgaaattaatgaaatccaaggcctccgttctaaattattttgcccaagaatttttctagaggactactgcatttcatctaataaagcatgtttgtaccatgtaaatgaagttttttgggaatcaaaaacgggattctagttcctccaacaaatttcaaaacttaaatccgtgtccctaaaaagtgataggaagccgaggagtactaccatgtaagcctcaaaattttggaatcggaaattccaaggtctacaaaaaaatcgggaaattgcaaggtttttttttcaaacaggcacagcccttggcggaatgttttggctcggctttcgtttcggtaattttaattttgtcgttttttttaaaattttcccaattaaaagggtcactgctttgtgttacgccctttttggtgcttgcgctcggtgtcgatgatgcttatttgatgctgaacgcgtggcagaggcttagaattaggcgagcactagcatttttggcgcaatttactcaaatattggtgcaccataatttcttaatgaaattccagcccagaatttttaaatttaacccagcttccggctgtttttctgccgaccatttaatggaccccaattattataagtttgagcgctgaaatggctataaaatttttacaaatggtcgagccaattcagtactgtataactgagcgcaataatatattggtgctgaatcagcgggcgcagaaataataacctcctaagccatgcaaaatttcagtttggaaaaaaagcttgaacatgagggcaagccagtgtcggtggaacaaattgtgcaacggttaatggcccaagtgatggtggacacgggtacgaattttgtgatttttccacaaaattttttaccaatttcttcaaggggcctccatcacgattacggtatggtctggaacaaaatacatggaaaatactggcgctcatcttttaaatgataaaaatttttgagtggaaaaaaataaaaattttatcagagctgtgaatttctccaggatatttttccttaattgaagataggctgtctggaaattgaaaatttctcgattcatcatatacgaatttttgcaatacgttcctttattggcattttttcaaaaaattttcggaattttgccagcagtacatatccggcacta

SEQ ID NO: 23542 - DNA, 1506 bp, Heterodera glycines
ttgctgttgttgaagttgctcatttggattattttatttaaaattatgtagcgaaaaaaacgaagcgaacggatgaaaatggtgcaagaatggcagaatgagatcatttggtccaaactccggcaccgccctttcactcagtgagggatgtcacaaagaacatttgttgccatagggcgcggttgtgggggacatacaatgcgacgatcaaaacgaatgtgtcaatcaatcatcagattaggggcacaggaccacaaagactaagggctttgtccatagttaggcccgagaatacacatacgcggtaattagtcaaaggattaaactttaaataaaaaaatttaatattttaaatatcaattcatgtcgtccatgtcaattctttccaagcactttcgttttccttgcatgtagttgtttcttggaccacctctacagtatgtaggaccgtaattatcgtaccaaaagttattttgactgtcattttcgtcattatcgttgtttttattgtttctgtttttattgcggttgttggtgttgttgtagttgttattacgtggatgatatgccataaattgcacagaattcatatcgctgagtcgcatgttgagcattgtacaatgtttgcacaggtgaaagttcaagtccacacctccatcgttacactctgttatgtcgtccttacggttgtatagctcttgtgcacacattttacatagtttaaatgtcaacatgtatttttgtcttttcaatttccataactggtttgtggggcgcgcgtagcagtgatcatgttcgatcacatcagtttgatgttgttgatcttgttgttgttgttgttggtgttgttttggcattttgtcctcatgctgaaactgattattcatacaaactccttcactttttttaatgaaattgtccatttttcaaaaaattagttttaatgaatgattaaagtgtatacttaagcatacaatctgcacttaaataggctgctatgtacgattttttgaagcgaattttttaacgcaaaatttgaatacaaattttgaggatgtgtagtgagtgattcgaccattcattctttcaaaaagcacgcattcacttttcgtgtaactaactcctgctcagatgagtttgctcgatcaattcacgaatttgtttaactgttctgcttatgacgttagtaacagactgcttagtgatgctgagcgaacaaaggctttagtgttgtgtaatcacaaacttctcactaccatgtacaaggaccgtaatggactgaatcacacgttcacgtgtactggtctgtccgcagagggagcagaatcccttctcgcttatggaaaactgagagaaccgttcaatatttctgtcgctgcccattattacgcacgtcatcgtataatgctgagtcaccccaaagcaccatgtgctattgagcgacaactttgtctcatcgtggcggacagcgaaccaccgtattaaagttctatcccttggaactcg

SEQ ID NO: 23543 - DNA, 1569 bp, Heterodera glycines
  unsure (1)..(1569): unsure at all n locations
ttttgatttgtattatttcttgatttaattttatttgtttgttttcttttgggcgccatgtaagagcactaatgttcctntggttgctcgnataaattaaatcaaattaaaaatttttaaatagaaattaatgtgtttacatattattttcttntaaaataataaaatattttttatatggttttattaaaattctagggcttcaataaatgtaaatttactctctcatcaatttcataattagtattcactcagtgagctagtgattattaaaatattttaatttattcaaataaatcaatataaaaggaatcttgcgtaaaaaaaggagtataaataatattgtttctaatcaacttttaaatatgaaaaaaatgttatcttatataagataaacaatttaatgaagaaaactaaaaataccacctgaaacaaaaaattgcattaaaaataataattgttggataaatttctccattaaaatttattatttgatgactattagtaggcttataagttgtatgcactaaaaagtgccaaatatgcgcataaaatatgactaaaattcccacaaatatgccctaaaaacccgaaaaaacataaatatgcactaaaatatgcattaataaaactgcaaaaaattggctttgaaccttcaaaaatgcaaaaaattgtgtaaaaattcagaaatgactttaaactccaaactatggctaagtgttttttagacaattacaaaaagttttaattttcaaactttatatatgcaatttcgaatttttattttatgctaaaatcaaaattgcttttttatatttacaaatttttttcaaaaattctcagaaaaaaaaatttaaaatctttagttttaggggagcaaaaaagtcaattcttaggggtgtgttttacgaaaggacaacggtggaaaacatattataattttagtcattgagcaaaatgcatataaagattatcataacaagtgtttaagagaattattactaaattctaagaaataaaaaaaaactattaatttacttattgttaaaacaatatattgatttttaaatttctttataaattcattacatattctgttaattcactgaattaaatcaacttaaatattatattgctagagataaattagtatcaaaaattatggctattaacaatgcattcagatggccgctcacgagaaattaagttaaatgcaaaaccttaaaaaataaaaacaaacctattcatatatttaattaagtaaatttaaattttaaaatttttaattttcattactatcaaatttaagaattctttatgaataaaaaataagacaatttgttgaatctttgttcagattttggaaatataataaaagaaattatttttggatgtatcttagattaatcattatttaaattatttaacaaaaaaaaaattttttcgtaatttactttaagacagaataaataaaaatatataacataagaaaaagatcaaacagattaatggaattcaaacaatattttaaaaatgagtcaaacaatttataagataatctttcggtat

SEQ ID NO: 23544 - DNA, 1603 bp, Heterodera glycines
attggttactcaacactaaaatttgcttttgttattcgtgtaattccaatttcaattttgtctcccgatttgcatggtcccacgcccgcaggtgtccctgtcaaaatcacatctccgggcattacgctcacgcgcgaagtgacatattcgagcaaagtcgggacatcaaacatcatcgcattagtcttctccttctgtctgatttgccgattgactaaaaacaaagaatcgtaattaaaaaattatagggttcattatacccaaacagtaaatttcaatgtcatgggggttttgaataacacttttgttgatgaattcgccaattgggcacgacgtgtcgaaggatttcgccaaaaaccacggatgccccgcctttttaagcctgtcttgcattcctcgatcagtcatatccaatgcaatgcaataaccgccaatgtaatcaaaggccgattccttttttatccgactgcccggggagccaattaccacaccaagttccaccttaaacttattttataaaaggaaatgcgtctttaggttagatggcgctcctatatctaacatttaatttagcaccgagcaaaaagtcgaattaaaattttaaaaaaattctataaaattcaagctctcaatacaaacaagaatgtaggcagaaactgtgaatgggcattgattggattgcgttaactgtagtagagaactgaacccacctcataatgcagctccgaacatccactcggcattttaatttctccaccagaaagtaataaagcatttgaagttttagcaaaaatcagcggttcttttggcaccgggttggacctgtaaaaaataaaataaataaataaataaaaattaattgtatacaattccaatgcatgatccctgtaatttcgaccgatgcaaatgattttctgcgtaaattcgtggaattttttcagctttatcattgcagacatagtgaaaggaaattatattacctacctaacatataagtgtgggtctaggcgtttggagcaaaaaattgaaaaaaaataaaactttttaaataagatttttttaataaagtttggcattatatatttttttaaaggaaaaagaaatggattgtttggtgtttgagcttgaggctataggcaaataaatagacaaataatggtgtagcgtaccaagtgcttatcttcttatacttaatttctacatagtcggcaaatgtgggactgagacaacgcgacagtgccacaacgcagtcgcgtcccaccctgataggcgtagtatatacaggctttcttcattaattagttatgccttcgcattttagtgctcgtaatgacgtaattactattttttagcattaaacaacgagagtgatgtttagattccgcgagtttaaatagagacaggcaaaacgaaaatatagatatagagtttcaaaataatgatgtcttataattagtgcaaaagaaacatcatgtgtaaacattagtgatcggaatttgaaatgaatggaccgatcctgcaaaatcccggcatgactccggtccctccgaattctaatcatttatacccacaatacatttgctataatataatgaccttttgg

SEQ ID NO: 23545 - DNA, 987 bp, Heterodera glycines
attgctgcttcagcctcagaccgcagctgaacatcagaaggacatcaacgaatcgtcgtcgtcctcctcagattcctcctcttcgtcctcgtcttctgacagtgaaagcgacggcgacgagtcggacgcgggcgaaagaggcggtgccacagccgaagagcgccgacgcacgtcgcactcacacggaagcatgcagtcgttgaacttcacctccgtaaaacactccatttgcttacatatggtttatcttcggttatttttcagatctttaaaagtaagcgcaagcgccgtcgtccttcccactcgcgttcttccaccacggccaaagaggacattgagatgggcaaacagaggaaccgaggttggtggttgcctcgagtggtccaatccccgttcgaccacccacaacttctgcttagattgccaatgccttttagtgacaagtcgcagtacaccgataaaggagggcccaacgttgaaggccgttgatgaagacggtgctggtgctaaacaaaggaaaagcaaaggcagggagggccgtggcgtccgtgcacttgtcgcccattcgacgattggagcggcagcggtgccatcggcgaccaacagtgattgaggagcaattcgtttttactaatggaaaatctttaggtaccggtggaagtccgctgttgtcccatgctccgcttccactgaataacgcaattaaccacgcctggccaactccaaaaacttacggcgcaataaaccccgacggaaaatcgccacattttctcgtgggaagtgacgaaaacattggcgactcgtcaaacgaagctgcttattaccacccaacaacaacttttccgacgaggcacagacgaaaaaagacagtgctcagcgaaaatggtcctttttaggcacatattttcgatgctccactcttttttagcaattttgttttaaagccattgaaatataattctgggaatatttgaaattagtcataaa

SEQ ID NO: 23546 - DNA, 664 bp, Heterodera glycines
cattccatcactgggactcaaatctccggcattacaaacactgggactcaacccaccaactttcaatgacattccaatcgctgggactcaacccaccagcatttcaatctctgggactcaattctcctgcatttcaatcactgggactcaacccaccaactttcaatgacattccaatcgctgggactcaatccaccagcatttcaatctctgggactcaattctcctgcatttcaatcactgggactcaaccgcagcaaatttctttagcatttttaactttttgtgtgccttgggatgttgaacagttggggagggctcggccgcttcgcggcctcgtacgggggccttcgcccccccccacaattttttgcgccaaaggtaccatcatttaatcactgggacttaacgcaccaacattccaatcactgggactcaactctccagcattcaatcactgggactcaacccaccaacattccaatcactgggactcaactctccagcattcaatcactgggacttaacccaccaaacattccaatcagtgggattcaatccaccagcatttcaatcagtgggactcaacccacccaacattccaatcaaagggactcaatccaccagcatttcaatcagtgggactcaacccaccagcatttca

SEQ ID NO: 23547 - DNA, 1192 bp, Heterodera glycines
  unsure (1)..(1192): unsure at all n locations
gtgtggggggggggggggggggggggggggaaaaaaaaaaaaaataaaaaaaaaaaaaaaaaaaaaaatattttttttttttttttttttttttntttttttttttgcggcggggggggcgcgtctgcgccccccccccctcacaaaaccaacaaccacccacccccccccaccaccccacgctcgtcgtatcgtgtggggggggggcgggggggggggggggggggtgttggttgtgtttttctctcccccctcccccccccccccccccccccccgggggggggggggggggggggggggggggggggtcgcaccaacaaaaaaaaaaaaaaaaaaaaaaaaaaaaaagaagggggggggggggggggggggggggtgttttttttttttttttttttttttttttttttttcccccccccccacaaaaaaaaaaaaaaaaaacaaaccaccccccccccctttggttaaaaaaaaaaaaaaaaccccccccccccccctctttttttttttttctcccccaacaaaaaaaaaaaaaaaaaaaaaacactgttctttttttttttttttaaaaaaaaaaaaaaaaaaaaaacccccccccattttttttttccnnnaaaaaaaaaaaaaaaaaaaaaaaaaaaccccccccaaaaaaagaaaaaaaaaccccccccccccccccccnccgagatgaggaaaaaaaaaaaagaaagaagaaaaaaatntncnnnnnnnnnaaaaaaattttaaaatttttttccctcccacaaaaaaaaaaaaaaaaaattttttgtggaaaaaaaaaaattggtnnnnnnnnnnncaattttttnnnnggagtattctaangggnnnnnnnncaanggccctttgggnnnnnnncctttggnnnannannccctgaggannnnnnnncaaagactacagggagagggtaaaagcttttnnnnnnggggnttagtatttttgtatctgcatattaaacaaattttttcacgatctttgcgggcaaatatgggacggagccccgaattaaattataaaatnttttccgggaagaccctcnaactttgggtaattaaacaanaatatttgaaatggtgaaaaatatcttcgtcctgtgcgtttggtgacgcacaatcaattgcaaacgaaaacctgtcaaaccattcggaaattctgctcttt

SEQ ID NO: 23548 - DNA, 1589 bp, Heterodera glycines
  unsure (1)..(1589): unsure at all n locations
ataaattttcattttttcccattttttcattcttcgttattcgtttactgctaatgccaaattgtttcttccattttggattgtttcacggtntacgccaattttcttgccaatttcttcataattttgttgccattctnttcttgaatattttctattttgcttatattcatttgacatttcaataaatttttgaacaatttcaagtttttgttcatcacttttggatttgtgacatttatttctttgaagaccaaattctttaatccattttttaatataattatcatttgtccccaaactcttcgctattttcgtgtttattttatcccattctttttttgaatattttattcctttttcctttattttctcttttattttataatattttgaaatgatttctcttttattctcttcatttcgttgtttttcttctttttcttcccatttttctccaaatatttcatcaaatgatttttgcggtagttttttattttccgttttaatttgatgaattttgatgatcaaaaatataattggaatgaataatatgcgtattttcatcttcttaacaaatttttttaaataaatttaataaaaaaattttttcttgtataaatgtaatttttgattattattttgcatttttattgatgtaaaaatatcgcctttctactgatttcctgtaaaataaaaaaaagtcatcctaattgaaaataaataattattttaatgattaatattttattctactgatcattgaataataaaattgtgaatatatgtattattgaaattttatatatttttaaaagtcaaaaagaggctttcttttttaaaaagagagattctgtcggagataaagaagcaaaacggcaagtgaaagtgacaacaaataaaattgcttaaaatccatttaaattaaagcatgagtaattatggcaaaaattattctgactcattacaaaaattgaccatcacaattttttttgaattcttgaacaaattcagaatccgacaaaagtatccacaaaaaaaaatttttagctcatttatcatccaaaaattccgatctatatggacaagtggactgtgtttttgaagatattactttcaattttgctaaatttgaatcaattaccggctggtaccggtaatggtacggctctactttaatttaaataaattataaatttagtttttcaactttctgattcttggcgaatttttttagagtcgggatggccgattctgaaatccatttcgtccaattccaaaccccggacccgattctaaccaaatgtcgaaaattcatttaaaaccaaattcacttttttgcaaaaaaattcctaaaaaacaatgtgacggagatgtctttgaagaattgatgcgagactgggcgtgaagtattagcctctcgagtgcttcatttcagggatggcattccgaggcccaaaaattttagaaaatcggaatttcggggtcaaaaaattttcggaaatcggaattccgagggccaaaaaattttcggaaatcggaattccgagggccaaaaaattttcggaaatcggaattccgagggccaa

SEQ ID NO: 23549 - DNA, 1288 bp, Heterodera glycines
agaatttcgacaaaaagagagcaaaaaaaaaaagtgttgcgatatttgaggaattttaaaataaaaataaatggatcctcggctacctacgcttcgcccactcgctacgcttcagatgagaggtataagaagttaatctcaacaaaaaatattttatgattattctcaaaaaaaaaacattcaaaattttgatactaaaagagattttacttctaatattattcgaaataggttttatcaaaaaatttcattccttgaacaaagtctcaacatccattcttcaattgttcgagcagttcaaaaaatcggggccaggatcagagcttccatgagcatcatcaggaatgctaaagaaaattatcaacaaaaattaacgaatatatttgatacaagatggtgatggaaaaccactttcggagttgttggttcgtcgttcctaaaattaaaataataaattgcgcaattaaactacatcctctttttttttgcaagttttcttgctcaattccattattcttccaaaaaaccgaaaattttacaagctatagctattcttttttcaatagtacaatagttaaacccaattttgtccaagatcaaggctcttctgcagtttagccctcaatttttttttacttttgaaaacaaaaaccctcataataatgctaatttgtaggttttcggattcgctaatcacaatctggcatccatttcgatccatttccaatccatgacagccaaaattaattattcactataattcagagttattgcccaaaatcgattcaaaattcggatccaaaatttagaaatgggtcgaaagattcgtgatcagcaacttcaaaatctaattattatggatttttgttttgtggagagtaaactgctaaaagcccaagaccaatttaaaaaatgtggggttttcaataaatctttttgtaaattttttgctagaataaatggagcaaaaatggtggggtaaacaaatgtagaccgggcccttcataattatggcagtttaataatttctggattcaaacatgctggtcatccatcgcagtcgcaaccttaaaaaaagcattcattttaattttcatttgttgctatttttgttcaattccaaaaatattttgaacaaaaagaaagttgtattctctgtcgttaaaaattatgaaacagcaatttttcatgaaaaaaaaaatctgaaaattaaaattttttcttcgaagattcttataaaaaacgttgtaaattttttttgtttgaaaatttaaaaacaaatttcggc

SEQ ID NO: 23550 - DNA, 1083 bp, Heterodera glycines
cgtgcatgctctaatttataatgaaaaatttcaaaatattattataatatagactcaagatattgacgaaatatgaacaaaaaatattgaaagatgaataaaattgacaaaattggggaagaaatttctcaaaaactgaattcaattcgaaaaattttaaactgattatatttttgagacaaatagcgaaaaattaatttaaattcacaaaaacaaaaaatattaagattcaacagtttttttttcttaaaattagtgacaaaatcggtgtaaaaaaatttttcttttaaagcgatcaaatacattccaatgttgtagcttataagtagagaccaaaattttgaggcatatgcccttttttttgcgcactagtttcgatatattatgcataaaattccacttggtttgaggattctacgttgacttttattatacttttttaccttttcgggattttcgtgccttaaatgccttttttggcattttatctttttggtgcctattttggccttttttcgaataaatgtaataaaatttcaaacaaaattttcccggtggcgcctatcggcaccgccgagtcccaatttagccttattatttaaaaaaaaaattttgcctttaaaacgtcttgaaaaatgtgtttaaaattttaaatgccttttttatgtctttttcgcgatttttggtgcctttttttgcggtctctacttataagactgtcagtcaaaaaatgggtataaattagagttacgacccgagcagatcccatacccggatacccgggttttgcaagagccggacccgaaaaaaattaaatggccttatttatccggcctgtggccctgtggtcattcattccattggattctattctttccttactcaggttcaattcgttcgcacgcacggtgtggtccagggatgtgcctaggtttcgcatttcgcctttcgcattattcgcattttttggcgtttcgcatttcgcatttcgctttttggcgcgaaacgcgacttttacacccctaagaattggattaaattcccataaaatttttcaaaattttacctataaattggctaatt

SEQ ID NO: 23551 - DNA, 1679 bp, Heterodera glycines
  unsure (1)..(1679): unsure at all n locations
atccggaaccccatcagtttcggcctgaacgttttttgcattaatgggacagctgaagaaaagtgacgaattaattgccttcggaattggaaaacggtgaataattttatggctttaaattaattaaatttcaatttaattaaaatgcaattatattattcattttttctttgaatacagacaatgtgccggagaaccattggccagaatgaccttatttttgtttgccgccaacttctttctcgcatataaagtgccaaaaaaaaaatatataatataaataaaaatgattttttaataaaattacacttaaaattaattgaataattttaggtgcttccgtctgatcccgaaaatccaccaagttctgataaaattcctggcttatcagttggtgcacacgaattcacgtgccatgtgatcccttattttgatattcagtgatttacgatttgttatttgaaatttatgatggatgaatatatatatatattttttattatttcatttgaaatttttcagcaaaattaaaaatttttacagaatttgacatatttttccattgctaggcaaaatgccaaatttaaatataactttaaaatcaagtacatttgaaaaaatcaagtgcgtacattgaaataaattacaaatctgagcaggaccctgtagtgtatagtagagcccggagcaggaccggatcctgcgcaggattttgcaggatcccagtccgcaatcctgcattttttggaaaatgcaggattgcaggatttgcaggattaatccggccggatccggtcctgcaaaaatttttgaattccaatcctgcaacaggatccgcaaatttgaaatttccgggctctagtgtatagtatgtaaagagttgtggaaaattaacaaatgtttaaactaaaactaaactgcgctttcattaaaaaccgtcaaaatgggcgttactcaaaaaatccatcaaatggaaaattttttgacgaaaaattatttataacttggtcgcgagtaaagaattgaaaattcttgatatcatttgatacatagctctaaatttgctctattagttttcaaaatttcaaaaatttgtcgactttcaaaaagttatggtcagatattttaagttctttataaaattttttttgaaaatttgtaagctaaaaaacatttcgggctgagctatcgcatgatataaaaagtagcaaaattaagcaaattttttcaaattattttttggtggtttttgagtgacgtcataaaaaccggtgaactttccaaaaaagccatgtgtcaagtagggttataagttgtatgcactaaaaaatgccaaatatgcacataaaatatgcactaaaaaccccccaaatatgccctaaaaacccgaaaaatgcccaaatattcactaaaatatgccttaaaaaactgtctaaaatggcttttaacactcaaaaaatgccaaaattgtgtataaattaagaattgacttttaaacaccaaaacaagggctaaggagcattttttagacaattgcaaaaatattgaatttccaaatttataattttttattatatgctaaaacaaaattacatttttatataaataaattttgttccanaaagttcttacaaaaatttaaaaattttttgatttgaagggtgtatttaaaaaaaaat

SEQ ID NO: 23552 - DNA, 1643 bp, Heterodera glycines
cgccgacctctcaccaatcactcggaccgttcgaaaatactttttgacccaccatccctttttcgaatatgtcaccagctcccaaaaatttctttttcaaaatttattatatttagttttttaactattctttttatttgtgggatctcgcttattgaaatgcggaagttgcgggattaatcccgcgggatccgcaaatttgaaattttttgtttctaacatcgaatcattaattttttgcgttattccaaaatctgccaaaaattgtattgtaaacgataaacttcacttgaagttgacacagtaaagcaatattgctgggtgaaaggttcgaagaaatttcaaatttttacaaaacataaatatgaacatttatctaggttctttctgagaaaattggataaacaataatttttgtttataatcgcattttatttgaaattttaattattttctttctttttcttcgcctttctctttgggcattcattaatttgctccaagtgaaaaagtaataattctataagaataaaaattctatcctttacctattcttttgctcttcttccatttttgggtcatcgttttgccgtgattaatttttgctttgcccccataaatgggcgaacaaagtccgtaggagataaattcaaacatacataattatttaggaaatctccaaaacttttttacttttcaaaccctaagcactctgggtcatacaataatttccaattgaataaatttaattaaagagtaatcaaataaaattgttgttgacttcaaccaattcgatggacagcagcgatttgaaaccagcagaaaaaagtggtgaaataaacggttaacagataaaaccatttaatttataaataaattaataaaaaaatgaaattatgatcattagggcggggaatatatggaaatccatctttttttcctggactgtcggggttcatatttgtccatattttggcatttttccaaaaaacctctattagaaaggccccatcaggtaaattggcctttttgactcctaaagaccgaaaatttccgaaaaagatatttttagcaaaattttggcgaaaatattgattaaatttaattttattaaaaattggttaatttatgtcaaaaataagcaaaaaagcttaaatttcgcttttcaggttgatttttcgctataatgagtaaacttaagctgtatcgtgttttttcttctaaaatgatttttaataccatattttgccatttttaaaagggttattttgcgtttagcgaatttgaagaaatttgagaaattataccctcaaattggaaaaatttatgttcaatttttgccattttatgtccatatttcgctatttttggtccatataagtcaccgccctaatgatcacctccttttaccgtttttcggtccacggaaaaggaatcaatgtgaccaatcctaattcccaacttggtgaattttcatacaatccagaaatggattcaacatttcaaaattggctcgaccgttatgggcctttcatccaagttgacgggaaggacctccccgatcagatgcaagttcggctcctgctcggcaagctcggatcggaggagtacaaccgctatgcccaaaagggtgcttccaagca

SEQ ID NO: 23553 - DNA, 112 bp, Heterodera glycines
caaagcccaaatcagacgcctctcatccccatcagcagagggcatctcatcctccccgtggccaccctctgtgtcctggagccacgccctccggctctgattctgtgcagct

SEQ ID NO: 23554 - DNA, 1939 bp, Heterodera glycines
agagtcaatttctcattttcctatttttttgctgacattgtatttttctgtcatttttttgtagatacagaaacaggtagaccttatgcttttcctttactgttttggaattttgtatctgaaatgatcaattttatttcattgatcaaaactgggttattcgattgtaaaaatataattattaatatttgttttaattttctattaatcacaatgagtctctgtatatgcagaacaacagcatgggtttaataataaattataacattttgatttaaggaaaaggcttaaacatcgctcagacaattttcttggcagcattttattcaaacgtggaattgatcaattttcatcatctccgcttagcgataaaagtgatcgtttttcatacagtagtccatccaatttgtctgatcaccgttcggaagaagcgaaaagcaatgcatctgaaaatgactcgtccatccttagtgaacaaacagagaatgaaatcactccagcagctgactttgattatggacaaccgagcaattcttcagaacatttttcgtacagtgatgaagaaatgtcctacggtagagcgactactggagcccatgacaaaagaacacaaccaaatacagttgaactgagcagaacaccctccgataaagtggttagaaaatttggaaaagtgtccaaactgtcaaatcttggcgaaaagttgcatctatggcatttggaaaaaacattggatatgcgtctttggaagttaaaaatgaaggatgccagtatcgtaagacatttttccggtaaaaagcatgatcaggcttttccatccgattcttcgactggatcaagcatcagcgaccaaaaataaggctttgttgaccacaatgaatgatcaattagccaattactgtatcattaatttgcaaaattaggagaatagatttatttgcttattttcttgtaaaactatttctatgactggtttaaattcgtaaaaataaatacttagataaaaatctgtgtattaaatcgttgagagttcgaagaaaatgatccaatttttattttgagaaagaaaatttgtttaaatttgttttgtcaaaaaatctttttttatttttcctaaaattcaaaaatatagcaaattacattatacatttttcatattttcccggcggtgctgactggcactgctggatccaaaatgcccataaattttaaagtttacccagctacgtatttcccgtacctcttcccatcccaaaaagtaaaaaaatgcatcgcaacgatgggcagtaattttttatatataaaaatatttgaaaaaactttttattctaatgagaaaaaaaattttagcagaaaaacctttgcgttttttaccgaaacttcaaaatgttaacaaaatgtccgcgccctgagtggactcggtcaaaaccggacacaattgcgaattacctaactcccgtaattacggattacgggttttttgaatttttcataattctattctaagctttgtcgaaactaccttgaaagattattggcaaaaaaccttccagaattttggaaatagtccttttatatggtaaattctgcaaaatttttgaaaatttcctaataaaggaggcgtctattcggttatcatttttcattttccattctaatgtatagaaaaattttaaaagcatgttgttatttaataatgatcatttggatgcgatttttaggcaaatgtctacagaatcacaaaggaaaattagggtttttgaaaaaaccttaacaaaaatgcaataaaacgaaaaatacacccctaagaaatggtccgaaaaaattttcagaaaatacactcttaagaattgaaaatttttcccaaaaattgatcctcaaaatttaatattttttcataaaaatttttggttttcaaatttgttcttttctgaaaaaa

SEQ ID NO: 23555 - DNA, 744 bp, Heterodera glycines
ttgataaattacaaacgtggaaatgattacttcgaaacagaatttggtggccgaatgtttcgtcaatgaatctgatttgttggtcaatttacggatgaaaaagaagaaaaaagcagaaaaagaccgttggcgtaaaaaacgaaatgccaaagcattcaaaaataaaacaaagcgttttcaaggttagagatgtaaaaaaatagtacgacaaaatgagaggaaaaaaaatacttttttgtgtttattttataacttttgaattaggtacagtataaataatgcattgacataagccgccagggaaattgttgaaattaaaattttttttaggaaattgggtaatttttcaaaaaaaaatttccggaccgggccaaagggagcgggggcagcggcactgatgaggtggatgtaagagcaaatgggtgggtgaggcagttcagcagcagcagatgaggttcccacgaagccttgtgccctgtggggcgggcgggagagtcacaaatgtattaattactcttatccccccccccctccccatctgaaatgaaattgtttgccatttttaaaatattctatgttaagaattttgttaattaattttattattgagtaccttttttatttgtaattagccttgttatttaactagcggggtcagcgccttcggcgcatcccccgctaggtagtacgattgtattataggtttatgaatgataaaatcgactggctcggccgcttcgcggc

SEQ ID NO: 23556 - DNA, 1423 bp, Heterodera glycines
agatgtaacttttaggtagaaaaaatgcataattaacgatttgaaaataaagttttgaaaaaattaaggattagaagatacaagtttttaagccaaaacataattaagcgttgggagtatttgtttttaggcgaaaaaatgcatagttaagaaaaggaagatataattaacaaaaaatatgaattttgtggtaaatttgggtgtagtgctgtgtgtatgtgttcaccagtacgtgtgtgctgatgatgatgatggttggctgcactcaccacgcccagtgttggtaatttcgtcaatgctttcataccatttgcagcctttaccgttaaattgtaaataggaagagttggaagaatgtgaagcttcacttttggtgtcctcctcctcctgctcctcaatttcagtgaacaatcgaccaaataatcgccctccctttttgtcgtcgacaatttcaagcagttccatcggataataacggtcctcaccacgcgtaaagccttcaatgatgcatggcacataggggtagtgcaatttgacacggtgacgagcataaaaatgcgctgccacgttaatgttgaacggcttacgcagacgtccatatgcgggttcaaatgccgcgcctcgttcagtcattccaccaacgaggaaagatttgcgcattccattccgatccttgtatgttgtctggacctttttcccaatcaattgctgcaaaactcggactcggtcctctgggtggttcagtcgatcgcgaagtgactttgtcgggcaggagagaaattgggcacaaaattcgctgacgagaaccatttcagatttttttatgtctgaatgaagaaattcgagcggcttttataccggtgttccaactcaaatggataagctccgcccctttttattttattgcatgcataattaatgaatgtgaaataaattacgaaaataattaagcgttggaaaatgtaacttttaggtagaataatgcataattagtaggtggaagacacaattttgaaaaaattaagaaattgaaaatataatttaactgttcaacattttatttaacattattaatgaatacatgtcagggtttgaacaagttttgagaatatgtataaatttatcgaatgattttccgtgggacatgtggtaaacaaacacaatacaatggggggcacatgttgatgtcaatggggactggtaggcttcaatgtttttgtgtaaacctttgggaaatttatttaaaaaggatgatgaaatacttggtggtatgggaagtgcaaggctatcaaagtaaatcactggcgcgtccaagtccctggcgtaaatggcacaccaatgggagccgcctttgtgatgggggtcacggttcacaatgagcgccgcaggatactgtagggtggccggcgaaggcaattggtca

SEQ ID NO: 23557 - DNA, 824 bp, Heterodera glycines
  unsure (1)..(824): unsure at all n locations
attaaatcactatgaaatacaaaatttgctatagtcattaaaaggtgctttaagtaaaaatanaaaatatggaaaacctttaaaaaaaanggaganatgatnangagnanagagaanngaggggagnnnnnaannnnggnagagnnnttttccgatgatgggntttttntttgtngtttttggtatttngtatatgaaattgattggcagagaaactgctcggttaattgtcgtttttttctcaaaattctcatttttcgatttgttttttcggaattttaacggaatttgtaggtccaacttccgtaggtcttccagaattttttcttgctgcttacgtcgttccaattgtttcctcgacggactaatcaatttctgttgtgcatttgtctgatcacttttttctgccattgatttgaaaatgaattccttcgattgactttcggctttatattctcttttttcatgaataatttcatcattttctggcgaactgatgcaattcggtcgtaaaaatacggtcaaaatggcttccagaaagcgattacgataaacggacggatgtttgaccgagtttggcttctaaacatcatttaagttaaaaagaatttcaaaaataaattatttatttattaataaaaagatacttaatttttaatattaaaaatatagctatattttttaaaaattacaataaaaattttttttgttctttaattaagctaatttaagtaaatctaaattaatattcttataataaataatttttacatatttttgccgtgtttctggaggaaaaagaagccatctttctaaattcaaaa

SEQ ID NO: 23558 - DNA, 839 bp, Heterodera glycines
  unsure (1)..(839): unsure at all n locations
ataaaagataaattttcgccccttaaaaaaaaattaattttacttatttgaaactctactttttgtaaaatttgaacgaattacaataattaattttagatattacaaaaaagctggtggcgtcgattgcgacgcatgagaatttttttgtaaaatttaaatcaaaaatctattcaaatggatttagcctaaaaattcactttcataaacaaaaagatggaattttttttaattttaaaactttttctttgctggcttcccctgctgctttcatgccgatcgacatgtcgcataaatttttaattttcaaaaaacgaatttcaggcactgcaccaaggcttattgaccggttgaaattatgtgatgctttatgttgttcataggtgtaagctgaaaattatttatttattcaaaggaaattagtaaaggttcaagttaatgaatatttaatatggtgattcttttgttaataaatttcaaatttctaaaaaattggtaacaaaccataaaattcggggtgttcgcaactgtttattaaccggtattctcccgggtttcggttctgtcaattttttggatcccctggttttcggttatttcggttaatcaaaaattttcagatgacataaaaaaaatcattttaatatctttaaattgagtgcaatgttatataaattttgtccaaaaagtctaaatttgaaaagaaattctgcaattatctttaattattcaattactttcgtcctcctccaattcgccaaatggtaaatttgttgctgacggaggtaaaaggttaatttactgttccgantgattgtgattgtttttgctgctccttt

SEQ ID NO: 23559 - DNA, 1116 bp, Heterodera glycines
cgtccctttttcctcctcaccggcgcttgttctccgcttttccgttcattattttgctgctgctgccgctgctgttgttcactgttttgtgctgccaattcaatggacgatgaactcggcacattaaacagtgaggcgagagtcgccggtgcgtcggcgagtgccgaggcgaccatcgaattcaacgaactcttccgtttaggttgctgctgctgctgggtttgttcctctgctgcaactgtttctggtacagcttgattttgtgggtctgtcgctgctgtcggcgtttgggcgccggacgaaggcggcgtttcgcaggaggaaacaatggccgagtgcttggtcattttctgaaatgaagaaaacaatttaaaatttataatcaaaaataattaaaattttatccagtctaagtattttgtgattgtgcggatggaatggccaaatacaaaaaataatacgtacacaattcttaagccaaccgtttgacttaattctcagagaaaccatagaaaagatggcttatgaaaaggtatttatccatcgcccataaaagagtgaattaattgggcggtgccgcctctttcgcttgtccaccaaaagatttaattaattaagaatttgactcggaattgcgttttccttggttttcttgagaaattgaataaaaatatgaaaaatttgaggatttaaaagccatcggccggttgtatgcccgtaccagaaaaaattcgagggacgggcactcgaagggcattttgtaattttcctaaatttttggtccgtgggaaaaacgagaaatttttagccattttcaccaaattttgttggtaaaaatataagataattgggatccgggggtgccgtgccgttaggcaccgctggggaaactttagagacattagggtctaatttgttaagaaaattaggttaatttaaaaattacccatttttcatttccggcgggggcgggcaactgtccccctagttactggccggacataaattttaaataagcgcaccccccccccccccttaaagctgtaaatctaaactaaacgcacaatattcttccgttgctttgttgtcgtcttctgttgttgttgttgcgcctgt

SEQ ID NO: 23560 - DNA, 821 bp, Heterodera glycines
  unsure (1)..(821): unsure at all n locations
ttgttacctatgggtgataacggaagcgatgttttatttaaaaaccggaaccgttgttacatgggtgataaaggaaccgatgtcttatataaaaaccggaaccgttgttacctctgtgtgataaaggaaccgatgttttatttaaaaaccggaaccgttgttacctctgtgtgataaaggaaccgatgtttttttaaaaaccggaaccgttgttacaggggtgataacggaagcgatgtcttatataaaaaccggaaccgttgttacctatgggtgataacggaagcgatgttttatttaaaaactggaaccgttgttacctatggttgataacggaagcgatgttttatttaaaaaccagaaccgttgttacatgggtgataacggaagcgatgttttatttaaaaaccggaactgttgttacctatgggtgataacggaaccgatgttttatttaaaaaccggaaccgttgttacctctgtgtgataaaggaaccgatgttttatttaaaaaccggaaccgttgttacatgggtgataaaggaaccgatgtcttatataaaaaccggaaccgttgttacctctgtgtgataaaggaaccgatgttttatttaaaaactggaaccgttgttacatgggtgataacggaagcgatgttttatttaaaaaccggaaccgttgttacatgggtgataacggaagcgatgttttatttaaaaaccggaactgttgttacctatgngtgataacggaaccgatgttttatttaaaaactggaaacgttgttacctatggttgataacggaaccgatgtcttattt

SEQ ID NO: 23561 - DNA, 1353 bp, Heterodera glycines
ttagcattgccaaatagcagaataaaacacacattttcactaactgccgcagcaacttggaggatgaaacggtcaagccaagttatcgagcgaggcctcagagaattgccctcgagaaagcccaaatgtccgccatgtttaagcaaaacaaaagcatggagagggtgcgtttcgcacaactgccgaactggttcccaaagagcttcgggcacgagggggtcgtccaaagtgttgatgaaaatctgaaaacaattttatttattttaataaaaaaatttagtgaccaaccataggaatctttatgtctttaatgcgtggaaggcagcttatatgggaatagtaatccgaaactgaagcaaagttgtgcacccgacgactgtaaaattcgtcaagccaaagaagcgaagtcgacgaccagattttctgaaaagataactaactgtagctgttttttaaacaaaaaattggtaaaagacaattcgttaaagccactcatataaccttaaaatgtattttaagttttaaacttacaaatggagataaaaccaatgttttttatactaattttaaataatttaattacagacccaaaagacctcgaaaccccataaaaagtagttttacacgaatttttgaaaatttttattcttttgaagaatggggtgaataaaccaaactattaccaaattttctaattttttttctttctacgtttgaaaatattttttaaaataaaaatttttagttttcaggacaacaaaatccatctcaacccacccgagtgattgcttactcgttcatccaccaatcccgacttcacatggggcagaacaaccattgcgtaattccgtcgaagtaatcgtttaacactttcagtgattatgtaattgtacaaacgtcgcccgccttgccaatcgaataaaagggaagaagcactaaaagggaaaattaaaggtgaaaaaaacgactcaaagcactccgaagcgcaatagccttggcaaacggaaatgccgagaagaatgcgcgaagaaatagaaggatcgagtccagaagccaaacagttagtcagcacattggcacccatactgaagccaatgccaatgaaataagttcgcgggtacaacttggcaagaactcggaacatcgcttccatttcaccatttccacctgaaatttgaagcgtataaaggaggaaattaagggacgaggcgagggaagcgggaggataaaaataggtcatttaaaatgtttaaaaataattaaatgttctaaattcgaataaatcaattcatgttttgacttatcctttgtattatgtaatcagatacaaaactgacttttaatataattctt

SEQ ID NO: 23562 - DNA, 1434 bp, Heterodera glycines
tttttagcatctaaaaaacaaaaaaaatttaaaaacttattttcagctattttggcgttttgcccaaaatttgttaacaaaaatgcaataaaatagaaaaatacatccctaagaatcgacccgaaaattttcaaaaatacacccctaagaaatgaaaaatttctcaaaaatttctctccaaaatttatttatttatttcttgacaagaatttgtgatttaaaaatttttttagctcaatactgatttggcctaatttttttacttttttgaataaattttgtttttttacaccccctaaattcggaactttatgccacctatttttcatttttagcacctattttggggcttttttagaacctaaaacctacctattttggcagtttttagcacctataaatatcagccctaattaagacataccaagtgagaatgcaaaaggttgaagagaaaaaatgatttattcttttcaacaaaagtttgttttcaaaaatatgtaaatttgtaacaaagcagaaccgatacaaagcttaaataaattcagggctcccaaatgaaattttttagaccagcctttaggaaggatcaaatttttaaaaaatttacatatattgcaaaaaagcgcgagcaaaaatgatcaaatttgccactttaaagcagcaatattctgataaaaatacacatggcagccctgagtaaatgacataaaaatagccatgctagtatttatacgaatgatataaaacatttaattattttaatcaatttccaaaaaatgacaacgcggcattttcttggttagcttggcacccagaactgcaaatcccaacaacagtttgcgcatttgtggctcctttggtcccatttcagcgcacggtggatacctacataaaatgtcgggattcgagattcggaggcactgatatgcattattacggctcgttctgcctagattgtcaggctttgtgcgacaaattttattcgatgttgttgaatgagacgtgaattttttcagtcaatttttttatcactaatcgggtaattaagagaagaaaagcaaaagcataaaataagttctgaaaagtatttggacagttgctccaaaagattattatatcaacgaataaaaattttaaaagcacaaaaatttaaatgaatgggattttatgtttttgttgtgtctttgtaaaaactttattttcacacacaacaaataataaatgaaaagggaataagaagtgatgagagaagtcggaagaggaatgagtttgaataatgaatgggagaagagacgagggagagaagaagtgacgggtatttatgcacttggtctgtgggagggcattattgattgggtacagagtacaatgtttggaagaggaaaaggaatgcataaagaaataaataataggtccatgattacccacacaaca

SEQ ID NO: 23563 - DNA, 409 bp, Heterodera glycines
aaatgtctgtgtttatttgctgagttgcggacgaatttggcggtggagggaaagtgaattggcgagcatcggcataaattgggatgagaccgagtcggtggcaaagcacttcgtcctgtgaattcagccaaactaagaaaaacggaacaatttaatgacttgaatgcaagaagtgttctggtagaggaacaccttctcgatggccatgctcggcacctgaaaatcgaatccccggtcaatgccccaaattcgtctcgccaacctccgatattaaaacgcgtctcaaagcattggcaatgggcgcttccacgttgaccaggtcgaactccaagtcgagtgcgtcttcactttggctgaccattcgcagtgaaatgtcatcacaatatttgctcacgtcccatgccccgtc

SEQ ID NO: 23564 - DNA, 1632 bp, Heterodera glycines
  unsure (1)..(1632): unsure at all n locations
ttattttttgcaaaccaaaggggtacaccacttttgtttttcccttgctctgtttttttcgactccaaccctatataagtgccaaaaaataattgtatttttcaaaaactgccaaattaactgttgaaaagtttcaacaattgttgtgaaacaatcaaaaataataaatgtattaacaaattttaaaatccattaaatccttttccattcctttcactcggccattttcctcgctaccaaaatgtacattccgtccaattcataaaacaattcgttgtccaattggtctctgttttgttccggggttttcccctttcatttcgaattgtgccgacctttctaaaatcagtccggcaccccgcaaacattccatcatcagttttcgactgacgaaaaggcatttgaactgtcggccaccaaaagcacaccaactgaaaaagcattggaaaagttcaaatatttaatcggagaaggccaaaaactcgaaaagaaagcaaaaataaattgtaaaaccaattaaaattattgctccgatcacaatcaatgtttgatcagttagttaaccttttgccatttgacttttggacttccaccgaattgtcaaatggcttttgcccgccccgcccccctttttttacgtttcctccaacactccgcccattattagcactccgtcgggcgcaaatgggcactcaaatgattaattgccatgcgtattcgtagctgctcaagcagcagtacttcaaggtgaagaatgttgtgatggcctgtgggagaattgaatgaaataaaaaatattagatttcttactgtccatcggtgggaaattccgaaaaagttttgtcgcgtcggattttgtcgggggatttgcacggagggaaaggaatggcagtcgcagaagagaacggcacgaatctgaaggaaaggggagaggggaagggggggcatattcaagggagggcggggggattaacgggggggccacctnccaacgcaaaattagtgcccaacccaaaaccttggggaggcaaaagggaggatggacaaaagaacaaattagggcaattaatcgacaccctttggacggtcttttgcaaaatgacttctcgcgcaccttttccctcgctttctgctccatttgccttatttcgctcaatgggaccgcctcacgagcagcgattatctgaaaatgtccgcggttggactgccgccccccccccccctttgatgcttttaccctcattacggtgctccaatcgaatttgctttgtccgctcagccattggcacaattcgtcacggttttggggcagataatccgccagataaatctgtcggtcgttgtactgcttcattccccgtttcaaagcattgcttttccctcgcccattttcacctcttcggccgtgtggcgaaagcacaccgccacgtgaatggtggggcccgagccgaagtcgagcagcgaagggagggagccgaggcgggcgacgatgttgggcagatggaacagaaccatttgcatggccgcgtcgtccacacgcgcgtaaaagtcctaattgacggggcgataaaagtgaccaaggaaggcatttgccactttcagataggcatcggtgtcgaaatgctcgtggaa

SEQ ID NO: 23565 - DNA, 946 bp, Heterodera glycines
tttatgaagatattccggacaaaatttttgaaggagaggcacattccgattatgccagagggagggtatgagagagctgaaaatcagagtaaaatagcggtgaaatattttgagtggcttgcccaaagaaaaggagtaaaagtgcggcatgcgtgtaacggaggggaagtagaatttggtgggctgaaagtggactgtgcgattggggcagagaaaaaaataattgagtttcaggtaaaagtaaaaatattttctttttaaacaatacttaaggggtgtgcatttcacgggtgtccgagatgttttttaccttggactatagcgccaaacggacggacaatagaagagaatcaaagtagaaccgaaattcgcatggaaattttgagggaaaagtgcaaaaatttttcaatcggagaagtttgggtagaataaaacatttagaaatatttattaattgttagttttaggagtgtgacgtgaaagaggaattgaagaaaaataaggagatgaaaaaattctttgaaagtgtgccggacaagggaccgatcaatccgagggatgcttatgccgggggaagaacgatgccattttgtttgtacgcaaaggctaccgaagaaatggagatctcaatgtttgacatcattagtttgtacccctttgttaattatggtaaaaatctgcataatttttgttaaagtttcctttcgcttaagacaccccataccccgtcggggtcccgaaaattatagtgagcaggaatttcaatgtgaattggacagtgctcgatgacgtgccctatgatggacttttgaaagtaaaagcgatcccaccgaaaaatcttttgtaccccctcctccccatgcacatcaataagataaggtcccaggggccggggtccagacccctgaacctgattaaaaaaacatacatatttgcttttcatgat

SEQ ID NO: 23566 - DNA, 1975 bp, Heterodera glycines
atttgcgcgtccatgtgggcaacaaaaatgcaacagacaacagcaacaacagctcggccaagtcagtccggccagccaatccgacaaatttgcagggccgaaatcccgtgccgaaaccgacaaaaaaatttgcaggccgaaatcccgtgccgaaaccgacaaaatttcctgggctcaaacaatacataccaggatataagaatggggatttccgacattttttgggctcggaattccgattgccaaaaaatttttcagcatctctatgctttggcattagcacaatacttcgatttaagcttatattttgtttcgacatgctgctataatcatttttcttcggtatttatggagctggaataaaaaccctatatttttccataaattccctcaattttaaaggacaacaacgggataacggagacactttatcgtcacaagaacacactggaaactctgttccgatttatggacaaagacaattcaggcaaggacaaaaaattggcatttttcaaaaattttcaaaattttgttaggcctcgtttcaatgaaagaatttatggaggcgtgccaagtgttgggacaatatgccaacattgacctgaacgaaagaagcattcaaaacattgcggaaagcatcgatttcaacaaggacggattcattgacctgaacgaattgctggaggcatttcgactcgtcgacatcggaaaattgtgaaaatttggggaaaaatttccggatttttgtttcactgaaccttatcaaacctgatttgctcattttataaccatgatattcaacgattcacaaaatgcattcatatgtattattttaaaccgatgtaaatatttatattaaaaatattaatttttaatattttgtaattttcgggaaaggtggcaggtttttgccattttcgcgggaattaagttgactaccttattcaaacagctagttttttgatttggcattgattcgaaaacggcatttaatcgggataaaagccaattgttaattttaatcagataccccaatttgtgagtcatacggtacatcctaaggatgaaaatacttaaccattttagaaaataggagacatctctgatcactggtcagatcattttgaaaatctttacagcccgcttccatcagccttcatttccttcttccatccttatcttctcgtaagctttttcgtctctcatgagcccctgaaaattgggcagtgattttttacttttcggaacaacacaaatttgcccgaactttagaaggagtaaatgtaccacccaccacccgagactttactttcgagcagataatactacaaaatccagaataattttgagactggctctttaagactccagatcagatcctcggattacgacccaaaaggaaaaattgattcaggaatcggaccaatgagtcattaccgaatatctggtcttgatctttatgcgtgtgagtacttgtggccggctctttgtgaatgttgcaaataattgaagtacccaactggccctgaggcttagatagactgctcgggacccgagactcccgagcgcatactgattgcgagaaccaaacaattgatcctgagatccaggacagggatcccccaaatctcatatagcactccctcgcgagcttctatttcacttccaccccatgcttatataacgagcttacactccctcacgagggcttatataagggcttacacccgctcacgcctagtgccatttgtcattacacgatcttccgggattatgttgtccgtcacccgctccgcttcatcccaacgcttcaactcctcatacgattccttcatttgttgcttcattttgttcatttcttcgcccgttgtttgttgtgccatttggtcgcgctctgtgctgctaaaagaatgactcatcagcagattaacaactctgaagaatttttattaaattttaagcaattttttttaat

SEQ ID NO: 23567 - DNA, 1547 bp, Heterodera glycines
caccagcattccaatcacatggcactcaattctcctgcctcctttatcactggtactcaaattcgcctgcatttcaatcactgacgactcaacccaccaacatttcaatcactggagactcaacccaacagcattccaatcactggcactcaacccaccagcatttcaatcactgggactcaacccaacagcattccaatcactgggactcaattctcctgcatttcaatcactggcactcaacccaccagcatttcaatcactgggactcaacccaccaacatttcaatcactggcactcaattctcctgcatttcaatcactggcactcaattctcctgcatttcaatcactggcactcaattctcctgcatttcaatcactggcactcaacccaccagcattccaatcactggcactcaattctcctgcattccaatcactgggactcaacccaccagcatttcaatcactggcactcaattctcctgcatttcaatcactgggactcaacccaccagcattccaatcactggcactcaattctcctgcatttcaatcactggcactcaacccaccagcattaaaaccgacagcggctcgaccgcttagcggcctcgcactcttcttttggcattttcttatggcataacagttcttccttgtttcttgactttttcttacgcacaacatttttcttctatacaaatttttcaaacaaattctcattcattcatttaaaatttcattaccatttacataagcaaaacaatatctttcatatcaaaaccaaatcaatttataacacaaacaacaaagaaagaaaaagaaacatttttaagactgttttttacataaaatgacaaaagaaaaaaatgtaaaacaaaaacatttcatttttcaaagcatttatacaacacaacacaatgttaatattataggattttcttagtgaacaaactaaggggtgtcctctttcttttgttaaatattttatacaataataaatgggttataaataaggaagggatgcgagagtaatttcccattatctctccctttcctttcttttactctcttttcttttccattgcaatttactctctttttttcccactccctccttctcccacacacacgcacgcgtccaacagactgctgctgcacaacagcacgcgtctgttcactgtatgcccctcccatctgccgctgcccgcatagacagacagtcatacagtgcactatttcccaccatccctccctctaacctctacatcctaggaggagaaatcttttaccttctttttctgtgctatttcttttgccttcttcttcatcttaactatttattttcgtctcttttctttatattctcttctttttcaaaacaatttcttttcatctcttttcaaattcatttttaacgcaaaactcaaacaaaacgccacacaaattcaaacacggacacatacatacatacatacatacaaacactcaactttattatataggattatatatatcgtccgatcgtttttaatatttgg

SEQ ID NO: 23568 - DNA, 1724 bp, Heterodera glycines
ccctgtcattgcgctttccaattaaatcttcagtgccgcgcatttgcgaaacaattcgaaatgttgacgaataaaagcaactccgatttacatcttaattccaaataaatcttatagagttcgtcctatttgtgcgtaggatcccgcggagtctacaattttgaaaattcaaggacctaatgccagatattttttcttctaaaaatttctttatttttcaaaaaaaaaaggtcggcactagtcccctctttctgttgcacaaattctgacaatttcttaatttccatcacgagtgtccctctgttgcccatgggaatgttccaatcggaaatccgcgcgtggcttggaaatttcagtggataaagccctggcacaccgctgagactcggatgggaatggaattgataaacgccaacgaattcttccactgacagaacgccggagggaactgtgaaaaacaaaaataaataatgtgatttataaataatataattccaatatgcttttgctcgaacattattgggaaaatattgatcatatggcccagagccgaaatggccaaaatatatgtcaattgatagcttcactgtctgtaatagaagaaaccgaaagaatttttttgcggtaagcaaatttaattgaatttaaatttaaaataagaaaatattttataaaataaggtaaatgaaaaaaactgccttctaagtaataatatttatgttgggaccggtactctattgtccgcccatattattttcattcctttatttctctccccttattctctcctctatctctcttcccttctgtcccccataaatactctgcgtcctctgacctccccgtcattcatttgtcacccatttattttgcttatattgttcaatcaatattcgccctttgtcctccgtccctcttctcttcattatttatttgtgtcttcccaacttgaataaatcctttatttattcactccgccggtttggaatttgacggcacaacagatatttacaattttctattaaaaacaaaaaaatttcggaatttcaatttggttttgttagaaataggtctacaacgagtcaattaataacagttgtggaagattggtacgaggcaataataaatggaaaaaatgttgattgtatttatattgattttcaaaaagcatttgactcagtgccccatgaattacttttatacaaattggaaaaaataggtataaggggcaaacttttgatgtggataaaggactttttgagtaataggacttttcgtgttaaaattggggatgatttatcctccagtaaaaaagttacctctggagtcccccagggatctgtcctgggccctttattatttttgatttatattaacgatcttcctgatgctttgccatcaggagtaagaattaaattatatgctgatgatgttaaattgtatatttgttataaagcgagagttgacacagaaattatgcataaagcgttgcataatttatcagaatgggcaaataaatggcaaatcagaatctcaattaaaaaaacttttgtactttacttggggaataaaaaccccaaagaaatatataaaattgatggaaatataataaatgttgtggatacaattagggatttaggcataaatattgataataaattgcaattttccaatcatgtcgcactaaataagaaagaatgcatatttacgtatgcgttctttat

SEQ ID NO: 23569 - DNA, 852 bp, Heterodera glycines
aaaccaagccctcgggttccaactgttcacgggtgcacgcatgcccattccaactgctcacgggtgccacgcatgcccattcgccaagcctcgggttccaactgttcacgggtgccacgcatgcccataaaccaagccctcgggttccaactgctcacgggtgccacgcatgcccattccaactgctcacgggtgccacgcatgcccattcgccaagccctcgggttccaactgagcacgggtgccacgcatgcccattccaactgagcacgggtgccacgcatgcccattcgccaagccctcgctttccgactgctcacgggtgccacgcatacccattccaactgttcacgggtgccacgcatgcccattcgccaagcctcgggttccaactgttcacgggtgcacgcatgcccattccaactgctcacgggtgccacgcatgcccattcgccaagcctcgggttccaactgttcacgggtgccacgcatgcccattcgccaagccctcgggttccaactgttcacgggtgcacgcatgcccattccaactgagcacgggtgccacgcatgcccattccaactgctcacgggtgccacgcatgcccataagccaagccctcgggttccaactgctcacgggtgccacgcatgcccattccaactgctcacgggtgccacgcatgcccattcgccaagccctcgggttccaactgctcacgggcgccacgcatgcccattccccaagccctcgggttccaactgagcacgggtgccacgaatgcccattccaactgagcacgggtgccacgcatgcccattccaactgctcacgggtgccacgcatgccca

SEQ ID NO: 23570 - DNA, 1273 bp, Heterodera glycines
aaaaccctcagaatttctcaaaaagccacaaaaatcctcattttccaaaaaattcctcattgacctatcaaaaagccacaaaatgaggataaatcctcagatctgggagccctggtcataacaccaaattgctaaatacatgtgatctgatctgaccataatttcggcacaattcacgcagcacggcaccactcggtttggcaccatttgactgtgcagaagactgaattcgtcaagctcttcaacttctgattcagaataatggtattcaacccatgattcatcttccaaattctcagtaggagaggccatcattcatttttggtggtatgtatataaaattcttttctaaatattatgattggaattttaacaattagggagtgcgtattttagtacagtcaggtgcaaaagtaatgcatcaaaccattttttttttttgaaaaaaccagtttctcaaaaatgaatgatgcgaaaatggttttattacgccaaaagatacattaattagtgcgctaataaatacccaaaaactgcccgataactcccattgtcgcgagaaaatttccgggcaaatgagtaggaaaaaagaacttaagcaagcctcttctgttgtcaatatttgcctactttctattcgctgattgtttacattacaaacatatttcgaagaatggggtaaagccggttgtataaattcaagagccgaaatctccaaatgatgaaatcctcacattgcttaatttgaaaaacaaacagaaaaaattatggtctgagtgagcctaattttcagagaaaaataaaatttattttatttttcattttatacttaaattgtcaacaacagcttttttggataaactgtagtgaacgccccgttaaaaaaagggtcaaatggtataccaatcgattcgtctcggggagctaagcatggaaaaatatgtctcgagttgcagaaatgcaaaaaaccggtttttgaaccagttcaaaactcgaaaattgagagatttcgcactctaactttttttaaacgatcgaatccccacaaatttggtaccatttaaaagcttttgacgagctaagtctaaaaatcattgtatgaagtctaacggcgccatcttaaaaccgacaagtataaactgggttttgaaccgattcaatcttatagtgccaattcagtaccaaaagtaatttataattattttaattggcggcgcagggaaactggtgaaaataggtcattttggttattgcgctaaaaaaccgccgcaca

SEQ ID NO: 23571 - DNA, 1167 bp, Heterodera glycines
  unsure (1)..(1167): unsure at all n locations
cagacgcgaccaaaatatcatcaagataaacgaagacaaaaatcattgatcagatcttcaaaaagacgagacatgatncgctggtaagttgctacagcattacaaagtccaaacggaagcaccgtgaattcatgcagtccaaattctgtgacgaacgctgttttttcaatggacttctcgtccattttaatttgccaatatcccgaaaggaagtcgagggttgagaagtatttttttcctcccaatgcgagaagaatgtaatcaatgttcggcaacgggtatgcgtctttcactgtgaccgaattaattcctcggtaatcaacgcaaaatcttaagcttccatcacgtttcgggacaaggacaatggggcttgcccatggcgattttgacggccgaatcaatcctctgctcaaataatcttgaagcatcattgaaactttttcacgatgtgcaaatggcagtggacgcatccggcctcgaattggtgaggcatcgccggtgttaatgaaatgctgagttatttcagtttgtgtcagttcgctgtcatcgagtgcaaaaatttgttcgaaaccaattattaaacgttccaatttgtccgcttcgtgttgctgagacatgccaatacgagttcgtaagatttctttgatttgttcagtgcgtatgttttcattttcatgtgtgacgctgctgacgaagaacggagggaaaaacgaatgttccaattcgtgccattcatcgacatgctcgaccaatgcgacactttcattcgcttccagtgtaattggaattgacgaaaagtttgtgatcggcacagcgatttgtccgtttttgctagatgttaaagtaggctcaattcttagttgctcatccaaatcatttcttcctattacagtgacttctttgtcttcttgtccattggtcattgacaattcgacaagtgtggatgattgaggcagaagtgtgactcgatagattatatgtgccgaatttgcatgtgtttccatcggggagaattcaacaacattcatgttgactttgtcgatcaagttaaatcccaattgattcaaagaatgggttccgaagaagaaggtcgaaaccaaatgaggattgcgcaacaaacatgcgaactcgggccgtttgtgttcctctcgggattgggagaaaaac

SEQ ID NO: 23572 - DNA, 1222 bp, Heterodera glycines
aaatatttttcgtgctctgaagggcctaaaggaagaacggaggccgaaggccccccacgaggccgcgaagcggccgagtgagtaccttgggcgcagaaaaattattaaggaggagggttcattatttatttatttttttacaaaattaattcataagtatttttacagaaactgctctgaaacgcaccaaaatttatttacaagttgaataaggcactctgactcttatattatcaaaaagggagatgaataaatatttaaaaaaatttttaattcctttttaaacatgccaaaaagtttaggcttaactttttttatataaactgatcagaagcgcaccagattttgcaagggcatcaaaaagacaaggaaaagcaccgctatgatgctaacgccagtaactctttatttaaaaatttttattaatttttaaaacttcactattttatttttttaatagatttttaaatgtttggattttttttggcttaccaaaacttcatcgaacctggttctttctattctctttcaaatcgccccaaattttttttacagcttaactaggccctattaagcttatttccagaaaatctcgcatgaattctcatttttaaattttttatagatttttaaatgtttgcattttttttggcttaccaaaacttcatcgaacctggttctttctattctctttcaaatcgccccaaattttttttacagcttaactaggccctattaagcttatttccagaaaatctcgcatgaattctcatttttaaattttttatagatttttaaatgtttggattttttttggcttaccaaaacttcatcgaacctggctctttctattctctttcaaatcgccccaaattttttttacagcttaacaaggccctattaagcttatttccagaaaatctcgcatgaattctcatttttaaattttttatagatttttaaatgtttggattttttttggcttaccaaaacttcatcgaacctggttctttctattctctttcaaatcgccccaaatttttttttacagcttaactaggccctattaagcttatttccagaaaatctcgcatgaattctcatttttaaattttttatagatttttaaatgtttggattttttttggcttaccaaaacttcatcgaacatggttctttctattctctttcaaatcgcccccaaatttttttgactctagag

SEQ ID NO: 23573 - DNA, 902 bp, Heterodera glycines
caagtttttggctatgactttttttcttagacaagcaagtccaacggttcttgttgtcattcaatagtcccaagaggtctgttatcatatgcataattttgaaaatttcattaggtcataaaaagctatgctcagaaaatttcgataagactgggattgtaaacattactgagccctagtcagaattttccgaaagttggcaaatctatagaggactcttagaaatgacgaatgaattcatgtttgttggagttggttgctaaagataactattataacaaaaaattgagctcgtatgaacctgcttggtccgctagcaagcgcgtaccactgcaggcaaatattttacatatgatccgtaaaatccagagtcgatatgcaattccattacatacgttctgtgcgccatcgatcgactggtcgttcgacatttccttatggaaaaagacggtgtctcatgtagccgcaagctatgcgcccacgagaggtcgtctaataatcttccgaaaatgattacttagcaaagtatctcttaaaggaaaggtttgtgcgtcatctactactcttcaatgattgttaggagcggtaaatcgataacacatatcaaaaaaaaaacaaaaatttcagtcaaggacatactactataccacccaccccccgttgaagcaacaaactaaaaaaatgctgaagaatgtacgctgaggcaaaattggcttgggaaaatatgatggggtgtaaattgaggtagagaagtcagagaaaagtgtgatatttcttctttacttggcgacccaccgtggggtgggccggagctagttcctcctataggcgacccacccccaaaagggagaatcccaccccgtggggcgtttggcgacccaccccgaaaaagggagaatccc

SEQ ID NO: 23574 - DNA, 1861 bp, Heterodera glycines
attaattgaattggtgccaccccttaagcaataacctatgatcaaaaatttacctggtccctcgccacgcccttactttaacactgttcagcgcatctcggatttgtcccaacttttcgaagctctcttcctcaaaattatcgaacttttgttgttttccggtgccttcgcaacatttatccgccacattttggccacctaacaaaaaacttttgtggccaagcgttgaaaccaattggccataactttgtcgaacatccatccgaaaaaattgaataataaaaaagaagtggaaaagaaataattttaaataattcaattggttttatatttaacccttgattttacgcttttaagtcggaacaaataaaatgcttttttcatccaattgttcacaaaaaggtgaatacgaacggaataagaataatgtaaggtcaacaaaacaacaatattcaatttgataggcatgcaatgaatgaattctggggtcaaattgacaatattttcaaacaaatttcacattaacaattttttcggttcaatttgctttggcgatcactttttcgcgcaatacctcatagttggcctcggcttctttgtcatggaacggaaactgaacaggggacacaattgcatttttttaaattcaaatcattgaaaaatgaaatttatcaaacaattccatggcgagagagcatttttatgatacctccgccggctgtgggtagtgcgccacgcaaacgctctccgcacgttcggacggccgggcgggcaaccgctgccaaagctcttccgcaatgaacggcataatgggggccaacagacggagggcactgtccaccgccaaatggagcacatgccgagcagtcgtaacagcctttgggggggggggataagccaaatccataaacaaatttaaacacaggaataagtcacccaaggaaaactttcgatgtgaatgaaaatgaaaatataagccaaactcctttttaataaaaaaaattttcaacaaaaaagcttaaaattttataagaaaaattacaagaaaattgcatattttttagattttttattcaaaatttcatgacgtttgtttttcaaaaaaattttccaaaaagtcgccgaaaatttaaatttttttcttttaatatctttaaaaaattcttagactttactgaaagtttttttaaattttagaggtgggatgacctgctcttggaaatgtagtgtaccatagataataatctaatgaattgtttgtgtaattaccttttgcgttgtcacttcatcggtgccgttttggcttcgctcttccgcaattgcgtccgccccctttttgttggcattgttgacgacaaaaatactcttcaccgactccaaataaatgtcgcagaattcgtggatccaaaagtggtgaatggcggaggtcagctgccggaagttgtaagtgcggaagccgacatcgcattcagaaacacaatgggacagtcgggagagaagccaccggtcggccaaattaagtgccaaagtggaaggcttaaaacaaacaaaaacattttgcaataaaataaataatcaacgagtggatgccctaatcggcttttttgtcttttattccatttagacatgttttattgccaaaaaataacacaaaaatcagttatcttacaattagaccaacttctttggtgaacccagaaattggacttattttaagaattggcattaattagaatattgggaaaagttggcatttgtttttccaacactttgtccgtttttacctcaaacgtatcgctgggaataaagtcgggcccaagccgactgagaacgaagcgcgtgccctgccaaagtttttgca

SEQ ID NO: 23575 - DNA, 1527 bp, Heterodera glycines
  unsure (1)..(1527): unsure at all n locations
gagctgccgctgcactacaaagtgagaaaatggtgcggcactcctcgacaattgcttcgaatttgatcgccacgttctttgtcngactcttctccaacaatttaaggtatcgctcacgtaaatctcgatcacctgaatttaaaccgcttacaaaaattagcgccttgatctcctcttttgaaagttccatttgcgccttttcgcagcagccgttgacctattcggcaaagtccattacgctttgtgatggtgcctctgaagttgaaaactttcaaaccttttcacaaaaattgactttgtctggcataacaagcttttcagcttatttaccgttgcctgataaccaaggtcagttgacttttgtggcaaaatactctcagaatacctcgcgtaatcctgtgaactcattttacccaaaagtaaccgcgttttcatgtcgtctggcatttgctgtccgtccttctcgatgaaagcgccaaaccgatcatgtcaaatgtcaaatgtagaatccgtttctggattatacacaaactcagacaattgtaaattaattgtagtgaataggtcggaattttgtctattcgggtttgtgtttgtttgggttgcaatgttttggagggcatccgttaattgccgaaataaatttgccatttccgcttgacttgccatggtgataatgtgaattgacagagatttcaaagagaaaaagatagaactttgtgtgaaataaatgaatgtgtgcaagtgagcggtgggcctttttggatgtttatttattgattgcacagtccgaggtcaatgatgatgaatgaatggagcgaatggatgaaaatgaatgagaaaaatggcctaggactggcaaaatttagagcaaaaatttaattgccttcgctgactgcgccaaaatgttgtgtccaaagggcacagtgaacaaaaagtttattgacaaattaaataataaaagtctgaggagagagagagtgaatgaagagaagagaaggaaaattgcgaatgaatggggagagaacgaaatatgtaaggaacagtcactatttatgcacttcgacgggcagagagaaaggaaaagacattgagggaaaatagcgaagggaaaagatagagaaaataaattaatgcatgcctattttgtcttatcccaacatctccgtttttaaatattttgcccgtgattgacaagatcgtattttgttttcgtcgtgtccatgtcaaatatttgtgtttgttttctttgacgtgttgaccgtcttggctcaatgatttggacatgttcaagcaacaccttttccgggaacaattcttcctgacaaccacatttttgagccgttcctgtagttggcaaattgcactggattgtcggtgcaaaacgtgcgttgtttcgtcccataatggcggttgaattgttgtgccattttgtgccggtgcttatcggttgtgtccgaatgctttttcttttcgtctggcctaactaatgacagaattgtgcggactagaaggcctagaaacaat

SEQ ID NO: 23576 - DNA, 1383 bp, Heterodera glycines
cgtcatttttcataaaattttaatcgaaaaatttccgtatgaatcccgccgtgtgcaggcatttgcgccccgacatttttttttgtgattgggacccctcccgcgccgctctttaattagcgtttaaatgccaaattttcaaattataaattcctaattgaaatgtaaattttgcatttttttttgttggcatttggcaaagctgtgccaacaaatccaacattttttttgttgacttaagctgttgtggtggcattgatttctcttttttcccattgtttccttccctttgctcattttttttcatttttctcatttttattccctttttatgccctttctggctttcctccttctcctctcatttgaatgttttctgttggccattggcgactttcatcattttccatttggccaaattgccgccggcgttccgccgcccattcggcccaaacgacagtccttttcgcgatacatttgcggcattccgcccttcattttccattctgacattcgtaagttgaaaaaaatgagaaaattaagaatgcgaatgttaggcagggattggatcgaaaatttttcaaaatcagaatatcgggcgggcccaaaaaataagattttagggtcaaaaattgcttcaaaacccccgagactcacgaccaaaaaaaatccaagccttttctcgagactctcgaacaggcaccacctttcatttcccaagctcttgcttgaccaacagttgtttttcagcttgttcctattgggccatttgtgtgaaccacggttttgccaccaatttgccgtgtgccgacacgcaagactgtttagagcacaatcccaacactgaatgtgtgcaaggaacgtaagatcatttgggcttccgattacggtatttcccataaaatagagcctctgtggacctttttcaacccaattaaaaggttttgtttggggggggggtggctctaatttagagatgatacggcataagcacatgcatttttaacaacttttttcacagttgctgcactttgcccaccgtccaaatgccgtcgaccgtttccacggcttcgcaatttttgccgcattcgtcgtctgccgcttcttctttttcatcagcattgaatccatctccacttgtccaatttgtccttcccgtgcttatattatttatttttcgcctgatgttttgaattttccaatttgtttttgcattttcacttttgttcattttttacaatttattttaattaaattcaaaaacaaatgaaaaagagagattaattttgatctgagcccggaaatttcaaagttgcggatcccgctgcgggattggagctcaaaatttttgggggacgggattccgcaggtataaatcccgca

SEQ ID NO: 23577 - DNA, 1906 bp, Heterodera glycines
  unsure (1)..(1906): unsure at all n locations
atacaaatggttgccaaaacacaaaaagaagtaattcctttgtctccggaccaggacatttttantggggagccaaaataattctttaaatgtaaattcaatttttttttaaataaaaataaaatttatatctatctgtggtggatattggacaaaattatgtacatacaaaggctgctaggaaattcctcagaagatatgtccgccttgagatgggtttcgcatttaatttgatattccaatttgcaaaaaaaaacaaaaatatttttttcgtatgtatgcaacttcatccctaattataattagcaattcatgtaaatgataattgcctaattgattattgccacttcgtttccattttggactgtctcttccgccggttgtgcgtttatttcgccctccgttcgctcagtttttgtctgttccgctccttcggccatttctattcgcgctctgttcagtaatttgactgacagaagagcagcaaattccaattaattatgtttaaaaattgacaaattttgtcatgagagcgcgcatttttttattttctcgttgaaatggcagcaaaactgcgcctgctcactttattgggtgtgtgcctgctgtggggagcaccgatcgcaaaaaaaaaaaagtcacgagaatcgagagcgaagatttcgagagacaaacggaggaggaggaggaggagggggtggagggaacggaagggggaaaaggtggggtttaaaaccgtccgaaagtcgctccaaaaatgaaacgtccgttcggcgcctccaccgaatttgataaatgagcagcattttttgtgacatcatcacatgaaattgagcaaaattttagtataaaagtggggagggacagcacaatcggagacatcattttgtaaatgtaaagtcatttcagtttcacttttgttcaaaaaatagaactcatttggaaacgataaaaatattttcccattatttcggaagacggtcaatcatttaaaaatatttcaagtttttactttcttaaattttcgtcaattttaagaagtttaaaaatgcaagagacgcaaataattgtcggagtggcctctctgtgctccattttggccatcctcgccaccgttgttgtggtgccatcgctgtactcggagatcaatgagatcgccaccaaagtgcacgacggtgttcaggtgggaacaaaatgctaacaaacaggtgctaattttgaatttgctccaggctttccgcgtggacactgactcggcctggaccgacctgatggacttacaaatcacagtcacgccgccgtccaagccgcgtcagaacccgttcagctccatcttccgccagaagcgtcagttgcccggccactgccaatgcgcgggtgtgcaacagccgaactgcccgcccggcccaccgggaccggccgggtcgccgggacagcctggccagcctggacagcccggaggacctggacagcccggagtaccaggacaacaaggcgagcaatattagatttaaaaaaataaataaattacaaatgttttttaggtccgccttgccctgtctatacgcccccgtgccaacactgtcccgcgggaccccccggacagcccggaagccaaggaccgcaaggccgccccggagcacctggtcagcctggacaacctggacgcaacagcggacaaggcccgcctggacctcccggaccccagggaggagctggccaacctggtcgccctggaggacctggccaacccggacagcccggagcaccaggagttatcacgtaagaatgatcactgagctaaccaacttaaataaattatattttaagcacctccgtgcccggaccgaagggacccccgggcgcacccggccaacctggacaccccggagcgcctggacagccc

SEQ ID NO: 23578 - DNA, 1634 bp, Heterodera glycines
  unsure (1)..(1634): unsure at all n locations
gacgcaagggcgtcgccagacattctatgccttgcttcgacggattgtcctgacccatntanaatttcataaaatactaaaacacccctttgaaaggggctctgattgagtgcactattgtcgaatttacaaaaaacccgttatcttacagtggatcaaaaagcaaagatttccattccaatgacgtcgagaaagcgagagcatgcagaaggggaacaagagatagaggaaggaaagagtgtgttgagtggagagagtgttagtgatggagaggagggcagaaacggagaagagacgaatgaaaaagaggcggatgaaagagaaagagagcgggacagaaaggaaaagaggccgagaaaggaatgggtggtggccggtgttcccaaaaattgttcggatttgtacgtggtggggattccatacgatttggaggatgaggcgctcaaggagtactttgagcagtttggaagcgttgaattgtcagaggtcagtgagtggatgagcaagggaagagaaggggcgagaaaagaaattcacgggagggaacctccgggggaaaagcggaaagggaaagacgggagaaagtccgtggtgataagacaagtgtgcagtgtatggaaagtgcgacggtcagtcagagattagaaaacgaaaaccacagtcaatcgcttaacaccgaaccattggggcggcctttttttacaatttctcttccgcaaatttcacatttcccataactttcaacaaaaaaaaaaacttttgcagataaagcgggacaaaagcggactgtcgcgtggcttcgctttcgttcggatggcccagtacgatgaccaagtgaaagttctgtccaagcctgtccatgtcatcgggggacgcgaatgtcacacgcgcatttcttccacagacaaagtgattggacttacaatatttcttttgttttcttcggtatttttgtgattaaccaactaactaacatagtttcttggtctatttggtaccatgaaatattcagaaatggggagagattggatttagtcggttggactcaaaaaatatgggcaaattaatatttgttttaacatttttcaagttcaggctgtcgacccctacgtgaatcgctctctgtcggtaaaaacgtttcattttattgttttgttagaaaaattgagtcaaagaaaagtttccaaatttgaaattgtcgctgattgtgtcatttcttaaggccaaccctcgcgttttcgttggaaatttggaaagtgacatcggcaaagaccgtcttcgcgagttctttttggagcacattcgtcgtttggacaaaacagcggacatcgtcgacctttactacccgaaaccattccgaaactttgcctttctcacgctcacttcgtcatttgctgcgaaagaattggtcaggtcggtcgtaaacagcctcagaactgtcgcaaaaccttcaccaatttctcctttttctacagacagcgcgactttatcatcgatgggtccgcctgcgaagttaccgtcgctgccccccgaaaaagggacaacgaagcgcaattcggtggccctgggcaattgccattcggccccgggacggggttcatcgcacccggcgatccccgctggaacatcgccgt

SEQ ID NO: 23579 - DNA, 1214 bp, Heterodera glycines
  unsure (1)..(1214): unsure at all n locations
gtcaaaggccaagggcgctggggccatcatgaagtcaaagccaagggcggtggggcccatcatgaagtcaatgccaagggcgctggggcccatcatgaagtcaaaggccaagggcgctgggggcncatcatgaagtcaaaggccaagggcgctgggcccatcatgaagtcaaaaggccaagggcgctggggcccatcatgaagtcaaaggccaaggggcgctggggcccatcatgaagtcaaaggccaagggcgctggggcccatcatgaagtcaaaggccaagggcgctggggcccatcatgaagtcaatggccaagggcgctggggcccatcatgaagtcaaaggccaagggcgctggggcccatcatgaagtcaaaggccaagggcgctggggcccatcatgaagtcaaaggccaagggcgctggggcccatcatgaagtcaatggccaagggcgctggggcccatcatgaagtcaaaggccaagggcgctggggcccatcatgaagtcaaaggccaagggcgctggggcccatcatgaagtcaaaggccaagggcgctggggcccatcatgaagtcaaaggccaagggcgctggggcccatcatgaagtcaatggccaagggcgctggggcccatcgtgaagtcaatggccaagggcgctggggcccatcatgaagtcaaaggccaagggcgctggggcccatcatgaagtcaatggccatgggcgctgggcccatcatgaagtcaatggccaagggcgctggggcccatcatgaagtcaaaggccaagggcgctggggcccatcatgaagtcaaaggccaagggcgctggggcccatcatgaagtcaaaggccaagggcgctggggcccatcatgaagtcaaaggccaagggcgctggggcccatcatgaagtcaaaggccaagggcgctggggcccatcatgaagtcaatggccaagggcgctggggcccatcatgaagtcaaaggccaagggcgctggggcccatcatgaagtcaaaggccaagggcgctggggcccatcatgaagtcaaaggccaagggcgctggggcccatcatgaaatccaaggccaagggcgctggggcccatcatgaagtcaaaggccaaggncgctgnggcccatcatgaagtcaagggccaaggccgctgnggcccatcatggagtcaaaggccaaggncgctggggccc

SEQ ID NO: 23580 - DNA, 1001 bp, Heterodera glycines
cccccccccccccctcggcttcgttcgttcgttctgtcgccctttgctcatccgccaatgctttcgtactgttcgcggctttcttcgaaaagtgtctccattctctccatcaaattccttcgctgactgtcactttgggcctgggggaacaaagttgggaagcaaaggaacacgaaggtcagttcgaaatggcgcttaaaatgggacaaatcaatgggtgcgtgcgatcgattgttttttgtgaatgatcgattggatgaattctgccgattaatggccaaaactgatcaatgccaatcggtggcccctctttctgtcatcctatccctcacctgttcttcaaaaaggtcattcctcaattgcttcggaaattccaccggtggcacaatgttcagtgcttggctttccctctccgccgtgtcgaaatacaaattcttccggggaaagtttttggggcgatgcctttgccttttttaccagccaatcgttcatccgttcccttctcaacggcgcattgacactgctgaagataatccgaatcacgtcgttcagtccggtgccttttgattgagcgcaattcattcaagaaaaaagagaataataattccaaattgaaagcctggggggccaatggcaaagtatttaccaaagccactcactcgcatggcacgtttgccagtcgatgatcgaactcagctgatcacccggctcgccattgtccaaccgattgaaaaacaaattgttgctccaaaggtcgccgtgacaaagcacaggacgaatgcctttggtaaagaaaaattaacccactttttgtgccgacaattggggggggggggggggggaaatgggggtgaatggccaaggaaacgcaaatcccttctcaccatatctttcgtgtacgtccgtcttcaatttgttgtgtttcgaaatgaatgcccgcagcgttttgtggtgccttttgaagaagggcgagtccaaactgagcactctctgtgccaatt

SEQ ID NO: 23581 - DNA, 1040 bp, Heterodera glycines
tttaattgccttttagtaaatttaattttacgctcttttttatgcatttatatgaattgaaccaagtgaattattggcacatatattcagagaagttcgatgccgtgccgtgccgaacaaaaaaaaagtgataataatttatttttctcatctcttagccctcccaccaacatcgttttaattgtttttataacggaaataaacaaatttttggattaaaaattaaggaaaaaataatagttttgttttttcactttgccctttttatttggttcaaggaatgaatttttaaaataaaaaaccaaaaataaaagggtgcaaatgccgggcacaaaaaccgtggcactctgaagatcggactttcaaactgctctttgtcatccttcacagttgtgattccgtgccccccccctctccctaatatttttatcattggtttccctttatccctttctctttctgccatttctcctgcttctcctccatgtcattgtattgcttctccttttcaggcttttgcccccttccaaaatttgctaatttccaaatgccaaaagcaccgtccgccgctccgccgagtttggctccacaacgaatgccaaactccgagtcggccttcgccatttcttccgctttttcttcgcttaccaacgacaaaagtgggcatctgttgagaagactgaccaaaagcaacagttgcagtgagagggtataagaaccaatcaaaacaacaaatgataagctgaaaaagtgccattggccaatgcaacggaaaattccaatttttggccaatccctccgaaactttcattaatcaatcaatctttttcataagacaaaacggtcgtcctggcaactcattcaatggaacggacgaacgaacgaataaatgaatgcattttcaatggagggaccgttgaaatgaatcccctcaaacgactcattgagtgacattattcttgaggaattgttgctggtgatgagggcgaatgaattaagcgagtgggggaaaattggggggggagaagggggggaggaca

SEQ ID NO: 23582 - DNA, 2221 bp, Heterodera glycines
  unsure (1)..(2221): unsure at all n locations
aacgaaaaatctctaaaaatagagactgcggaacaatgatattaaaacagtaataagcgaaaaacatctaaatcaattatttataattatataataaatgatttaaatgaattaagcaaatttatgtttattaattaaaattattatatattttatgaaatataaaaaaagttaaacgaaacattaatttatttgtgaaacaaaaaaaatatgnaaagacaattattagttaacaaattgcctttttattaatgaaaaaacaaataatctaataatnaataataataataatttatttaaacaaattaaacatatttaattgctattgactcccaactataaaaatattttataaaaagctatattttttatttacaaagaacaaaggaaactatctttagaaaaaacaacacactaaatttgcatcaatagaatcttaaaataaattattgcatagtttaacaatattatcttttcttttataaaggagcaacgaataatgcactgcaagaacatatggacctgaacaagtttttaaaatctaaatatattacaaccaaaagtaactattaatatacaaatataagaaaagctaaaaattattacaaaaaaatacaaataaaagcaaacccaaatggaaaagaatgaatttttttttaccatttcattaaagcttcaaacaaaatttatacaaatctatttatgaaacaaaaatttttaatggaaagaaaaattctaaaaggttataaaattttaattatattatttatttatgtttttatttgagattagtaataattcgtcgcaaagaagatttgaattgtttaaaataaaaaaaagatatattataactttttacattttttacgaaaaataaaaaaaaattagggaatggagtgtattgatggcaaatataaaaaattgaagtattaaataagaaaaaacttttaaactattttccatttattttataaattttatataaaaatttttgattttgaaaaaacaaataaatttataaaatgaaaataaaatataaagtaaaaaaaatttcactaattatttaatgtaaatatttatttcctttcaaattatgatcaatgttaaattaagctgagttcaagaattaaaaaaaaattaaaataattgaaaaagagtaaaaaaaaagttaaatcatttaataattctatcgacatttcgaaagtaaattaaaaactaaatattctagagcaaatttattaaaaacacctcgttactaaaataaaatcatttaattctgtgactaacaaaatggctctctgacagttttctgggctaaatattcattttttaaatatttaattaagaaatattttaaaaatttaattacaaatgtcatagcggaaagttagtgcatcgaaataatcaaaacctttaagaaaagacaaaaaacaaaatcaattatattaaatttaaactgattacaataataaggcataaattataacgaaaatagtaataatgaagaaaaataatttaattggtattttataataatttattacaaaaaaaaatatatataaatattaaaggaacatcactagtgcgtaacttaaattgctacgacacgagacatgatataaaatagttaaaaccaaaatcataaaaattaatcaaaaaataacatttaatataaaattttttactaataaataaattaagacatgaaaacaaatagcaaagacgaaaaaaaaatgttatttaaattctatacaattaaattacatattatttaattttacaaaagttcagcaaacaaatacccacttacaaaaataaataaataaaaaatgggaattatatattgcacaacgagcgaagatatcatataaactaatagataggcttatttttttgactcttcggtaacaataatttatttaaataatttgtaataaatttttaaatttaaaaaaaaatcatcaagaaaatcaatcatacaaatgaattcaacgcaatacaaaaattaaatttatgggtttaaaaaagtaatcggaaaattaaaaataaattaatgcttttgaaaaagaaattcaataagcatttacagaaaaccaaattggattcacaaaaaatttaccaaagcaattatgagtagtatatagtaccaaaaggttgcgggttggttgcgggtgtttcccgcacgagcccgtgtctatgggagggcgcagccctttgaagt

SEQ ID NO: 23583 - DNA, 145 bp, Heterodera glycines
cagctactcaggaggctgagacatgagaatcgcttgaacctgggaggtggaggttgcagtgagccaagatggcgccactgcactacagcctgggcaacagagcaagactctgtctcaaaaaaaaaaaaaaaaatcctaaaagact

SEQ ID NO: 23584 - DNA, 1304 bp, Heterodera glycines
atcagggcttctttttttatgtacctgttttgttcctgcattctccatagcctaattagtaggaccccactttctttttcgtgtttgcgaacaaaaatcgggacttttatttacatattccgagctttttatacatatttacacatatttcgggtttttgtacatatttggtacatattttggactttttagcattttttactaatgaaaaattaaaaattttttttgaaaatgtacccctaaaaaatcgttttttttaaagatattaaaaatcaatttttaaaatactaaaaatgtgaacgaattgttgcattaaaatgagaatttcccgactaaaaatgtgttttttgtgcacttctcagtgaaacgaagcaacagaaaaaaaaaatgaaaaactaaaaatcccatccctgcagatgaacactgcgatctcaaaattatttgaattgaggcctgacccatacgataattcgcaaagaaaatacttgcgtctttgtttggtaagtccatcggttttatttaccaattaggtatcatccttctacaatacattcagtttttgaacgtggaaaatgcatcagacttagcggatcttgtaaaagttatggatattgcattgattcgcgcagaactcgtaattcatcatactttcaaattggactgttaatttatattatttacaggtacttgagccttttatactccttgtagcagcgaatcgtgcactttttcaagccgctcacaatcaactttcaactcgtacgtgaattcgtccaaaattgctataaaaaatgtctcgagggtaatagtttagatggtgccacaccttttttaaataaatttttatagtttataaaagtcgtaaaaacacatttctagggtgttttcggggatgccgatcccgaaaatgacaccttcgagtgattttttttcattttttaggttcactgtctgctgaactgatttactgtctttcgcccaatcgtaatattcgcgagtcgttggccacttttggcattgctggcacaacccgtgctctgttggttgcaatatttgatgatgccaaagggaagaaaatgcgtgaagccgccaaacatatcaaaggcacaccggtgacattagaaaaattgagggaaaacgctgacgaggcactaatcagacaggtaattaatcaaactgtggcgtattatttcggtgaactgccgatgctaatttatcactggatgggaaatggttggggtaatgctctgacgcattgcgaatttctgaatagttggtttagcagacctttaactcgcaaaaaa

SEQ ID NO: 23585 - DNA, 1166 bp, Heterodera glycines
aaaagtaaaattttttgatcaatttttcacaaatttaggagagagatttcgtggttcagcgcgccggtgatttttgaaaatcttagcgcaaatttttacaacggctgccacattttatgatcttttatttcttcatagcggaaaatttaaacaaaataagctgaggagttttgacgaaaaaaagaaaagatagaaaaatctttgtgaaaaaatgtaatgaaaaagctgaaattatttttttcacaacttcaattaataaattttataagcaaaacaaaattaaaaaaaataataataaaataaaaattataaataaaaatacaacaaacaatgcaattaaggtgagaaaaaaatggaaaaaagaattccagctggacggatttgaaccatcgacctaaggatgtcttcaaccactacagtcctccgctctaccaactgagctacagctggcacacttacccacttattattattctttttattccattaattctgtccccacaagtcaaaaataataccagaaggaagtaaactagagaaattttgattctaaaaagaacaaatttaaataaatgccaaatattgaaaactatagtaattaagaaaccaaaaatttattagatacttaattattaagaaaacatttaaaaaaaactaaaattttttcggtttacgatggacaaaaaatgcaatacaccgacatttgctgcgcggacatttgtgccaatgccgaaaattggtctcaaattttaggtattttaatcccagctagggcagttattaagaggccacttaggctccactctccgtatcttcccccctacgaagattctcaaacagaatttttcaaaaaaaaatcgtagaaaaagaaaaatttattttgaaaaatcttagtaatgcatcataaaatttagggaaacgacaggcagaaaacgagtgctgctcgccatttatgaatgttgattgaaaaattggattttaaaagccctaaatttaattttttgaatttttattttttaaaatgccaaaaaataacgctgataataatggtgggtggtaatgacaacctctccttgcacttggacctccatctgctgcatcatgcgatgctggccgtccacaaatgcggcggtggacgacgaaccaccaaaatagccaccacttct

SEQ ID NO: 23586 - DNA, 1201 bp, Heterodera glycines
  unsure (1)..(1201): unsure at all n locations
cccgtcgtaaaatgggggcgcccccccgtgccaaaggtgcgacaaccgaatcaattaagccgacggtttctgttccttctgcaaatttcgaagtccgcaaatgccattttgggccattggccgtctctcgaaggcattttccaattcattagccttaaaaccactcaatcgacctcctttcagctgttcagtctcggttccccgggtgttgtgaaagtctacgctctttcgattgcggggacggcgtttgtttgtccatgtcacattttcacgatggaattgctgattgtgcggacggaagtgacgagtgtcagttggaagaacttctgctgaaatttcccccccccccnccattttcccaaaattcttttttcagattgttttcccgaacaaatttcttgtggcactttctgtgccgatttcgtccatcttggcgaatgtctccaaaatccgaattgtacccaaagagtgggccctccgtcgcccatttgtcctctgctcagtgagtcgtccacttttatccccctttctccatttacgtctaaactttttgtcgactgtatattttttggcattgtgataatttgtcaaattgttcaaaggcatatatagttctggcttaactaaaacggccgagtgaaactggaggatatataaataaagtgactaaattgttggttaaaattcacagaacgtcgtctttgcggttttgccaacactgtgtcatgccgtggctacggcgaatgcattttcgagaaatggctaaaggacggaaaaagagactgcatggatgggtcggacgaagacgagaattacgcggttggtggtcaaatctggcactatggggtacgagtctcgaatttctctgattcagagcctattcaacattgcttctgtcccgttggatcaacgacggactgttcaccccccttttgctgctccaccttctcctcctcctgctcttcctcctcctcctgctctacctcctccacctccttctcttcctcctcctcctcctcctcctcctcctcctcctcctcctcctcctcctcctcctcctcctcctcctcctcctcctcctcctcctcctcctcctcctcctacccccttttcccctcctcttcggacattgtccgcttccttcttttacaactcatttttttaaacttaccttcttccacataaagaatttcattcacat

SEQ ID NO: 23587 - DNA, 1177 bp, Heterodera glycines
tgtagaatgcgcaaacagattaagggaggacaaataggttgcagagactttggataaaaattcccaaaaggatttgaaaatttcaattcacggcatactgaatgatattccgtccctacgtactgtgtttaataactataaaatcaatgggccacgatacggtaactatactaattagagtaggacattttgaaaaaagcctttcaccagtattaggaaaattagaacaaatcgagatcagttatggcaatttccaactgtttaggtgtaaacaaaaggtgaaaagacggtggtaacgaataccgtaacatctacaacatgctatttcatactgtataaattatatgccattttccctccatttggtggacccacttgtgttaacggatggtggcggcacggcaggtggttgctgtgcagcagcagcaccagcagaagatgcaccgttcgcgggtgccagccggtcaattacagtaggacagccgaccgtagtcgcggtagcagcagtcccaccgcaaccgccccgggttcgcttgcagtcaacagcggactgtgcaccgctggatgacgagtttgacgtggtgtaatgggaggtgtcggcggcactcgactcgcccccaatgggacagatggcagcagtagcagcagcggcggctggtagctgtgccgatgccggtggtgccaatgccatcaattgattgtggtgatgctggtggtggtatgtggcactggctttcctcgacggactgaacaagcggcgcggaagcggctgcggtccgcaaccattccgtaaattgggcgctcccatcgcagttggcatcataccgccggcaccggtgccatcgatgccaaaacgggcaactgccgtggtccattcaggttcattcatcatctgtcaaaattaagggaattttattaactgttgctgggaaggacatggtaaaattgagattgtacagtaaaaagacacaataattgggaaaattctgtgacagggtaccatttttggctgcaaagggtactgtagaaatggaattatacagacggaatagaaaaaatggaaaaaacagagaaatacaatttagtgatagaaaagaagcagggggtttttttttttgggtttaccaagaatcttgtatacggtataacgatgtattgggcatgcacagtaagaaca

SEQ ID NO: 23588 - DNA, 941 bp, Heterodera glycines
aaaatgtcattgcggttttccctcaggcaatttaaattcacagaagggcaaacataattaaattttgttaatctgtacacgatttgccctggggcataaagaaactttggcagattaaattgaccatgccaaattaatccgctgggggggggggggagcaaacacggacaagcaattgaacaaacattttttaaattcattttgaaaatttaaaaatttatttaattttcagggctttttcaaacgaactgtgcaaaacaaaaagcactactcatgcaattccaaccaaagctgtgaggtggagaagcaaagtcggaagcgttgtccgcactgtcgcttccaaaaatgtttggagaagggcatgaaagccgaaggtgggccgacagagtttttgaggcttttaaattttaattccaacttatgccaaatatggcaaagtgtgcctttgcttttcgttgtccctccaattatcgtaccattgccccccattcaaccttttctttccatttttgagcttacccggcccttcccccttctcttccgattgctatctcttctgtccgtcttctccctcaaatggcatttgatttttcaaaattccatcaaactttgccccttttaaattgcccaataaaagtgagtgaatgagtgagaagagaagagaaggtggttgtggcgatgcagcaatagcataagagggggggggggggggttaagttgagcaatttggtggcgaaaagggaatttatgagggaattttgggggagaggggagggaattggcatttgctaacataagccatcaaatggcgaaagtgccaccgaaggtgcagtttttatatggcaacagcaccctttagcattgattgcattatcactcattttctcctcgccccattttaaaggtctgcacaaaaatcccatcaaaaagagaaaaagagg

SEQ ID NO: 23589 - DNA, 1214 bp, Heterodera glycines
ctcttccactcccccctcttttttgtccctcttccatcgtcttcttcctccgtttccgcttctccttccttttcttcatctgctgctgttcatccttcgcaaatccccaaatcccttcttcccctctttctgtgtttgccaatgacggaaatgaaagcccaaaatccccacttttgcccgttttgattgattgttcgccgccctttcctttcgttttcttcccttttctcgctcatccaatcgtccggccgtcggaagattagcgcatcttcaaaatagggaaaatgttggtcagatagactcaccaatcggccaaacaaacggagaaagggcaaatgaaatgggagaatgcgcggaatggaaggaaaagggggcaatggacgattagagggggggggggggggtacggttagaattgggaggaatggaacggagagaaatgcttgttaatttggtttattcatccccaccccataaaaagaatatgtcaagcgtatctcgttcattttcaagccaattcattgttttttttgtttgtccattcactctttaccacaaacataaaaaccgacaaaagcacataaaaacggagggggggggttgaaggaatggaacggattgggacgtataatgaccactttcgcggcggttgaatattattagcctttgattaagactggacaaaaagggcgcgagtgactcattaaacattttcatgccctttttggcattctctgtttctttattatttcattctctttgattggctcattccctgttttctgctcaaattgaattttgtttaaaccattaaacaaacagtgccctcccccgttccttcgtttcctctccaactgcacgtccctaggggacgctccctccctcccttctcctttctctcttctcccctccctcccttctcctttctctcttctcccctccctcccttctcctttctctcttctcccctccctcccttctcctttctctcttctcccctccctcccttctcctttctctcttctcccctccctcccttctcctttctctcttctcccctccctcccttctcctttctctcttctcccctccctcccttctcctttctctcttctcccctccctcccttctcctttctctcttctcccctccctcccttctcctttctctcttctcccctccctcccttctcctttttctcttttcccctccct

SEQ ID NO: 23590 - DNA, 784 bp, Heterodera glycines
  unsure (1)..(784): unsure at all n locations
tcatcactttttgattaatcatttttatttttttaataccaaattcttaaatgcatttttgaatattgttcgatttgtccataattttttttgctatttttaaatttatttttccccattctttcgatgaatattttaacaattttaaattttctaaataataaaaatctaaatcctactgttttcttacaaataagaaaatctacttaattgaaaaaaaaaattattattttattaaattttattctattgaacaaattattggcaagaatgagtaaaataatgattaattttttaaatatttttccattaattcacattttttagagtggtcaccggaaatgattaaaattaaatttaaatttctaactcctagttaatgcaaaaaagaaaaatatatatatatatttaaaaaggcggcgataaaggaaaaaatatgcaaaattttaaaacaactcttaaaaatttagtttttattactggtaaaaaacgaaaattaataataaaaataaggaggactgaaaaattgaacttatttaaaatacaagcatttgaaataactgaacaattcgaagaattaataaagagtgacgaaaattcattaggcaaaaacacttttggcaccttcgcgtttcgcgtttcgcattttggcgcgaaactcgacttttacacccctaagattagattgaattccgctaaagtttcgcatttatttttctttcgcattttttactttcgcaaatttcgcgtttcgcattttattttccaatttggnccatccctg

SEQ ID NO: 23591 - DNA, 2026 bp, Heterodera glycines
  unsure (1)..(2026): unsure at all n locations
gccaattttggcagtacgacatttgtcaccatactgttgcattgtgtncattacagtatctctccattgtgctctgtgcagttggcactgtatgtaatgtatgcaacattgtcgtgttgacaaggtcagtggaaaaatttgattttttaaattagtgccgaattttggcactcattgtgccaacacgtttttggcaattatttgtattatttcaactttttaaaggaaaaaaatgcgcagcccggtcaatttgatactctgcgcgatggcctgctgcgatacggtggtaaggaaaatgccaattgggttctcgaaaacctcgagctcggcactcaattctttcaagatttttttttttagaatttgacttttttgatagatagaatttttttttacagagaacaagttttttaaataataatagcattaaaacacaaaaattcaaattatttaaatgaaaattaaaatatgggggaggagggcaccaccggggaatatttatttaaaaacttcaaaattttagtattaatttagacaaatctgaaaaattcttggcattgaaaaattttcgcatttaccgaaaattcaataaaacatgaaaaaccaaaacatttgggagccctgtttttataaaaaagcaacaaatgttaggttttgtcctccaacatggtctacacaactcattacacatttgttgccttcaacaactgtgtgccaaagtgagtgaaatgccggaaaaggttttgtccggtttagtgtttcaatttatcccgaatcccaaaaaattttgttcatgaggtcgtaatttcaatcaacaattgatcaacccatcctctacaggattttacaggatcctgccctggatattgtatctggaaaatttttgtgtccgggattcaaaattctcgggcgcttgtttcgacggcacttttctttccccgccgattggcacttctatttactcccaactcacccagaaattggtcctatggttggtgcgtatttctgatctctcatgcccatctgtccctggttggccactcatcctccatttggctgtccgtcatgttggcactgatccgctacattacgcttcgtcgccggggcaaagctggcggtgtacaggtgcgtgccgtctttggttgtgactgatatttttgcatatttgacattctgatcaatagtagattgatcatccgtttgcctccctctctctaaatctatttctctgcctcttctctctccgtctctgtgtctgtctccctctctcattttatttctctgactcttttctctacatctcttttctttgtctctgtctctctctcgctctctcttctgtttctctctctctcactctctctcttttctctctccctctctctcatcggttctcacttactcagaccactgatgaatgcggcaatcaccattcagatcggtgttcaacactcgtacattgcgatcgcttcagtcgtcattttcgtctcgctgatgaatgggcccaactttttgacctataaaatttcggaacaaacgctggacatgacctgtggcgatttggtggttgatcagtacaggtttgccaaatgatcacccaaaaaatgacccaaaagatcatatacattaaggaatcacacggcctatgtgcccggcgtggccgatgttgcacttgaggtgggcgaggaattggatgggaaaatatggttaatcagagcagttgacactgatcagatcgacaggaacagaaatgttaagatgcttcgaaaaagcactagatcccgaatgattgggagggatcaaaagatatactaattgaacagtttaccggaaaaattctgaacagcatcagctataaaccaagctgatgggagcggaatgaattagactgatttgaatatgattagacgaagggagattggaagaggctggggataaataaaatccaacagcatggccaaaaaaagtcccactttttgcaactgagccgccgagcggactttttgtttcattgagaattttttga

SEQ ID NO: 23592 - DNA, 1801 bp, Heterodera glycines
tccaggtcccggcaaaccccgaaaaacctggattttcctggacaaaattttaggatttatttttcaagtgcccgatgtttttccaagttttaaaaccagattaaataatttaaaaacacattatatttataattagatattttagaggttataagcaattgatttttcacccttttttgattttaaaatgagttcaaaaaatccaggtccaggcctggatccaggtccaacatggaaatccaggtccaggcttttttcaaaatgtcgatctctaggcatttggtttcccatttatgaaatcaaaaaaatcgccaatcggactaaaaatatttgggaatggttattcatttaaggtcattcatcgctgatccctttcatatgcagttctgcacatttcgccatttaagaccgtctcacaaattggccacagcacacagcgttcctcgtcactgtagcaaattgcgaaaacagtcaaagcgaataggaggagacaaatatagcagggccttaacaataaaaaaaaatcgtttcagcagcttcaaatgtggaaacttatgttaaaattggaacctctgattttaacaacacctaataagactttccaaaatgggtgaaattccagcggaaatttttatgaattaaaattgaaaatgaacctccgctcaagtacgaatccgataatgtagaaccagaggaacatagcctggtcaaaaagaaaagtgggatgaacaatctgctttggtatcagaagaacaggcatcagccattgtaagcaatacattttgtgaatgtacctatctaaaatataaataaaaactaatttgctacttataacttgctcaataatagacaaaataaaaccattttagctgaaaaatcgtagaaatttattaaaattttgaaagtttcgagcaaaaaaaatttaaaattttcgactttttgtccgagttcgggtccgggatacaatcttttctcgaaaaaaatttcatttttcgaaaaaaaggaggggggtacaatcggcattgaccccttctatcgattctgatttgtaagtttattttatgaaacaagtttttaactaactttaaatcggctcttgcatttttactagagtccggtaaaaaaaaatttcagggagcgggagcgggagttcaaaattttccgggacgggagtcccgaacgggattcccgtaaaaatcccgctcccgttaaaaatcccgttcaccgaaaaaagcgggagtcgggagcgggactcccgtaaaatcccgcggaagtcccgatcccgccggactctaatttttacaaaggaaatcccatttttttaatttgaaagttttgcgtactgtttataaataaaaaacttactcgacatacctaactggtgaattgatgttgtaaaatattatgcattcttgaaaacgcaaaagagccgaatttttctctatatatttaacttttattgagatacagattttgttttttcaataaaatgagttttattgttaagaaaattggaggggaaaagaatggcggggagcgtaaagtgcaaaaggttaataatatattctaataaacacggcgaaatatgtattttagaagcagcagaagcaagtacagaagaacaggtcgaagaaagtcccgttgcgcaaatcgattacgcccggaaccgttctgatcattttggctgggcggcaccgtgggaagcgtgttatctttctgaagcaattgtcaaaatccggtcttcttcttgtcacaggttcgggcaaaataaataagtttctgggccaacagacccacaaaa

SEQ ID NO: 23593 - DNA, 1485 bp, Heterodera glycines
ttttaatagttaaccaatttgatgtacattctgatttggacatttttcagaaatggctaacccaattgcaaccaaaaaacaaaaagtaaaattgtcttacgaaggccacctttacaccttcgctaaaatgagttctgatgggatgacaaaattttggagatgcaagtttaaaaagttgtttttactgtgatttttcatttttctgtacttggggcccaaacgaccctggggcccaaaaacgggggcccaaacgcccccgactcgaattattcacgtaattgctcttacccaagcaaaattgtttcccatttctacgtaacagaaaaactacgcattgttcgacaaattttcggttcttcttctcccctccaacccaacaaattcaccttttaattccctcttctgtggaaatgattttggccaatattaacgcgaatttgttttttgtccctcgaaaaaaataaattgcctttttttgtcaaagctttgctaattttaaaattgccctttcaaaaaagggttttgtttttgtattgttggccattcgctttcattttcctttttattcggcagatgaccgcacagtttttgttattgtcgctgcttctgttccattttttaaattctcacaaatcaccgccacaacaacaacaataaattcatcacattgtgattgttctacaaaagcccatcctttcatttgccatccaaaacccattgatttgaaatggcaattttcggcctcttcaagcagttactgctcggccaacatccgaccagcagcaacggcggctcactgtcctccgcgtcccatcggcgccgccgcttgccctcgacggtggcccaaaacggcgcgagtccaattggggagggcggcgaatggcgcacattgggcgaaattggggagggcgcgttcggcaaaattgagaaagtgtgcagcgttgagagaccgcaattgatcgccgcttgcaaggttcaacacgagaaagcgcaaaatgggaaataaaaaacgatggaaatggaggggaaaagtgggacatggcaaaaatcaatggcacgttcaaattttgtctgaattttgaatataggaaattttttttcccggcatcaaaaagacagatttaatgttacaaatgcaattttcaaaattttgtctcataaatacaccaacctttgtagcaaaaatggcgctttttgcctcaattgctaaacaaaccatgagaaatttagaaacagaaattggaatgcttaaaagtatattatatttccatgtttttttgcaactcaaacattccatttttatgataattccatatttattcatttgttcgtttaccctccaattttcaagagcatttctctgcaagagggcgaagaaatcgacgactttcttgtcgaaattgaaattctcgctctatgcaaaggtcagccgaacatcgtggaactgatcgcctgctattttcacgagcagaaacttttcgtaag

SEQ ID NO: 23594 - DNA, 1356 bp, Heterodera glycines
ggggggggatataatcgaagaatacggtaaccgaaaactcagattttataagaaaaacaaaaagaaaaatttgacacaatctataaataaaataataattgaaaagattttcaaaagaatttcattttaaattaatttgttaaataaattccataattaaaaatactaaccaaataatttttagcattttgagtttttccattttttagggtccacatatttatgttatatttaatattttatcaatacaaattgcataatttggtaattagttaacttccaaaaaaagatttattaaataattaaaaattttgtgattccatttaaattcccttaattcggcattcttccccttttcgtctttactatatcggataaaaattgcttcattttaattaattgccacaattaataaattaacttttaaatcattgccccaaatggccacttcgttgtttgtcaagcgaatgatggctaactcgtgctgttttggccttttgctgctctacgtgatgttcggtgggcttctgctgctgcgttttgagcgtggccaatcggagcgggcgaaagacgaattaatacggcgcaaaacggaatgcattcggcactttttgcgctaccaaaggcacttttttaataaaattaaattagcatttgcaatttttattgcaataaatattgtcttaaagtcaaagaagctgctgggcagtttcttaaattagccacgggatataaaaaatagaaaaagaaataattaaattggcttaaatttcagcgatggcattttcaatggccaagacagaagtaacgaatcagcagcaaatgcgccgactctcatctcagcagcggaacgtatcactgagcattgtctgttcggaatcgtcgacccggcggagggccggcggcgccaaacatggaacttccgaaatgccatcctctacggctttggcattctgacaacactcggtgagtgcgaaactggcgaatctgcggttaacacggcgaattgttcgtaattaaatttaaaaaaaaaaacaaaaattaaattgaatttgatttttaaaatatccttcagtggataaatgtagaatatgagaatgccaaaacttatcggtcatcaagtaaattagataaaaatggccttattaagagagaatttgtgccaaaggagggaggcacaatttgagataaaattaattcaaatattaattattctccttaaaaatattggccatttatttgctcgacagacaaaaaataaacaataaaacattttatgctcctctaatcacaacacgtaagtaattttcaacacggtaggacaaaaaaggaataattaaaataaaaataaagcat

SEQ ID NO: 23595 - DNA, 1515 bp, Heterodera glycines
  unsure (1)..(1515): unsure at all n locations
ttaaggatttggggagcaccgttttttctgctttttaccacagggaaaattcttttcgggccacattaaaacccttcatttttagatgaagcggcagaaaatgggttggtaccccaacatggcctggcggctttggctccgttcgtggcgcaaaattgggacgccatgccaccacaaccgcaacaacaaatggcaatggcgagcgtttgcgcagccgttcctgccgccgatgggaatgccgccgccgatgggatttcccccgccggttccgttcgtccccctgttcgccaatccgccgctaccaatgccgtacccaccaccaccgattctgcaggtacttaagtcattcgcaaaatgctaaaatttcagaattacagaaaaaaaggaatttttctgggggggggggggggaatatgcatttcttgtaaataaaaaacttaaattttttcagcaatttagagacaaatggggttctttttgggcaaataatacttttttcaaatatttttaagccgattccaattcctccggctcgtccgctgtatggggctttcaacgcaccacaaatgagaccgccaccgttgatcaacatgccgtttgctccggtgagtttatatttttacgaacctaaattttgatataaaacattattactgtgtttattgtgaacaatcatttcgtgaaaaaataaaacattccgttacctgcaaatacaaaggaaaaacatatttgcggtaaaaaataaataaagaaatttactaatttaggttcgaaattttgtaatatatgtaaaacaaaacattcaaaatcagagggttgttatattaagaagattatcattccgaaaaatctgccacgttatcgtatcataagctacgacacagagtgttcagtatgtaaaataataaacaaaaaattatcttaacaaatttagacggataatttaatagaaaatgggaaaaatgaggggatttttgaacataaagtcgtttttttatcggctcgtattacatgttcggattgcgatggggaaaacaaggactgtgatatttgcgggccaaagggaattagacaccacacatggtgtacggttgacaactgtgaacccgtcttcgagtttttaaaatgggtgctatcgtttaaacattttgaaaccatttgttatgctcatttcgccggtaaaatcaaaaaattaaaaatttttataataaaattttagggcgttacgatgcgcactttattttgcacgcattaaccgaaatgggatatatacctgaaataattatttcagatctaaaaatttatcaaataaagttgggaaatttgttttttagatatttttggctgatgtcacagaataaattatccgatttgccanaaacatttgngttggactgcactcccaaagtatatttcccacacaaatataactcagaaaaaaattatggnntaaaaataattattaattanttttttatggtttaaaggtaaaataaatccaacactaccccccat

SEQ ID NO: 23596 - DNA, 1830 bp, Heterodera glycines
agtcaaattaatgaaacttgatattaagcggtatctctaaatatccccctctatcttatgtaattttaaaaaatctagcaaaagtttacaagttgtaaccaaaaaattttgaaaattttcgactcaatattaatgaattaccgtatatgctctaattatagcccggtctctattaatcccgcagtctccaattatcccccagtctacgaggtgttttgaaagataatccctctatcataatcccccagtctctaattatccccccttttctgaggaggttgaaaataatcccccatgggctataattagagcatatacggtaaatgggccatatttttatcataaaaaatgtaaggttatttaaatgcatgaaacttttaaaaagtttcttttgggaaccctgctattcagggcaaagcacaatatgcttaatattcattcattttctcaatttttgcctttctcttctattgattttcttcgcattatttttaaaggagacatttgaaaatcgattaaataatttattttaataaggcaaaagcaaaacgtaaatattttatttatataaatttgtattttatttagaatttatttattaaatatttttacatatttcgatgaatttacaaaaatattttcttgttattttgtttggtttattttctgtaaatgtgacatcgagaaaaaagtttgtgaaaaatcatcaaaaaatgaaaataattaaattaaacattttaattaattataaattttaccatataatattttaagtttcattaaaaaaaatattcagagatttgaaaccatacaaaaaaggaccagctaaactcataggaaaagaaattaaaatttatagaaggtaaaataaattttattaacaaagcaaagttactgagaagaaataaattaataataaataaaaaaattttatggaatttaaattcgattattttatatttttattttatgtatttattttgtttttttcaaaaagaaaaaaagctgaagggactcaattagaagatgccaaaaatgttaattttgctggtgaagactataaaatgatgatgaaaagggaaaaagtgaagcttaataaaagttatgtattttgtaaaataaatttattaatttttaaaaatattttaaacttccaaaaccaacttcgataccaaaacacccaaagcgcacaaaatttcacgacacggatgacgaagaagcattgggggtggacccaagaaaaggatcatatttatatggtaaaaattcaattaatatttaaatatttaagaaattggtttagaccaatgtttagacaattgaaaattgggttgtaaaaatttaaatttaaaatatttttaagctaaccgtggcaaattacgaaaacgcaaacgcccattagaaggagaagcattcacagagagagaacagagaaagtgggaccaattccatgagagattgtcattggacaggaaaatagcacgggaagagagaaaaagacggcgaaatgaacggcgacaggggggaataaaagaaatgagcgaaggtgaaatagaatggggcagagaagacatagactgggaagggatggatagagagagcataaacatggaaatggcaaaagatgaaaacagacggagaaatagcgagaaggagcgaaactatcacaatggcagagaaaaagagaggtggaatgagaaaaggaaaagccacagccgagaaaagcagagcaatgatgagaagaaaagacgaagaggcagaaaaagacattgaaaatagaatgggaagtagagaagcaagagaaaacgaaatttaaaatgaatgtgaaaa

SEQ ID NO: 23597 - DNA, 1237 bp, Heterodera glycines
attctgtgctattttgtgaattatgttttattttttttaaattatttttttggttaatttattaattgatattttattctttttactgatttattctcatggttcgttgagatcgttagtttgaacagtgctgcattcattaaatcattaggtaatttatttttttattatttcttatattctgagagcacatattttatatttaaaatagtttttttaaggaatttttaattagtattttttcttaagtttaaatttctttgtagatttaatttaaattgatatacattatgttgaaatttaaatttttaccaacttggaagctagattataatattttggattttaattaaatattcttattcactattcataatctaaacgataaattatattatttttttattaccctaatgccaatttgataatctatttgttccttaaaaaaattattatgaaaaattcaattaaaaggttggtattttaattttagggttttaataaataaaatttctctggaacatatgcaataaagtaaaaatcactaatatatttaagcatttttttatttatttaatatttacaaagattaattcgtttattttagttttaatctagatttagattttctttgctgatttctagcttaaccacaatagaaaaaaaaaatttttttattgtgtctacgaattgtaattttcgagccaggaattaaacaattggataaactttacgtaaattttctataatttctaaaaaaattcagcggaattcgtaatattattattaaaaaatttttataagcaagcaaacaccatttccttaactattaaatattaaaagaaaagaactagttagaaaacctatttaaaataaaattatattactatatctaaactagagattttgttttttattttataaaatcaaaaagttaaagctaaattaaaataatgaaaattttcaaatcaaattttctttaattatttcaaaaattaatcattttggactaaatttttttgtgttcgttatacttttgccgttagaatttgtttttaatttattttgttaatattttttaattgagatttaaatttttgcattgatttattctcatggtaattatgcgcaaaatgtataagtaaagttgggttgaataacgtttaaacaattttttttatcacttgcatatataatataagtttggtattttcaatgattattatgttcataattt

SEQ ID NO: 23598 - DNA, 2251 bp, Heterodera glycines
  unsure (1)..(2251): unsure at all n locations
atttggcaaacgacgaagtctccgcgtggccaagaaaaagaataagcgaagtttgaggaaaatgtgagccgcattttccaattctatggcaaatgataagagctttttgcatttcagttggatttgcaacgatctttggatggacattttccctcattttgaccgtcctcaactcggcctcaaaatggcatttctttcgccacgtttcaacgcgttggtcgacaaacatttcgatggccaaagtgatttgacaatttggaatgaaatagcaattaaaaagatcggaacacaagcaaaattgtctgtagaggagagcaatgccgaatttccactgcccgaccatccgatgcacaacaaaattcgctttgctaaactttggattgagtacctaattcaaaatcaaacattatttgacaataaaagcattcaattttcagttacattgaccattccgtcgtcacatttcttcgttccaaccaacaaatttttgacaaaggcaccaacttggatttggatttggatgttgaggccaaagatgtccaaccaatttgggatgttttttctcgtgaaatttggcccatttttgcgacaaacatccgccatatgtcattttccgatactgatcatctggacaattttcgtcgccgcacttcgccaacaattcttaccgaactcaaccaattgatttcaatctattccgatgctttgttgcccgatgcaattgctgatgatggaccaaatgcaactgctggccaagcgctgtccaaatggttgcacactccgacaaaagatggacagccaaagcaattgatttgctgtgataatttagaaccgccaaatatcaaatggattaccaatttcaaagatgtattgtggcaattttccaataaaattattgcaattaattgccattgtcctttcatttcccattttataggcatttctccgtgccaaaacttcttctgccagctacatcattcggtttgaggattttgaaccaacagaaaatgggtcatttgaattggtgaatgaacggaccaacgaaatgctgactttggagaaagaaaaaaacgatgatgaaaacatggagaaagacgacgaagatgaagaatatgctactgaggattggctgttgaagcgatgccaaattgggaagacaattcaatgggaggacgaaaattttgaaaatttgaacagtgtcagctttacgctttgtggaacttcctgcgttgggtgagtggcaacagcttttgtttttcttgatgccgtcacatttaaattgcccttaatttaggccattgtctgcaccaaaagcgagccaaatggacgcaaaaagtcagctgaaaatgaatcccgggcccagtggacagcggaagaaaaagtgagagaattatttggaaatgacaatgattgatcattaggaatggaaattctcggataattgcccattatatttgttgatttcttcgtttgtatacatttaatttgtttgattttttgattcactaaattagggttcgaaccccgtgggcggggatgggttttcgcgggggtttgctttgaattagcagcaaaaaatctcacaaaaaattaatttttatgaatgatgtgtttggctccaccttcctttagtcgatgtatcgcctcaattcaattcattttggcataaaaaatgaccaaatttagttgttttaactaatttctaaagaaaaaatagggttttttgggggccggcggtgccgataggcgccgacggtggaaaattttaagaatatattaattttgctaaaaattagccaaattttcagaaatttccctattttagatgaaaataaagcactaccccaaataagaacatttcttagaaattagaaggtatagaaaccctgtattaatcagaaaaaaataaattcaaaagaaaacgtcaacaggtgtcgaactcataacaaataattattttagtgttgaagtactaaccactaaaccacaaatatattggaaattgacagcaaaatttactttatttcataaaaatctgtcaaagatggttaaaaaattcaaaattgtataaattttttgccttttatccatgaatatgtcattcatagggctgtatttttcacccccgcgcccccgcgggagtgaaggtcgcgggggcggggattgggggggtcagagtcacggggncggngacggggggtgagcccaaaaaacctgtcccgtcccccgggatcggggcagggctcgaacc

SEQ ID NO: 23599 - DNA, 1190 bp, Heterodera glycines
  unsure (1)..(1190): unsure at all n locations
catctttgagtcaaaaaatattaaaaaacttttaatcaaacaaaatcgtaaattataaataagggcaatntcagaataaatgtaaaaaaattgctacaaatttctggaaaaaaaatttttctcattcagtacaaaagtctatgattcttaagttatagctaataaaaacatataattatttgttaacataaacaaatagcgatttcaaaaaattaataattattctgttctgagatttatttgtttgtttttcatgaaaaattttcaaatttatgtaaagcaacaaatttatttcgatatggcgccaaaaacgaataaaacgataatttaaaattgtataagtttaaaagcaaattattttaccgatgaatttaatttattcgcatttaatcaaaaaataaaattttaatattcccataaacataaaacagaacaaaaattcataccaaaagcatatgtactgctaacaaaaaaccagctcggcaccccttttaaggccatagccatcgcaaaagtgttttcttctggccaatgccttcccccgccgaatttatcgtttccatcgcttccgctgccttttccctcatcatttcgtcaaatttcttttgaatttccttttgtttgaccttttccgcctttttttgtccaattgtttttccattttttaatttgtcccatttcttcggcttctttgatttgttggacaattcgtccaatttgttttggtctttttccacgacgttcgttttgccaaaacataatgttccaatgtcacacagattgtccaatacttcgattagagttgtgccattttgcgtgccgagttgaaatttcggcatttccgcgggccttttttgggtcactgttgggtcaacagctgtaaaaggaattttgggtttatctttttaaaattaaaatagctttctgaccttcgacataaatcctaaacaaaaactcataaaaaatcggcacattttttctgaatgtttcgcattcgttcttccgttggctctgcccattttgatgacttttcccttttctccctttttctttcatcaaatacacaatgccaagataggctgaatattgttggctcaaatatttaaccgtttcctcaaaatcgtaaatgccctttccctttcgttttgccaataatccgaccttatttaacaaatctttggcttcccaat

SEQ ID NO: 23600 - DNA, 1831 bp, Heterodera glycines
agtgaaataatgaatgaatgggattggagtgtagaaaaattgaatggaatgaatcacatttttgttcctcatctgccggtgactgacatttgtacacatgcatacgcgaaattcaatagatttgctcgatttaaagcgatcaaaagatcgaaaaatatccaaatctttttagaattttcattttttcatacaattttctctaagtctaatcctattcaattgagtgagcttaatactacttttttataagttttttctcacttttttagtttttttctttcgtaaatccgttaatcataaaattaattatcatttgactttttcatactcctttttgtcatattcttgaaccgcatgtcactcactataaacaaaaaagtcattaaatttgtttcgtaattgcctttttgccaattaggcaaacagttttctcttcatttgtacgcacgcaattctctccctctctttcctaatccaaatgagtgagcatgaaattttgtcaaaatgggatttccaagtcccaaattgggcacagagtaaaggttagtcaacacgaaaactcttcatccattaaagaattttatttttcattctctcatctttaaacggactcattaattggatttattttaatttatttccatcaatgacttttcatatttttgcctttctccttaatttccatttttttaacttatttattttcaccgtcgcccatgctttttacaatatataattgtcatgtatttgcgctaattgcttcaaattgtcctccacgttacagcgtaaaagtgtctataccacaccctaattgccttaatgtctataccacaccctaattgccttaatcaccactaaccttttgtatacatatcatattaactaacacacaccgatcgtcacacgcattacctaccgtacatcgccgcctctacagtttgacacacacattcattgttttgcatcatattattgtgtactgtagtcgccgctcacacgctttgcgcgaaatgtgctgtggtgtgccgttgtgatgtatcgaaaccctttacaaaacagcagcagctccagcggtggcaacaacagaaaacagaacagcagcagcactgagcacggcgattggtccaggaatttgtatgtgttcgtgtccaatcattgcccaatcatcgacccctaattaatgttcactcatgccgtgggaaaatgaatttattattttttctattagcatttttgctttttgccgtatttgtccataccacgagacaaacagtgagactttttttgtcgttttgttttttgccatttgccatattcgtctgtgccatggggcgcaatcaatgggactatttggcattttgtttttgttttttttgccatatattttgccctcccctccctctgacattaaattttgttttcttctgagttgttatggggcttataatcgctgcgtaacttttcattagttcttttaaattaaacaaaaatatttttacacaaaagcaaatgccattaaaaaataaatttaaaattactataatgtccataatatgttttttttctcttattcaggaacaagatgatcaatgttcaccacttgccgttcttcggccaaaaccaggccttcatgggtgggtttaaaactatatttattttaattaattttattatttaaatgactgacttttttttaacggaaaattgacttttttgtgcaatgatcggtggtgccaataaaatcattttgccatttgattcctctcccatcaaaaattggacattataaaaaggaaaaagagtaaagtgataaactgcaaagctcttattt

SEQ ID NO: 23601 - DNA, 1564 bp, Heterodera glycines
acataaagcattattaaattcaaaaagttcggtataatttcacctcaataaaaatttagacaagaaataaaatcatttaatttacctaaaaaatatttattaattagaccattttcacgctcattttttgctctgtttaaattatacgcaaattcaaaaatttaatataatagtgcagatgggattccgaatcctggactcgaatttgaggattaatttatttctgcttggcgacttcgaatacacataaaaacacttttttagaaaaaagtgtgataccaccatcattaacaaaaacagtttccataatcacaataaacttgcctgtatctgcctgaatatccgggaatatgattggagtactgttttttgttcagaataatgcctcggtttgtcctccactgcacatggaacttaaaattttcgccgtggtgggcaattgagcagcgcagtaacagatcagagcctgggacaaatgggcatgaaaaatataagattttgtccataaaaatggagttaatgggattcctaatatatagttaaataaaaaacgtaccaataatgacggattggttcgtcgggtgctccttgaaaggcaaattttcgacaacgacggcacttgtccaaaatgataagaggagaaaaaacagagaaaaatggagaaaaaaaccaacatgcctggtaaaattttgtgaaaatggcttcaaacgaattgccatttgaccttaaagaaagtgatgaggaagtgtgccacaaattaatgtgaattgcccgatcaccctgagagtgatctgatcaagtcggtgtaaaagaattttttgataaacattaaaagttagataagcatgaattaatcagatttccgttgttttggtatcctatccaggcctgattcctaacctaactttttcaacaatccggtctctattacatcactaaaaagagaagaatcctgtgcagcacaagaatccttcgtagcatttgtgtgcctggattacaccagtcagaattttgccatcaattagttaagctacctaactacaaatgtcagaaaatttgtgaattcaaatgacatttcaaaaaattttaaacaaatgcaaaaaatattatttaaaaatgtcctgtgaatcaaacatttttcggacctcttttcacattaattaatttttctagtggaaaatatttaaatgagtggaattatttacacaaaaatgtaccaatttaagacattttaggggctaatttttcaaaagttttttaaaaaaaactggattcggtaatccgctagtgcctacatattgggattgatgatgttttatttagaaattcaaaattaaaacactaaaaatttggcgaaatgctttctgccaaaaatcttagaatgccaaaattcattttttgatttacgagatgaggtcagcccagcacggcagatttggaaaatccgatctctaagaaaaactccaaaaatatgcaaacatataagtgccaacttttgttggcaatcacaaaaaaatttcctcaaattttttgagatatttatttgaattaaaattttactatt

SEQ ID NO: 23602 - DNA, 236 bp, Heterodera glycines
tgcggacatctacatttttgaattgaaaaaaaattggtaattactctttctttttctccatattgaccatcatactcatactccccccaccctttccccccccccattccctcctccctctcctgctacaaccctctgatcgctctaaagaaaaatcagattgacagcgagatacgatcagcagatcccgatcgagcgagcgcccgcagatccagccccaatgtacgaccgagaag

SEQ ID NO: 23603 - DNA, 239 bp, Heterodera glycines
aaaacattggcaatttctaattgaaaataaacatgtaattcatcattctcattctccatacgcccatcatcctccattcactcttcttccttttctttttccgcccctctcctccctctcttgatagtttaaactgaaggcgggaaacgacaatctgatccccatcaagctagcttctgcaggtcctgctcgagcggccgcccggggatcgatccccgatctagtaacatagatgacac

SEQ ID NO: 23604 - DNA, 1788 bp, Heterodera glycines
cggaaattttttttgaatttttttgcatttgttgccaaaatttatgaatgattcttattggttttaaggaagtcttcatagtccgaaatgccaaaatcaacaaagcaaaccatataagaaaattcaattttaaacttcggttcaccacgtatatgattaataaaaatatatttcaattatgtagcgaaatttaaaattgttaaaataaaaaattattaattaatccatcacttattcaatttccaattgtctatttttctgttcgtcgtcccttcagaaattaaatattaaatcaaaacttccgtgcttctctcgtaaaatgttaacctcaaaaatgtaaaaatatgtatataaattcatttaacaactcgtaaattatttttcgatttttcttatttatttatttttaaataaaaatgatcttttctcaaatggttaataatacataaatggcattttacatgtgttcatcattcattctttcattcaagacattccaagcccgtgattccctccaaccattccttgtcaattgggacgtaaaaatttattaagcctgtgaaaagcaaagaacaattaattttagcagctttcattatttaaataggtaaatattttaaaaatgaaatgtttttattttgaatttttgccaagttttacttttgttctttttatcgcataagccgaccgaaaggatgccaacttggacaaagtgagtgccattgttggccaaaagtgcgccgccgctgtccccctcaaacagaaaagtgacaagagaaaaatgttgggatgggcaaacatttttaattaaaatgtaaatattaatttgatttctgtttaaaaagatttttttttaatttaaaattcattttcattttttaaatatttaagggtttttcattaattccccaatatttcggattatccccccaattgcctgcatgacagagttcgactcaacacaaatgttccctttgcggccgcgaaatgatctgcagccaaccattttcactgggcgaccatttaacattttggcaggcctcgttaagcccacacaatcatctaaactcattgacacaataaactttaattacagcagacgaaaattatccatatatttttaatttgattcaatccaaaaattgggccatattttggattaaatctgataataataaaatttttagaattttgcgccaggaccaatttttcgtgtacgaaggcgcccaattttctccgacgacgatctttttttgcggtgccttttttcaaaaaactttttgggaaaggggtggggcggtccggcggtgtcgataggcgccgccgggctaaggaaattgttcaaattttgaaattttccccattcgttacgaccccctcctttacagccgccccttacgacgaacgagggggggggggggggtgcgccggcgcaccccttgttcacctgtgcacgctttgacgccgcctgagtttcgcataccggcaattttttttggcttactcgtgcacaccttctccgaaccccaacctttttccatcccccaattttaaatattaatgaaaaaagcttcgcttgtctcctgcccccagcccatgacataagcagtgccattgcgaaacctatcaactttggcacagtgaatacaaattggctgaacccgcgccattgggcgagaaagctgaacttgattcaaataaaaaatatttgttgacaattttaaaattgtccgccaacactttgccttaataagtgccatgtcgtggaactgtgattccgattggtcc

SEQ ID NO: 23605 - DNA, 1971 bp, Heterodera glycines
aaaacatagttttcgagctctatcgactggtattttttcggaaaaatttcgattttttccggaaaatagaaaaaatttttggcctgagcgggacatttgagtcccgggcccataactcgtcaggggttggttttatcaaaaaaacgccttagggcaaaattgtagagctttttaagctctatcgaatggtgtgccatatggccggaaattttcaaaatttttcgagctaggccccctagaaattttcggaaattttttttcggacgaaaatgggggtgaaaaatatttttctggggtaaaataaggtgctgagtacgaatatgatgtctattttaagtttcataatttttggaattttttaaaaattctttattttttggcaattttttggccctcgggattttggcctaatatttgaaaattcataacaaatcgaagggtggatcaattttcgtgcaattatattataaaaatagagaaaaatcaggagaattttatgggatttatttgggatttctatcttaaaaagaaaacaagttattccagaatttctgaaaattttcgatttttcagaaaaaaattcataacccccttctgaaaagaaatttttgaaaattaaaatactacaaaaatccgcaatttttttctttataatataaattttattttacatttttatcactttcttacgaattgttacaaaaataaaaccgattttgggattatggaccaaaggggtgagcataggatttttgagttgaaaaattttttcaccaaaaatcttcaaaaaatatgtctttaggggttatttcggccgctgatcatgaatacgtaatcagtttttacttttgacatcgttaagacctaagaatccctgtatcattttgaggggaggggggccaagttcgaatccggacggtgtaacattatttttctatttatttttgagttatttttcaatgcttttaattaatttgaagattggttgtaaattttaaattttttttaataaataatttcattattattttttatctgtaaaaaataatatcatttcaaatttcttaaatattcaatgcattcgatttttattctttaataaaaaacttttccttatttatataattttaaaccatgttgaacctcttcttatctctgttgtacctcttctaatcactgttgtacctcttctaatcactgttacacctcttctaatcacagttgtagctcttctaatcaatcacagttgtacctcttctaatcactttttcacctgttctaatcacttttgtacctcttctaatcaccattgtacctctcctaatcacagtttgtacctcttctaatctctgttgtacctcttctaatctctgttgtacctcttctaatcactgttgcacctcttctaatcacttttgcacctgttctaatcacttttgtacctcttctaatcaccattgtacctctcctaatcacagtttgtacctcttttatcacttttgcacctcttctaatcacagttgtagctcttctatcactgttgtacctcttctaatcacagttgtacctcttctaatctctgtaaggccaacaaaatttgaaaaacgggcgcgaagcgcccgtcttgtgcctcgatgtggactaaaaacccataataattttttaaaaattcaaaaaaatctctccaaccaattcgatcaatttgaatcgctttacagcctaggtagcgaagctcaagaagcgcgaagcgctttatcccaagcccagatccgacggttcacgcacccgctagttatatatatgttatataggttttgagtttcgtttcaaaaactaatttgagcttaacggctaatgggacgggtctgaaagtagtggaagggtcttacaactttttgaggagaattcggaaaaactataggtttttttctccgagggccaactgagtcccggcggctatttctcactttt

SEQ ID NO: 23606 - DNA, 1563 bp, Heterodera glycines
  unsure (1)..(1563): unsure at all n locations
cggttgagtttcgagcacgtgctgaaacaccattggatcatcgcncattgcaataagaacaacgacggccgactcgtccaccgcgtccagcgaatgttggtgattggagaagcgaacaaatgggggacagcactcactgcctttgattttatttccttatttctatccgatctcttttgtgaataaatggctgtaagcacatccaattcaatgctttgttttgcttcggttgcaatggcttttccgtccttttcttcgttcgtttttttactgattgaatttcgtttccttttgaatattccaatgaccaaaactctgtccgtcctcccctttctctccccaatcgttcgcccgttcagcgcaaaagcaggtggtccccacattatgaagcgagccaagggtttggacataatcccggacgactttgtgaacattgatgggctgcccgtggacatgcgctacgtgcacccgcccggacgccctcacggtgctcagatgcgcatttggagtccgcatcaatcgccaggtaaatcgagggactattcgaaaaaaagaatttgtttagtgtacgatggggtggcgcgtaagctcggctacaaaacgaggaagggctttcagcacccatagacaattggtcagtttgccacccgcacagaaatgcatagattgattaatgttcactggattgttctatttaattcctgtttggatattcgagtgattccatctccttcgaatgcaaattaaatttctctgtgttacaatgtgtataaatagcattctgatgagattcaatagattaggaatacattaaaaactgaaaaagcaaggactggccaagtgaaaatgacaaaaatacaaaggaattgtgctgaatgctttaaagctccgtgtgttctcttcaaaaacagtattaattgaaaaaatacaaacgaagatagacagggttatcccaatttacaaacatagtggtaagttttagtctttccatatggcagtttctgtttaaggcaaggtgccgtcccctgtaagttgactcgggcagagtttggttgacgaatgaggtttattacacaaatcgcagtggcatttattctgtttctattgttacatggccgtgcgtgggcttttcgagtgcaattggggaagaagacggttgaagcgatttttggggaagcaagtgaccaacaaccttaacagggagagcggaaggggacgagttatgaacagcagagagtgtgaccaattcaatgccccccggcctaatcaatgggcataccgtatatgctctaattatagcccagtctctatttatctcccacggggtaaatagaatttttaaatttttcgaggaaaaatttataaaacaaaatagcggatttttctactattttaatttgtgtaaaatctctttcagaactgatttctcatttttttcacaaaatcgaaaattccagttttaaaatttttaaaaatgccaaatgtatgaaagaaaaataaggttcaaattcggaactcgtcagttgggccctcgcgtatggccccagcatgtttttgcctata

SEQ ID NO: 23607 - DNA, 1422 bp, Heterodera glycines
ctgttcctcttcactttctcttcactttctgctcctcttccactttctgtttctcttccactttctcttccgctttctgttcctcttccactttctgctcctcttccactttctgttcctcttccactttctcttccacgttctgtttctcttccactttctgttcctcttccacttcctctttctgttcctcttcctgttcccctttctgttcctcttccactttctgttcctcttccactttctcatccactttatgttcgtcttcctcttccactttctgttcctctttcatattttttagttttaaatttttttgttttatttaatttttatcgatttttaattttccgtaagccatgaatcaaaatttattctgttaaattggatcagaaacattttttttgtcaatttttatactgttaattcttggtcatccaaatccaacaatgttacattgttggtattagttgaaatcttaacatgtttaaaagctttgtctaagctatagctttatgattagacaattgctaaagaagttatacatgaaaattgcgaattttaaattaattttcaatttgttacaagttttgtccaaaaaaggatcaaatttttacttttgagttcattcggtatgcataaaaaacatagtatttcactctttatgtaaattttttatttttatttcctaaacgtaattatcaaaaaaaaaataattaaaaagtttgataatcagaattaatgggaatcgaaccctatacactacaccaacaaagaaaggcatactaaccacttgttcaccggattgcttgtcttgtacttgtaaatacttatttatcttaaatattatttagatttatttattatattatttttttattattatttacctattttatttgattttaaattcagttttaaatttgtttttaagtttcttttttttttgcgtttcgggcccaataattttttgttcagtgatatttttctaaatttttggcgtcgtgggaaaacgggaaagtcgttaagtataaattaaaaaaaatacccttttttctgcaaaaaaaaaataataataatttttcatttcacgaggcaattgccccccatggcctgcgcccctggttacggccttgggtgggatataatggaagtaaaatccttaatgtgggaaataaatgccgcattagggaggaattagtaaattttaaaattgctaaattaaatttcttgcaatcaaatgacaaaatgtcaataaataatagaaaattcaaaacaatatggtgaaaaaatttaaagttttttttttctgacgaaaaaaattaataaaaataaagataattcctaatattacatgtaaaccgtgaaaacctgttattaaaaaaaataatctgccaaaaaccctgtcacttatagcaaaga

SEQ ID NO: 23608 - DNA, 1687 bp, Heterodera glycines
aaaattttgaatcttaatcacggttagggggactgaactcggtgcggatttcaaggatttattatcgctgtaatggttattaatttgagtacagcatcaaacacggatttcacctcccactattttttactgtatttataaattttaaattttggagaatattctgaaatttggcccatcacctaaaaatattactgtaatacaagccttgcaaaattcacgctttccgcaccattctctctcccctgtcggcattcgcagctcacctccctttaatttcttttttccgttttgtgtcctaaattgtctccaattttgtacttccaatttcttctctttgggcatcgcgtcttggagaaatgaatgcgcttatttccaaggtgtacttgggaaacggcgttttatccatgaatataaaagaatgttactatttattccctatataagaataatataccccagtttcaagcttaaaaactaatttaagactttctaccgaatgttacgggtcgggagtggtatcattcgatagggttttggactggctataaggaaaaactatcggcatcccaatcggttaagaattgttcgaactgcgttcggaaaacgagtcaaaatttgcaatttttttgggtgtcccatttttgaacgctttttgcataccttaaaaagggtcaaatcaaaactttaatatgtttgtgcacatctacaaactcttggctttcgaatgataccagggttgttttagtccgtgtccgggaagtgctctaaaaagggaggacaagcacttttggtcgggctttcttccaaaaaagaaggaaaaagaaaagggaattaaacgtggaagaggcaagcgactcggtggtcaagtggttagtgtgcctgcctttggtcatgggttgttgtgggttcgagtcccattaatttattggattttcccgtcaaatattatatttaaattatttgtttttaaatttgtttttaatatttttcctataaaaaattttatgggtttaaaaagagaaagacataataacaaaaatttggagcaaagtacttttggataaaaattgattactttcctttctttcctttttttatatgtaatgcacactcacaagtggtctttgacctcgccttttcaataagcaaaaaatgtctcctccttttctttccccagttcattatcaattgtttccatttacatcatcagttttctactgctcctacttttattcaataaatatttccaactaaattattgctgttttaatagcataaatttttagtttttgcctttggtggtggtgggcgacggctcgggtcccacctattctgggtgttttcatccattattttattacattttttgaatgattttatttttttaaaattaattaagtttattaaaataatttattttaaatattaaaaataataattctttcttcctaatttagcccaaaaatctattgtttgaccttttttgtgcaaaatcatttaaaaaatggagacaaattaataagttacctaaacataaaattataaatattttatgccaaaaaagaaggaaagtgaaaaggaaattaaaaggaggcaagcgatccggtggtcaagtagttagtgtgccttactttggtgctggcttcgccatgggttagagtcccatttcttctgattatttaaa

SEQ ID NO: 23609 - DNA, 875 bp, Heterodera glycines
ttttgttcgaattcgagtcaggagttcgaaattggcccaaatgaatgccatattcgtgatcagcgaccccgaaaactcttagatagactttttttcaaagcttcttaaaataaaaaactctgcaaaagaagtcaaaaatttttcaaaatggtacactttgcaggatccattgagtttcgggtttttccgctaaaacaatcttggtagcattcgaaagcttatcatgtttagaagctttttctaagctattgcttcgcgattagacagttagcaaaaaatttataaatgaaattgcgaaaaagtcgaaattttaagttttttcttaataaaattttttccagacttgaaaatctttttgctttttgaaggctaatagagcatattaagtgctttagaatgataccaagattgttggatttgggtgccaatgaaaaaagctatagtggaaaaacatgctgacgccgaaacacgagtgccgaaacgcgtgggtccccactttgcaagtagtgccaaaagcaatcagacgtttaatgaaaatgtgctcacgccaccttcttgaaattgttgacccatccagtatttgctggatacaaccaatcacagaaaaacaatcgcttcggttgtccatctttgctcggcgtgtgcaaccaattggacaacacttggccagcagttgcatttggcccatcatcagcaatttcatcggggatcagaacattggaatcgattgaattcaattggttgaggattgtcggcgaaatgtgacgccgcaatttgtccaaatgatcaccatctcgaaagatcaagcggcgaatgtttgtcgcaaaaattggccaaatttcacgagcaacaacatcccaaatcggctggacatt

SEQ ID NO: 23610 - DNA, 1924 bp, Heterodera glycines
  unsure (1)..(1924): unsure at all n locations
gacgagcgtcggctgcattcggaagacgtccgtggcccgctttgcagagctggcggatttcatcgtcactgatctgtttgggaaaaaggggggaaaattatttttgaaaaactcaaaaatttttctacctcatccgtgaagcgatgaggaggcgagcggttgaccttcgtgatgatcgcgtccaggaagccgcttgacaggccgtctccttgcacaaggtccgatgccgctcccgattgacgccgagactgctccgccgctgctgctgccgttgcgtcgaaacagtaatcctccattgaagttgttgcgccggccacgtccgcttcgtgtgtgatgaagtgttgtagacgatggacgataataataataatataatacaatatgagggcgatgaagtgaattatgtgaggaaaagtgaggaaatgtcgcccttttatacaactttttttccgttaatttcgaaatttttttgcttgtctatataaagggagggattgcaaaatttgctctcattcattgcgcccgtcaaattttaattcttctattatgcggaagatcgtctacttcaaactgttgcaaattgtgctcagtttggccttcgtgtggcaacttctttcccttcaccaattctgcggcacttttgtctctccaaaggtgttgcttttgctgttgacaatttatttgaatttaatttattgttccatgcttttcaggccttcctccatgacatctcaggtggccattgcaaacgcttcacgttcatcggaaaggactcaaagacgggcgaattcggcgcagtgttcgacgagcgcaagtggcacaaccaactgttcatgagcagcaccaatggccaaccaatcgaggaacagcaactgaaattcatggacgaattggccgagaaattgccccccgctggacgccactgtattccgataaccgtaagcaaaagctaatcacaacaaatacatgcaaaaataatcccattttgttctttcagctctcgccttttttctggactgagaaagacagaaatgtgctcgactacgttatggaccttttttccggccaactgctcatcgcaatgtgctcgcttctcacccttggcgtcggcttgttcagaatggcacgctctgcggcagaatatgaagtgagttcgacggatgggtggacacagcacatcagcccgacaaaaacgcgaccaaattgcttttcagttgaaatccgagcgattttttggtcaaattgtgatcatttttgcttttgcgcgatcaaattgcttttcagttgaaatttgtgatcagtttagcttttgcgcgaccaaattgcttttcagttgtaattcgatggattttttgatcaaattgtgatcatttttgttttgcgcgatcaaattgcttttcagttgaaatttgtgatcagttttgcttttgcgcgaccaaattacttttcagttgtaattcgatggattttttggtcaaattgtgatcatttttgcttttgcgcgatcaaattgcttttcagttgaaatttgtgatcagtttagcttttgcgcgaccaaattacttttcagttgtaattcgatggattttttgatcaaattgtgatcatttttgttttgcgcgatcaaattgcttttcagttgaaatttgtgatcagttttgcttttgcgcgaccaaattacttttcagttgtaattcgatggattttttgatcaaattgtgatcatttttgttttgcgcgatcaaattgcttttcagttgaaatttgtgatcagtttagcttttgcgcgaccaaattacttttcagttgtaattcgatggattttttgatcaaattgtgatcatttttgttttgcgcgatcaaattgcttttcagttgaaatttgtgatcagttttgcttttgcgcgaccaanattacttttca

SEQ ID NO: 23611 - DNA, 1648 bp, Heterodera glycines
aaaaaaagtttttgtcataaaattacagtatgatctctttcatattttttgttttaaacttagcttaattaacataattaaatttaaagtcaacaaatttcctacccttttttcgacaaatcgactctctctaattagggaaatttttaatataaaaaaatttctacattttaaaattaaggtcagaaaacaaaacagatgtggaatggtaattttttattttatgattttgaaccttttaaaaatttttcaataaatagcagatatgaaagcgaagaagttgggcaatgattcaaaaaacagaaaattaaaaatttattattataaacagaactgcaagttttttgttttgtaaattttcatcattaaggagaagaaaagtttggctaagaaaaattgttaatttaaacataacaacacgccaaaatagggaaaacggtttttctagtaccggccagatatggcattccgaggcccaaaaaactttcgaaaatcggaattccgaggcccaaaaattaatcgcaattcgactcccaaaacgccagaagtcggaaaattttaaaaaatataaaattaataaaaaaaaagttaagtattttaataggctaaaaaaatattttactattaagtgaaataaagcgtcatgaaaaataattgataaaagaagaaaattaattttaatataattatttcatacaatcttataatattgtttcctagtacaggggatgctttccgaaataaaacttgtttgtaagtcaagaagatttaaaagaaaattaatttcttatatttattaagtctaattaaaaataattgaattaataaattaataaaacaaaaatatcaattctataaatagtcaaaactaatttaagcacattggaaaaagtaaaaaatttgtgcaaattatttttagttgcatgattgacaattactaaataaatacaattaggcttatatacacatattattaaacaataattgaaataaggcatagaattaaatattgaccatacattgtgaacatacataaataactataataaaaataattttaaattaaattagtgaagaaagaaaaacttttttttcgattagagttgtatcttgaaacaaaaaagagaaaaataaatatgtgcacctaaattctaaaattaattctcagaattcgacttagaaaattatttggtaagagaaaaaattataagcataattagacaattaaaatatatgattacatcattcttaaagaattactattaaacaaaacaaatttagcagttattgttagtcaaactattaataacaaccatttgaatacacgagattttatatttataatattcaatttatattgattattcagttattttttaaattatataaggattgaaatatactaattaaaatcaaaaatttataaatttaaggcttaaattacatatataaaaattgtataataatgcaagtcttgaagatatcactctaaaatccattaatgttaaaagttgcctaattgcaagaagaaaagtagaaaaattttgtgtcaagaaaaaaaattaaaaattatttttgtcttcataaaataataaatgttatagtaaaataattcagcaagattgagaaattggcagtaaaaattggt

SEQ ID NO: 23612 - DNA, 1049 bp, Heterodera glycines
tatgaggacggatgtcatccccactagacactcttatgaggatgggtaccatcaccatagacactcttatggggacggatcccatccctatagacactcttatggggatggctaccatccccatagacactcttatgggacggatgccatccacctagacacccttattggaacaccatcaccctaaacaattcaaatttaaacccttagaactacaagaatcagtgtcgacaacgtttgaataaggaacgccgacagcaaaaaaatgtgcggcaacaaaatcgtggaaaaagactgcagcaagaatctcatgagagccagattttgactcgaggacgtcagtggcagcgcggtggaagactgcagcctctgggtggtattgatggaaatcagaattcttcgtgctcagccaaatacgtttttaatttgaatttgtcttgatttgaagattttcttttaaaaatgaatttgaatatgattttgctgcatctgtttaaatttccgttgattttttgtctgatttgaattattattatttcgtataaaaaaacaatcaccttacataattattatacatattgatttcaagtttcttattactgtatagttattttaagcaaaacatggaaaacttatccgatgagcaaatcgttcgtgccacattgagcagaactgttgcaatggtcgtgttgaaggaaaggaatgagactgcagccgggttaaaaaaggtatactgtttgactgatggaatgcatcaaaataacactgtttaagtggatggtaccataataatgcagtttaggcggtatccatacacataatactgttaatatggatggtatccatccacataataatatttaggtggatgaaaacaatccacataatactgtttaggtggatggtacccataaccaatcccatccccatagacactcttatggggatggctaccacccccatagacactcttatggggacggatcccatccccatagacactcttatggggacggatcccatccccatagacactcttatggggacgg

SEQ ID NO: 23613 - DNA, 917 bp, Heterodera glycines
catttggacaatttgcgtcgtcgcacttcgccgacaattctctccgatctcaacattagctccgtggattcgggtcgactatttcccgccgccgatattgatgagaatcggccgaatacaactgcaactgttgctggccaagcattggccaaatggttgcacactccgacaaccgatggccaaccaaagcaagtttaggcatttcgcaatgccaccacttccgtccgctacataattcatttaattgtttatagtggctcaatttcaatggtgccatttgatttggtgaatgaacggaccaacgaaatgctgacattcgactactataaagggcagtccgaaagctttctaataaagcggtgccaaattggggagacggttcagtgggaggagcaaaatatggcggacaatttgaacaatgtcaacttccttttatggtgacaaaaaatgcattgggtgagcaataaaaggaaaaatattttttaaataataataataaattttgtaagtttttcataaaactatcgatggtcggtttaatttttgaaaaaaaaaattaaatacaaattttcaagataaagtacattttggcacattcagggttggacaaaaattgggggacattcatttcgaccattcggaaaaacggattattctttcaaactcgggctctgtattcggacaaaaatttcgatgtctttcatttgtttttcgattttgttccaaattttagcattttagggttagacaatctttcgaaaaactaatattttcattttggcaaatttaaactataacccgaatctgaaaaaaacttggtttttttgtccaaaatggtgacctccattcattgaattcaaattgcacttaatttaggccgttgtcaccaccagcggcgggtcaaagcggcggaaaag

SEQ ID NO: 23614 - DNA, 1497 bp, Heterodera glycines
aacttaagcaattgtacgagttgtctgacaccttagaatcgcttaattcccaccttccgctgctgctgctgcttcttctgttggcgttccgtcaccccgttcagtttgagtacgctcaattccaccggcggaagtgccgtcgtcgtcgtcgtctttccgccggtgccgttctgtaccggcgccattgtcatcatcaccggcgaaccgagtgccgacgcggacggaggcggcgacggcaccgctttgtcctggcgcctaatgcaacaccaacagagcaacgggtttctgtcgccgttcgagaggcgcgcgggcgaaacggcggccgcctcactttggcagccgctgcttcggcttttgcttctgaagctgacagacgagtggcgggaggggacaatgcgcaactgtttggtgccaggagtagtggtattatgctgatgatcagcgacgacggaatggcaatgattttgagggacaatcggcggcattttgacaaaatgctaaagtgggaaaatgccaccaaaaagcaaagttaaatggatggcgaatttggtatgaaaattgagaaaaagcgcggtgaaaacttgatcggcatctctggcaatcgagtcacccagtggtgaccagaccggatcgggatcccgcgagatttttcgggatcctaacatgggatccgtcccggtcgcttttccaaatcttcgggattgagggatcgggattcggtctggatcccgactcgggatccctccgacccaagttgtccggtctctagagtcacaacagaatcattgtggcggtggtcgattctcacgagagggacaagtcattcccgaaagatcgaagggactttcgagattgttagccctttgaccaaaactttgcaattgctaatagcagcagtaaaatgcgaataaaatccccttttttcgttttccgtccaaaagccccgcggggggcgaaataaaaaagaggggggggggaggcgacagatgcatttttaaacggtcagagaaaatatgttttgtcgcttcgacaacattcccatttgtacagtccacaaaaagggaggggtgagtcacccactgatgagaaaggggcaattgaaaggaattcgaattggcttacatttggcgaaatgtctgcgagggcaaaaagagagagagaaagagaggggggggggagagagtgtcctaattctttacaaaatgttaaatggaatatttttgattataaatttccgattaatggacaaaaatatatcaatttgattggaatgatcaaataaatcaaccatgtacatattttgtcgaatgatttaaaaattaattaaaaaaacgtcacattttttgtaaaaaaaagaatggtctccgttttgttccaacgcattccgtcacattttgcatttgctgcggttattggggcggggggggggaggggcgggggttgtccaatgaagcccaatgatgcggaaaaagcgaaaagttatggagagagggggag

SEQ ID NO: 23615 - DNA, 1913 bp, Heterodera glycines
  unsure (1)..(1913): unsure at all n locations
gtccgtgggatttccaaatgaaacttggttggatggatagagcacatatgggttcttaagaaaaatggttttattttctgccaaatgagcacgagtgccgagttatgacgtgccaaagtttttagttttttaattaaagaaaataattaattatttacatatcgtcaatgtgttgtttggtgtagaggtaatgtgttagtcaaaatttttattggttacaagttcgaatcccctttctgtaaatccattttttaatttttatttttcctttttatgagcacttcaattagcaaattttatttctttatcaaaatctttattttaattttattccattaaaaattgcattaaacataaagatgtaataaaaaacctgtcgaattaaaaaatatatttttgtctaatatttttattgagtattttatgcactaaataatttcaaaaaaattaaaaataaagtttttttaataaaaaatattttgataatttatttggcataatagacaaaaattaaaaaaattaatttacatgtaggggatccgaaaccgctacaccactggacactgtgccgagacacaaataagtatttcttttatttcatcattaaaaagtttggcattttttatctcggcacaggggtccatttggcagaaattgaaagcatttttcttaagaacccaggggtgctctatctacccaaaaaatctcattccgagatcccacggacacttggccacctccctttgtgagtacaactgagtaccaaagtcccggttttgaccagttttgaccgggaccgggaaattcccggggttttcccggccaaaaagtcccggttccggttttgcccaaaattcccggtcccgacctaccctagtatttaagcattaatttattaaattttaacattttataatttaaaaattgataaaaaatcataggaaatttttttaagaattgaccaaccacggtttaagcatttacacttatttcattaaattccttctcagtttttattcatggaaagtccaactgcaaagcccaaaaagaggaggacggaggacgaagaaaatttggtaaaaaaattaaaaatttgtttttttcaataagggtgaggcttctaaaaaattcataacaatatttgaaaattgcaaaaaggtaaatatgaaacacaaaattcttaatagacataaaaaaggcatttaaacaattttccctttgctggaggtcgacttttccgcttctttaaattaaatttcaactcatatcacaactgcccattgacctcattttttcatcaccaatgttaattcttctatcactactacccatttgacctgtcgtatttccacctcaagtgtaagcggcagcaatgcccttcttttggttatttttatttttgaataaataaatttaaaaaatttgatttacttattttattcgtttattcataaaaaataaaaaagaaataaataataaataaattgaggtcaaagtcaaatgaggtcgaaataccaaatcacttagaaatttgttacattctagctttcccggtcttacatattaccctagtgaactttaagttttattttaaattgatttaaagaatttgtttttattagttctttatctagttgattccacaattttgttaccctcccagcaaagggaatgaattttttgcccagtttgtattttgtgttaaatctataaaaggggatgttaaagcgtgctgatggattaaaaatagaaaatagtttcagatctgttcggccataaacaattttatgcgccatgaacagatcaaacagctttcgccttttctcaagtgaaggcagttgcaggtattctnatcgattttggtatggcattaaggaaggctacatttaaaaaatactcttttggtgaaatat

SEQ ID NO: 23616 - DNA, 1473 bp, Heterodera glycines
attaatgtttatgcaaattccgctgctgctgcacggcgttttatcagcagaaccaatctctgtgctgcacaatttcacgtcttgagcacaaattgcttttatcccatccaaatccccaaatccaaatctccaaaatccaatcagccatttgagaaattttcacaaccataaataaattaatgaatggaatatgccctgaaggggcggcgggaggaggcattaattagtgaatgaattaattaatttaatgaatgaatggacgcggcggcgggcgcccggacactgatcggacccggtgatcattacaaatttatctgatcatacgtcgaagcattccggatcattttgggaaattattcatttctcttcccctcaccaattcacatattaataatctctctttgtgttgctcggctctgatctgatcaaacgggaatgcatttaattccggaaattctgtcagtgatcagcgttattgcctgaacccattttcggtagcgcaataaatcgcgcacagatctgttgatcagatatctgtgtgtatatcttgttcccggatttgtacagtcagcttgatctgctgctcagccaagcattacgatcagtgtatgattggattcatttaatttttgaggaccgatcaaatgatttagcctggacaaatattattccagagttgcgatcagttcatgattcaattttcgaggactgattatactgatcatttgatcaaatttaaacaaatatttttccgcatttttaaccagtcagcgacctgattcgctgatcagcagttattacttaacccattataggcaaattttggataattcttaattgcattacatgtaatatagcataaaatttgtcttcgtgaatgaatgaatgaacccacaaggactgatcggaaagcctgatcaatcgctaatccgaaaagaattctagctttttggtcaatatcagttcttaatgcaatcattttaaacttgcgttatggataatttagaatctcatttattacgtataataaatgaaatttaaataataaaattaacattgttttcaattcttttctaaacattttaattacaaaataaaataagttttcttaaaaatttagagcggaaaaggccagaaacagttccacatttttaaaataaatcttctaaatgcaaaaataatttttcatttaaatgctttttccattaattgttaatttaactaattattgttaattgtcttttctccaattaaaggttaacaaaattaagatacccaaacaaaatgttcaacggcaataataacccgataaaaatgagctcggctcaaaaaatgccttctgcctcagcagcaccacgccgacagcacccgcatttctgcctgtttggcactgtgcatttggcggtaaattcaaattttgaatttttgcaattattcggactcgctcagttgggccctgacacgtttgggccc

SEQ ID NO: 23617 - DNA, 1304 bp, Heterodera glycines
  unsure (1)..(1304): unsure at all n locations
ttagtgctttaattatctttattttgaaccatttgacgtggcacagataggcaaaatcgccacccgaccgacgaatgcttgtgcccaattcgatgtaacaaaaggcacccaaaatggcaattgcggcagaaagagcccaaactatgagcgaaaggccaacctacaaatttgaaacgaaaattatggcacagtgacataatgccaatcgactgattgtgtgtggttgagaatggaagtgggcgtaatgaaaaggccggagccgacgatgttgctaataatgtacgaagtggcaccccaacggcccattttgtttttgttaacggacgaacacatcgccaacaatcgaacggagcgatttttgaacttttttttttattaatttagacgaaaaaaaattagcaaaataataataataaaagaagcattgagtgattttgataagaacaaataaaagaaattattctttggagtggtgaaagaataaatcgatggaaatttaaagacaacgccaaaagaagcggagaaaaagcaaaaagacagtaccctccacagtacgactacagtatgccagctaaatggcatttgcactttcaaaatgccatcttcggccccatcaaattttattttttttttgttatttttaattgccattttcaatgtgtggaaaattcgacaggagcagattattgttcatttcttttttggcattggcaccattttgcgggggaaggccctaaaaattaaaattagtcagaaggacggaatttctgcggcatttccaatgccttaaacacctctttttgtttgcctgaagccgagtttggcgttctgtccaacacttttacgtacacaggtctgtacagcaccacgtcgtcaacaaagtctttctctccttctgttcgtccgtcccaaacttgaccaagccgaaactctggcgaaatgtatttgcccgtttccacgtgatcaacgcaaaaatcttgaaaaattgaattttagccgtgttttttgttgtttttctaccgtatcccacgctgtacagttgcgaatgccctggacgaaagggtacagtagcgattgtaagcggaaagtccatttcgagggcggcactgccggcgtcggccagcgaagcggcgggagacggcggcgcttttggcacggacatttttcgactggcatcctcgacgtgaagtcgcagaacataatacaactgaaggagacgacaanagccaacctaagcgaaaagagaaagggtggacaatttggcaatgggagggacaaaaaacagaaaagacaaaaaaagggac

SEQ ID NO: 23618 - DNA, 128 bp, Heterodera glycines
ctattggaactgaaaattgagcacatttcaagcatttacgtgctaaagctcatacgattttcgacatgaatatttctataattcgtttgttcagtgcccacagatcaccagaaggagagtgatctgaa

SEQ ID NO: 23619 - DNA, 990 bp, Heterodera glycines
  unsure (1)..(990): unsure at all n locations
agccaccttgagaaaaatttgtaatttattagattttggccaaaaagacaaattttaattagttttgctaaaatccataaaaaatctgaagaatttcacaaatacatttctttgtacattaaatattcttaaaaaatcattctcatttgccatttttatccaaaaacacaaaaatccacaacatttctcaaaaaatcaggaaatcggcagattgtgaatatcgccataacaatggcatctcatcagcacatttttgaaagtatgtatttcaattatatcttaatatttttttaaataatttttcacattttttggtaaatattattaaaattaaaaataggaaatttgaaaagttcgacaatatttttttgttgcaattcaattaggctaccattatagtttaaaaaataaattcaaatatgaattagctttttgaattatttacataatttaatattttgtcgagtcatgaatttctttatcattttactacacatcatacaaatataagaatggatacaatttgctgttatatgtatgtgagtatatgttattaataattagtgatgggatctttatgtaagaaaatttgaaaaatatttatgtaaaaaaaaccaaaatatgtgtgaaatatatacaaaaaaaaaaaaccacgaaattatatatgaaatgtaaataaatttttttattattaaattttggacaaaaaattcatagactagtgtgaaatgggtacaaaatgtcataaaaacaatcttagtgataaggttttctaggcaatacaaatctgcaatttattggcaatttaacctccagcagatgccgatattttcgatgatgccatgctgcgcccggccgaagtgacccttacggattttgcctgaaaattcttataaattaaaacgcattcctttcaagggcgtaggcaggggtcgggngctgagggggctaaagcccccccccccccccaaaaaccacaaatataaaaat

SEQ ID NO: 23620 - DNA, 1200 bp, Heterodera glycines
aatacttattttaggagttttgcatataaatcagggtccgttatgtcctctagggtttgttagaaatgtatctgattttgggatagtgacacaattttgtctgacttcttaagattgacaataaattaaatgaacctctcgaaaaatttttagaaaatttaactcaaaatttttcattttttgaacactgaaaaccctagaaatccttaattttctttaaaaaaatgccacaatttttgtgtaccttttggtcgcatattttggggttaagatttcttttgcgcttaatttaattttatctaaattttaagctactcaatccgggccctaaaataatttataatacctttttcgcattttttgatttcttttttatatttatttcacatttttcatacttttttgaggcttttttaattacaatttttttgttttccccttccctccctcttgaaaaatttttctattggcattttaggcgctgaacggcgagtatatgaatcattctttcccacgctcacacaccgaattaaataatattgtaataaccgaattcagtaatatgtattcattgtcctacattaattacagtggaaaaaatcaacaaacgcggtcacagattatgcgccgccattccatttttaaattgttaagctttgattgattgatgattgaccattctgtaatccttaattaatcaaatgtcagtttattccgatttttaattgacttttcattatttcctaatttacggatgcattaactcacattaaacgcatgatagtaactaacaaataaacctcagattcgtgctcaatctcagcgtcaaaattagcctagaaaaaactagtaaaaaaaaatattcaggggcgggagtggaaaacccggaagtacgggaaccgcccagttcggcgcggccggttcggcgcgggtttttcggcgcggttttcggcgcggccagttcggcgccctatataaaatggctttttcggcgccagtgtttaaaaatcccaaaaaaatttcaaaaaagttttgatttgcctttcattgtgcatataacttatgccattttctttcaaagtaacgtgctaatgcaattttgagcaatggtgcataattgtggttccaaattaacttttatatttcggttcaaaatcacaaatcggtgggtgttcgagggtactgatcacaatctgacca

SEQ ID NO: 23621 - DNA, 1555 bp, Heterodera glycines
  unsure (1)..(1555): unsure at all n locations
ggcccgcatggggcaggctcccgtgtcggtccagttttgccggatcgaaaatgggcgcccgacaaaggcacaccacgcgccccctccgtcggtttacctgttgtcaaaagagctcacgtctgaaacggggatggcctgcacccgccaagtgttgttagaattgtcggcgaacaccaccaagcaaatgctgacattctccaggcccaattcattttgcaattggaaaaaatgttcattccatggcggagtcacatcgcttttggggaacaaaattatccttgcatttggatggatctaattaaatttttttatcagtttgttccaaacctttaggttccttatttcgtcttgtgataaattctatgacttttacagtagcgcncgctttttcttttttttgaaaaggacgaactttcaattcgttttcttttgagcccaaaattgaatcgctttgttcaaagagtttatctttcgtgaggtatgcatgtagttatttaacattattataaagtttggattttaagattttccttattttcatgagcttcacatggcgtgaaatggtacgaaaataaagtatttttggtcctatttctcttttttcctttctttttttagtagactccaaattgtactattttagacagcttaggtcctcaaaattcccagtcctttttacctacaatatgcggggaaataatgcaaattgcacttcttatatacctacgcattaaaagaaattttttccatttttccggtgtttttggttcaaaaatgagtatataagccgacttttttgctccctctcagcataatttccgtgtccaaataatgcctttcttctccccctcctccgccgtctttttgctgccctttcaatttcttttggttgtcctcggcgctgttttcgtcgtcctcagccaatgctgtggttgttcgaagaaggaaaaggccagttttcaacctccttccccacaacgagtaaaaggacgaaattctattcatttttagccaacttaattttatcacaattcggaaaatctgacttacattttcgcgttttcaattcaaaaaaaacaatcgtgataacaaaaaacaaattagccatatcaatgcaattaatcactttcaaaaaagatcacttttccagaacactggagcgccgccgccacaaccaccaacatttctttcaccagctccacaaattactgctgctggacctgggactgggcctcaattcgttccaagtgagtagtgtttgattaacagacaagtaataatgtgttccctttctcattttcagtgaatgaccctaaatatgagacgcttaactccttggatccgaacatttttttgaagagtgcgtcagcaaaaccgccacaaaaaccgccgcaggcaacgaatggaccgaaacccgtgccagtgccaggtaaaaaataattgtgaattcctttgacttagctaattgttttaccacctattcagcaaatgatcctaaatatgagacgctcaacgctttggatccgaacatttttgtgaagaaatagtgccgtca

SEQ ID NO: 23622 - DNA, 2153 bp, Heterodera glycines
gggcagttgaaaggtatggattaattgttgactttatgatgaaaattccgttaagatttattaatcgataattttatttgacccccccccccaaaaaaaaggcaaaacctattgtaaggactgtacacaaataatcaataaacccaagcctattgcatatatcatatccgaagctttaagtaaattagcaaaaaactccaattcattaaattgtaaaaaaatgacgtcatcatgcaaagtaaaaagactccgccccttttcttgttggtcacgcccattggtttttgttttgctttgctaagaatacgactccgccttttttgcttttagtttcttttgtccagccccattttttttgctatttaatcacagtttttctacataaaaaaatcattcgtccatttaaaaaaattccatccacattcgttttttctgttcttcctgcaatgaattctcttaaacgctttcaactcccggagcaagggacacgacagcaagaggagttggattcagttgaaccgaaacacatcagcgatgtggtcaacttcaattcggccggcgttttttatgttttgggaaaagtgacaaatatgcagtaccgtgtttacaaagtccaaattaaattaattaattaaattattaatttttctgtttttaggcatgcccattccgttccaaggggctcatttgtcgccgaaaattgtccgatgataacatgtgtgaggcttgcggccaaaaagcgattgctcccatccacacggtgtttgttcgtcttctgctgcaggatgttgaacaagcagacattgctcaacgtgtcaccatgttttcgagtgttgctgaagagtttttgggaatgaaagctgctgaattgctcgccaaggagaaggagccggaaagccttgcgaaacacttggacgatttgattgctgtgaagataattgcgaaagtcaacattaaggttgttttttttttttttgcaatttattacatatttgacaaaccacaacataggcgaacagtcagacttacactggatttgattggattgtcaatttgttcaagaagtgccctggaaaaaatgacagtgatgtgccaaaagaaaaagatgatgatgatgacgttgatgagattgctaccaaaaaaacaaagaaaaattgagagatagatagatagatagataacggattcattttgttgtgagcttcaaaaaaaaaaggatttaatgtgtcctttacttttttaaaaatccattaaaaatgcattttattgttgaagatgatgagacacaaactccaaaatggtcttgatgtgattgcaattttgttttttcttcgtgaattcaccatgagacaggattgcacgttgacaatttttcgtaatgagcacagagagatttgcgagttggctctatccgagtggtggatcgtcaactctcctcataacaatccaattaacgttgttggaaaagcttggcccatatgcgtttgtcacgtaaccctaatttttcaaaagaaggaaaagcactcctaaatttagttttgatcttcatcaaggctgaaaggggatcatgtgaaaaaaattgaatatttgtgcgttactcatttcattattgatattagtggggacatactcgagaatttctgcctaattgtaatttcgcagcgatttaacatgctaaatgtcgtcgcgcagaggaatataacctcttctcttatgccaatttatcacagattcaaagtgaattaggcgaacgtgtataataattggatcgtggacaagcaatacagcgggggagagaaggggcgtatgaacgatctggtggtcaaaaaatagttcgggcccaatgagaccagctgctcgtcatgttattatataagaaaaaatataaatacgtgcgggttgttgaacaaatctacgaaagggaagctggtaacatgaacagttctgattctagataccatctacataaatagatttgaatatttttatcgaaaaaagtgtctgtcacagcttgaaaacgaaaaaaacgaaagtaaaataaatggcaaatttaaaattgcttaagtttttgcatgcaattagcatttttataataaatttttattaatttgaaaatcctggtccagaatgcggtcaagacttgacaggcactg

SEQ ID NO: 23623 - DNA, 1453 bp, Heterodera glycines
tttttggttctggtcgggttcatgcgtcccatgaatgatcatcctcagtttcttaggccataactttttgcttacttggccaatacatatattctttgtatcaaatgaaagcttaaggtctacagaagcttttgtataactttattttttcgctaaaagcaatagacaacaaattatactcggaaaagttgaaatttcgtgtttttatcattgtaattttttttcaatgccagtatttgctcttttcttgcatttatgaaatccagagacttttatctttcgtttgataccaaaaatacaggtattattgaccaagtaagaaaaaaatgatgacctaagaaactgagtatggtctcattcatgggagggcataaaaccgaccagaacctcattttgatcaaaatgatggcctaatttccaccgttttctccatcacaggaattgtgcagttatcgtgttcaagtgaaaagtgagctgatgcatttctgccaagaacttttggtgggttttcgtttccaaattaatgtctgtctccgcaattgtgaagaattatgtttttttttgttgttgttgaacttttggctcgaaatcagtttcgaatgtgctgatcactaatctgaaaactcggatttgcccaatcccgaacaccggatccgaattcgaaccaaacattgatatatttttttcctccagttatgcgttaaaatcggtcaaattttggcgcaaattgcgcacttcaatttttatccaattaagcattgtcttgcatcaaaataaattgttgatgaatgaattaaaaactttttaaccccagcagaacaatgcatattttgggggggggggggggggaattaagttttttgttcgagttcagatctgctgagatttggagttgggaaaatccgagattcgggtaatactgccgatggtcgccctctttttggaaaaaatttctttttgttctaaaaagtcgtcaaaacatcaaaaacggtcattctatacagattcgaacataaaagtgaattttgaaaattttgaattttcgactttttgttcgagtccgggtccgggattcgaaatttaaattggaccacatttctttaccaccgcgcccagtctccaatttcccattccttcttccccaacagacgttcatcaacgatttactgcttccaaaagcgaccgatgcggaggcgaaggttttctacctgaagatgaaagcggactatcatcgtcacatggccgaactcgtgacggacgacgaccgaacgggtaggacaattgtcgttgtgtgtgccctctgtattaagaatttgtccgatctggttttttcatgtgatgccaaatcccggacgcgaatttgaacaagaagtcgaattaaaatttttcgaatttttggtataaaaccggccctaacacacttcaacaaaagaatggcttcatgatgattgat

SEQ ID NO: 23624 - DNA, 2168 bp, Heterodera glycines
  unsure (1)..(2168): unsure at all n locations
atgggaaaggggaggtagacccggcgttcttcgtctacaagaatgattttgggtgagttttttcaaaaaaatttgactcactaataaaccaatatttaggccaacgagggattcgaaagtggtgacgagggagaagcacaaaatttacaggccggtctgccagaaggggataatcgatgaagaacttaatgtgatgccatttggattttgttaatttttgtattttattgttgttttttttttgttgaataaagttgaataaataattaaagtgatattatgactagcgggggtggaacggtctaaagtgaaggcccactcctgttagccgttatattttttataaaaaatctaaaagttccagaggaaaatagcacctatgaccgttattctggtacatagttatacacgggagttgagggaattgtagctttacccggtgtctcgagtagagatgctgctcgacagtaaccccgaggaaacctcggtaggcaaaaagtctattagaaccgttaaatgcgatgtcatccggtgagataaactgattgtgcctaaggtgtctcgttattagggcgtgtcttctcaaaaatttcaaattctctttcttccgcagtcgtagaatttcagataattcgtgaggttcgcaatcgttaaaatcgcacagaatttcaacgagagaattcattttttgagcacgagtaggcattttcatattcgttgcaaatccttatataccgttacctcaccactgtaggatgagtttttgccttttctctttaatttcaaaattctgagaactgaaatacaaatgatgaccactatcaaatctaaaattgacaaaaaatacacccaaatatttgaacttgaaactctaattttctcaaactctttgaacatgacaaagttaaagaattcactatttgcatctgacacatatttgggaagtatctcgtttgagtcaaatcgatctttgtatattttcttctccttaattagataaatttgcccctcaattattaggaaatcggtaaatgaagacggcatcgatccgatcggtttactaataatttcggtgccattatgatgtgtccataaattctctattgtactaatgtcaaactcggctatttgatcgtctctgattacgaaaagtcgaccatcaatatgatcaaatctaaggtccccaccggaaaaattcctgacaaccatttcttgactccctcttgttatcgaagtttcatttgtcttttcattttggaaaattaaataactatgatcgttgtaataaaaacacgctcggggttttaattgtcgaaaatctcggtaaagcttgatattagtgggtccgctcttttcaattgaattaatttcttgtattgataggctccaccctgaaatcggattcctatttatcatgcacaatctcgagcgatcgaacccgaacagtctttcattaaccgaactctttgtcatagtaagatacttgtcgtcaaaaagtcgtgtatcagaaagaatctgaaccctttcggcagtgagatggccgactatcgttaggagaacaattaaattaaacattactgacaaattgcttaactaataaatcggccctcgggcgaaccttatatagaccgtcaatgacctcacaataaggcattccggagcatcgttgtgtcaagaaataaatgcaaaattgaccacatgcatctgagaattggtgttggacaatacgatcgttaaagagaattcgttcgaataggttaagatatgaacttaaatcttcgttgggataaacgcccaatgaatcaaaatattctatttctgtcggcgaatttacaaaacaggcgacccagtgttcacctatcgtgcccgcccggtcggtatttgctacaaaacagtaggtaaaatacttatccttcaattttggcaccctgtctgaagcaaaaaccccgataaaatattttcgggttgtcggatgtttggatagaaatatttcaatctcgttagaattcatcatatgcttccgtcgctactgagcacccgattagcattaatagacaaaatcgaatcanattcccccagaacgatcatctcatacccgccgtcctttataggcgcattaaactgcaccttgatgctggtcgttccgtttcgaatcaattcaaaaccag

SEQ ID NO: 23625 - DNA, 2178 bp, Heterodera glycines
tcaatttgtccaattgggtggaaatggtcgacttggacaacgtcacattcaccaaggcatgtttttttggcaccagccgaaagcaatccatgggtgctgaaaaatattttaaattaaaaaccattttttttaaatccccattttttggtaacattgattgcccaaatttttgagctaatttaaatgcatggcgagcgggcaaaggactctcggttctcgggtttttagtttcgagtttgaggagcttgttccaatcacgagttgtctctttctattttggcatcaccagttttcagagtgttcgctttgctgacaacggcacattgctggaagacatccatttgttggacaagctgtacacggtggaaaccgcgcaacggcacaacaaaaagcgggcgcggaaggaggaaaagccgccatcggcgaagaagcaaaagaataaagtggtgggccaggcccaccagcgattggaggcacgcattctgatggttgctgatcactcgcttcatgaaacgttcatgaagttgtatggcgaggacgaatacgcgggtgagcagccaatgccaatagtttaaattatgcactcattgagactatcgactctaggactttcggaaaattgttagacagtctcgactattaaactcttcgagagtcttggtttcgactcaaagcttgtcaaaactgttcgaaattatcgacttggtttctgttaacttatttgttactgatcattagggaccggatttaatggattaaaaaaatccaaaatatggattatataaaatggaccaaaacgctgaaacatggacaaaaaatacgaaaatatggacaagaaatttctgaaaatcggttttaatttttgaataaaatttcgtaaacccctatttttttttgtcaggaaggaaaaaatattttcataattgagaccttctatttattatttacgaaaactattgaaattagggaaaaaattagtaaatttttgcaaaaaattcatttttaaggaaaaaaattagtaaatttttggaaaaaattcatttttacacgaattttgcgcatgaaattttttttttgcacaatttttggttttttctccaaaattaaattttcctgctcattcaattcccattttgatttgcgctttcacctcaactgttcagcgtacaccgcattgagccgctatatggtaagctttttgttcccaatcaattctggcattttggtagtttaattctcggccaatctcgtttttcctggtattaataaagagagatttgcttggcatttttttgattatttttttatattagaaatattttaaaattttatttctaattttaaatttttcgtaaaatatccgttttgccacacccagtgatatcccgtaccagacttgccgcttatccgggtttggctcaaatttccgggccaattctgacctaaattctcgaagcatttcccgtactttaatataattacatacattttgttgtaccccttttcagctgggcgtgttcactcaggtgtggtgccattttcgttcgtatatgccattgttttcaatgatttccccccccctctcccgacagttggacaccattttcgcacgtttgccgtttttcaccggcacaaactcgtcatcaaccgcttctcctcctgctgctcgtcgaattttcttaaaacttgccgccccaccaatggtcaaatttttaatttatttatttactcatatttctcaaaaatctctccatctcttcccattgttcaggttattgtacggcccgaagactgtcctctgcggggtcccatgctaattgctctacatcaaagcaccgccgccgctaatgcaacattaggcgatgaagtgtcattttcagcggataataattcttcgaccataatcaatcagaatggaacattagacacaaatggtgaaagcgaattggacaaagcagtggccatcggcattgaggggtcattaattaattaatgggttatttattgagttattggaaattggactaattaatgggaaatcactgagttaaatccatataaattaaattgtaaaattttgttcaccctttttaattatcaaccacaaaaattgaatcaatagaaaaatcccacaaaaaaaactgttaattgtttgaaattttgttttgaatatttaaa

SEQ ID NO: 23626 - DNA, 1016 bp, Heterodera glycines
taacggaaaaggagggaacaatgatcagaatagagaggtgaagaaaatgatggaaactctgatcaacagcgaaagaatgaagagcaaccggaagatgatcagcagggaaatacggaggaaggaggaggagaaaacggtagatcagcagacggaagaacaaatggagcacaaacggaggaacaaagacaaccagagaatcagggagagcacgaaaatggtaagcggaaatttaaaattaaattttaaaaatttaaattttaaagaaatttatccggaaaatccattttcaataaatgaaaatgatgacaaagaaaataatgatgaacaaagaagtaaagaaaaaggaatagaagaagcattaagagaggagaaaagggaaaaacaaaacaatggaatggagttttacccggaagaagttgtgataggcgagcagaataaggaacaaaatgctaatgagagtgataatgataatgataatgataatgatgcttcacaaaaagagtcagttgaaagagacaatggggacccgagagatcaggcagacacatggggagatgaaggagaacaagttggaaaagaagcagaaacagtaaaagataatgggaaaggagaggaggaaaagaaacgggaaaagagagaaacaaatagtatgttagaaagggagaaagaaaggagtgagagagaaaagaaaagagcagaggaagaaaaagagaaaacagagaaagaaaacataattgagggaaagaaagcggaagatgagaaaaaaagtgcagcaggaaatgaaggcctgttcagaatgtttcctgaacagcagatagtgagaaaaaagaggaattcacctgatcagaataaaccgcaagaggatgaagaaggagaagagcctgatcagaataattcgggagatcatgaagcagatgaaaagcctgatcaaaataattcggaagaagatcaaacgaaaactgatgaaaaccctgatcagaataaatcaggcgaagatgaagcagaggaaaagcctg

SEQ ID NO: 23627 - DNA, 1688 bp, Heterodera glycines
  unsure (1)..(1688): unsure at all n locations
ggataaatctttgcacaatttttaaaatataatacaattttttatttgtccatcaatttcaaattgggcacaacacttcaattttatgcccaaattttgaattttttttaaaaatcaaaatgaggcaaatatgcaaaaaatgcgcacccaaaacatttatgaggcctaatgccagcacaaaatttgtcgatgagaaaaatttggccacaaaattgaaaagcaccaaaaaatttatgtgggcaccattttcttggcaatataaacattaaaattttatttttatttttaaattttacaattattttattgtttttcaaacaaaaattgttcataaaatgcttttaatcctgcaattttttcccattttctgctgctgatgttgcacaatgaataatgaatggcttcttctttttcttcttgcgctctccgctcgcttctcctccaattccctgcgcaaattgtcttcggatttgttgtccaccgtctccaaaaaaattatttatttaagttacgcattttgcatttcgcgcacaaatcgatcagcacagaacagaaccacccaacaaatttccatgtaaacccatgaatttgggctccaaattgttgggttgaggacgatgtttctcgttttcctaagagtttatgttttggttgcttgagatgcgattttctttagctctctctcgagaatggtttcaaatcccgaaaaatcccaaattctctcatctcgggacattgatcattgagatggaaaggggggggggggtcaattcatattttcaagtggaccaggggggagtcaatttcgtttttttcattgggctccgaggctatctaaccgtcttaattagttgtgaaatttcttatttttgaacgaattatcattttttttttgttgtttatcccaaataattttttggttcttaacaatttaaattatttcaatttcacgctttttacaccataatttatacaattagtgtaagaaatgtcgaccattggtcattttttaaccgaccgagagcctctgacaccacatttgcgtttttcgtcactgatcaatctgccagccgttttttctcgcacttttgctgatcccctccccaggcattttttatgttttttttttatacttttaccaaaaccatctggcacaaattctttcttcggttggcttgcaaaaaagcgcacctaataacggtatattgctccataatcacagatggtcatttcattgtgcataaattctattttttttcaatttttacgaaaatgctcttcaattcatgtgccccactttgtaaaattgaaaattttattgatattttactaaatcttaaaatatttttggttgctcattgaattaatctaaaatataaattaaatatttagtgaaatatttcattatttttttgaaaaaaatgagtaatttgttagggtctgattgaagacgatttccggacccggactcggtttaaaaacttggaccccggactcggcttttctggacccggcaatacccggatcgggcccttgaaaccctacttcattgttgtgttttggattatggttttggccacataacaattaatttccctgcccattcatttgcttggtcggccacatattataataccctttggtcataaaatttgtaacanaaaatcatttttgcaataatcattttt

SEQ ID NO: 23628 - DNA, 1098 bp, Heterodera glycines
aatttaattttaattttaaatttactttattttttagttttgaaattgctgacaatcaaagttctatcgccgtaaaatatttctattggatttcattccgcgataatgttaaagtacgccacgcctgtaatggtggggaggtagtatttggtggactaaaggttgactgtatcataggggcacaaaaaaaaattatcgaattccacggctgtgcatttcacggacatccaaaatgttataggcctcagacggtcggaccaaacggtaagaccatggaagaaaattatcgaaatacattaaataggatagaaaaactgcgcagaatttgtaaaaaattttgtatcttggaagtttgggtatgttattcatggtctgaaaattcgtatagcattttttaggagtgcgaagttcgagaacaattgaaaaaaaataaagaaatgaaaaatttttttgaaaatattccggatcgggggtatgttacaaatgaatcggtgaataatatttaatttttagacctattaatccgagagatgcgtatgtagggggtaggacgatgccttttgcactttacgccgaagcgacagaaaaacaagtcatttcaatgtttgacatagtgagcttgtatccttatgtgaattttgtgacaccgtatccggtagggatacccaaagtcattaaaaagttaaatccaaatgttatttggaaggatccgggtgatataccttatgatggacttttgaaagttaaagtcataccgccgaaaaagttgcggtaccctttattgccttttcatgccgtaggttatttatttttatgcaaaattgatttaatgtttaggatggttttttactttttccgacttgtggagagtgtgcacgtaagtctaaacaggattttgttagggtagaatgtttcaagaagtacagacactcagcagaaggacgggaattagttggggttttcacttctattgtactccgaaaagcgttagaactcggctacaaaataacgaaattttatcgagcataccattatgagaattttgacacaaatcttttcaaaaattatgtaagaatgttttgaaaattaaaatcgaat

SEQ ID NO: 23629 - DNA, 899 bp, Heterodera glycines
  unsure (1)..(899): unsure at all n locations
cacgcgggtcccgctgtctgccataacccctccaacagcaaccattaccccccccccctaaatacaatgaacttctgatcgtcaaatttacattattattttcaatgacgacaagtcaccacttgtcgtccccccccccaccgatcgatcaatcaatcacccccccccaattaatcactcgtgacagctcgatcaccccataccctttgatcactcccgacacctcctcccgatcacacacctgtcaatcactttgattgacaggtgcggcaaagatcaaagaaaaaaacacccccaacaccctgtcgctagtgcgcgaaaacttcgcgcactgacgacaagtcggtatgtgtaactactatgggtattttccgcctacgattatattcagttttatcttttttcgtttttgttttttttaaataaagtttctgaaaaaataacattttttaaattattaattaaaataaaataattatttaatttaaattaaattctaaaatttgaatattattaaaataaagaataaatcaaaactgaatatataacaaaataaatgataatatttaatatataataaaattaaaaaaaaaaacaaagtaaatcgaaataatatatagaatttattaaattatattttaaataaaaagttatataacaaaaaggtgcgacatttggttcattttttcgcacaaaagtgttatgaaacggacaaattcctgcggcgcctttcggaaccgcaagatccccatataatgaatattaaacattaacaagacaattatggcgaataaaaaatatattcacgcatttttatctcaaaaaaattttgtaaaacaataaaaatgaattncagcatcaagaaaagaatggagtcaaaaattatgacgaaatttgta

SEQ ID NO: 23630 - DNA, 1564 bp, Heterodera glycines
  unsure (1)..(1564): unsure at all n locations
ctggcggtttttgaggatttttgccctcagatacacccaaaaacaatttagcaatgtgattattaactgctgaattgatcgatttctattatatatatgttatattgggtaaatattttctttaatattntaattttccattgctttaatgattcatcgctaaaatgtgatgttcttgcaaatgtccatttgataataaaatgttcgaatgcattcccagtaatttattcaatgttttttgaacgctaatgtttatattaatatttattcatttttcgatgttatttatttatatttttcatttcataatttttaacaaattgaataattaaaatgctttttgtccttctccgttttctgctgctctgttcactgtctatgccaattttggccatccgtaatttcactttttcaaaagtgaatgaccgcagccaattgccccaccgaatgcgccgaatggtccgcgtggaatgggacgggagcacgtgagtgttttgaaccgtactcaatgcgcaatagcacgatggattgacacccgaacattcagcactgtccaatacggtcgcacatcgcctcagtcgctgaacctttactttgcgctgcccgcggcgccgcgaccccccggcgccgtcccgtcgcccgtcactttcactgtgaccattgacagtttggacgcgtgcacttgcgtaacgcaaagtgtctacgacaacatgtccatactttctgttcaattccggaagttggcttttgaattttcagtttggccttcgcttggaatcggcgatttgccgatagaattttgcccgaggaagtcgtttatttgacgtggaacctttggcaaagcggcaacagctcagcggacaatgacggccgttccgtttatttttcggccacggattttaacggattcggaaatggttgattgattttgtttgtcatttcaataaacagttcgcactcattgcagctgatggtccctcctcctggaccattctctccggcgggcagcgtcgcgctcgcgtcactttgcccgttgggaacggttctctgatgctggagtacggtagccgtttggcactactgtacaccgttccgcacggaaaagttagacgacatcttagcttccggctaatatcgcagcgtgaactgctccagctgcacccctggctgggctctcagttgtccgccgggcgaaccccgcgctgtgactgggcactgaattttgtgagccaaaacgggaaaacaatcgcctaattattcgcttttgtcgagacttacaaacggattttctgaccattaaactttttccccggcagtcctccaaatatcgcatgttattccccacaaatggcactttggaagccgaccgacgccggcggcgaaatgagcgaatcgatgacggacaacggagaaatgaagcagataaaaacggcattgagcactgttcacggaagtgaagataacggagagggcacgggataaatgttggcataatgaaaatgaaaaggcaaaagtaaaagtgctctaaaaatgtacaaaagtatataaccaacgacaattaaaa

SEQ ID NO: 23631 - DNA, 1056 bp, Heterodera glycines
  unsure (1)..(1056): unsure at all n locations
ttcttgtaaagaataattttaaaaattaattttcttagccggtgtattttcgcttttattgcgtttttgtttatatttttggaaaaaacgccaaaataatttttaaaaatttttttcaaattttcgtttgattttttcggttttgttcttaaaaacaaaaacctagaaaaatagttcgtaataactcgagaaccagtttaacaacaaccgaaaaaaaacatgtttttcagtgaacaggacaaaatcacgccgccaaaatccgccgggaaaaaatcccacccccaaaatcgcgccgggacaaaatcacgccgccaaaagccacggggagctcaggaaaatattgaaaaaaactaaaaatcgtagcctcatatatcatcattttgacaaaaattgcctaaggacaaaacgccaaaaaaccccactaatttaaaaattttgccgagattttcccttgattcatccgttttacgacggcaatggaaggacctcacgcctgctgatgaacctcatcatgctgcgccgtggataccacccggtcatcctgcccgagaaaaaacgtgatgaatattacacgtggctggaggaagcttcagacaacaacaacattgagccattcataaagttcatcagcttccaccagcaatgtgctcaagacctggagcccgcgtcctccctcccctcatcctaattttcaatcactaacccatattatattgtacttatatgtgtatatattaggtatatttgagaaatgatcttcaatctcaccaattggaatttgatttgatgctctcattttctctcagactcactttttgttgaataattcattcgttcgaatatacaaataaatattcattgaattctatttttaaaaatttctatgaaatttttaattatgcttatattttaaaaagatttagcgaactcactaactctcatatttaaacgcttatttacctattttgaaaatttttaaaattctgagtttttctagtggttatacatatatatatgattttagttnttgaaaaaatttcaaactatttttcgcat

SEQ ID NO: 23632 - DNA, 889 bp, Heterodera glycines
aaaagaatttcggagaaaaattgtagaccatcaaatcagtttccaatggtgagagcgtcgattatttctcaaatatgattttcattgcttaatccaattcttcttctaccactgctggcggcgacaatggcctaaaattattttcatttttcgacaattgaaaattgcttttgttggctcacccaatccaatgatttccacccaaatcaaatcggacaatgttcaaattggcacacgcattattgccataccgcggatcaaatctgatatagttcaaattagcacccgaattttcacgttttttccacttaactggcgccgtcgccgtctccccaattgggtaccgttgcaacagccaattaaccaaattgtattctttgctctgtttcaatgtcagcttttcatttgtcactttgttttccaattcaaatggttcaattggcattggttccacccaaaaaaaaagttgaatattgtaactgacagaagtggtggcacggcgaaatgtctaaacaaaattggtaaaacaaaaacaatttaacgaaaatatggcgtgccacctctttgaagttgttgacccattccagatttggtggaaccaaaaaattattgcgacgaaatcgcttcagttggccatcttttgtcggagtgtgaagccatttggacaacgcctggtcagcagttgtatttggtccatcatcgccaattgcatcgggcaacagataattggaatcgattgaatgcaactgatcaaaatcggtgagaattgtcggtgaaatcagacgacgcaatttgtccaaatgattgccatcaggaacgtacaaatggcgaatgtttgtcgcaaaaattggccaaatttgacggataaacacatcccagatcggttggt

SEQ ID NO: 23633 - DNA, 1605 bp, Heterodera glycines
aaaatgaatttctttactctaatcctacaattttaaataaataatctcatgtttttttttttgcagagaaatatttttgccaccgctgcgacaaagtatttgttcacacttcctcttaccgagtaatttttaatttatttagttttaatccttatatacaatttaaccaaaatttaagcgccattactactcggtccatttttccggattgccgtacaaatgccgtttttgcagcagccaattccgcggaattgtaattaaaaaatttttttattaaaataaaaaaactttttaagcgtgagagaacacggcacatgactgaagtgcactttgaagaatgccttaactgtggactgttttaaataattgcatttttcattaataataataataataataatatcatcagtaacatgtgaaattttaaaattctatcgatatttgcctcgcactttgaacagagcattaattgtgtactgttgtaaatagttgaaaatattttataattataatatcaccatcagcaacaaatatgaaaatttatatttgccattattttgctaaaattcttcattaagaacccagaaattgaaaaaatgttaatgtaataaaccggtggaaagaattttaaaaaaaactgttaaagtaatggcaatacactcatgaattgtgatcatatttctcgacaccttatgttttgcttttttttttttttttgtttgctactgtgttgctttttgatttattttcaatgtttttgagcacagtgaaaaaacagaacgcgtgcgcttaatattaaccggttagttaaattattaattttaaatcatctgacgaacgacgagcgtttaatcattatgaatattttaagtggacccttctgtcctgattatttgatcagttttgatttggagttgcaaattcgaataattaaatggacaaagagttattatgaattgccagagatattaaaaattttggggcataattttgttctgtttcacccttcattcttcggtttaaaaatttggtgaaaatcagttaaaaccttacgacaattttcaaaaaatatccccggctcgctattattaccacttccaacgccgttgggtgattttttgggtttgaattattaacagatttttactaaagatgaccagtcatgttttgccccaattttaaaaatccaaaaaaatgcaaaatttctgcgatttttattactattttaaaataggaatttttagggcaattgtgccgacaaacgttaccgggaaaattgaaatttacaatttttaatcgggaattaccctaaaacaaaaacaattttgataaatcagaaaataaaatcaaattaatataaaatggccattttgtgaaagttttttgtcgtcttttagaaatgactttttttcgaaaaagtcaatcattggcaacaccttcaaacgacttttcttgacagtaaattcaacgacaattatttggcacctgaagacttaactttttactgaaaaaaataattttttctatcctgattgcggctcgcttcataaaaattatgcttatttcaacaaaatcttaccgaaaatatattttttctactacaat

SEQ ID NO: 23634 - DNA, 1619 bp, Heterodera glycines
gccaaaagtacgggaccggaaatcttaaaaattccgctctggtgaagaattgcgctgggtcaaaagtacgggaccggaaatcccgtaaaatcccgctccggttaagaattgcgctgggccaaaagtacgggaccggaaatcttaaaaatcccgcgccggtaaagaattgcgctgggccaaaagtacgggaccggaaatcttaaaaattccgcgccggtaaagaattgcgctgggccaaaagtacgggaccggaaatcccgtaaaatcccgcacccgtaaagaattgcgtggggcaaaaaagtacgggattctcgtccgcagtattggcggcattgttcaattattcctttgtccatttttcaggcactgattcgaacggcgattcgctgccccgacaatccgtgcgccattaaagcgacacttttgctcgctgacattcttcacattgtgagcaaataaaaggcataaaactgattaatttcagactaagtttgattaaaaatgaatttgccactcaattaattcatttttatttttttgcatttgcactaattttattcggtgccaaaatgtttcgggcattcaaatgtttatcgccccatggtagactaccgtacacttgccaagagaattacgtctcaaggcccatggcattgccgggctaatcaatcgggtggcacacgcatttcaaccagtgcaattggacgaagaaaattgtgacgagaagatgaaacatgacgaattggactggacaaattccaacacaaattgcaggcattttgaaatggaaaataaataaataatgaattaatatttttgcagcaatgcgataacactttatgcgcgacttgagcaaattgagcgcattcacgcccattccattgacgaaaaattggacgaaatgcacacatttttaataccaaatttggggaataacggcggaaaaggacagagacgccggagcagcgaacattcaatgccgagcagacattcgtcgaaggcgagcagtagcggacaaacaacaccagggggaccaacaagggtggatgaacagaacaaaggggggacgacgaaggacgaaattgggggtaaaaaagaagggggggggggataagggaagtggaaaaggatgagaaaaaggaaagggccaagtcgaaagtgagagaaagtgcaacgagcgagaacggcatggcaaagagagattgggtgtaagccacgagtttggcacggacccgtaaatacaaaaatttagggtggcgggtggtggaatcgcagacctttttttgttcatgtagtcgatgggagaaaaattgcacggttatatgggcctggtttggcatgtggcaaagtcgagagttaaaaggaaaagagcgagaatggcataatcgagagataaataagtgagaagggcaccgccaagttctaaagatcactgcaacctctcattaatctctccttaattctcgaacattggcgcgatatcattcctttttcccgtttttagaatgtcttgcaattttggatgatttgctgcctaaagcattcgttgacgcaccaaattgggcccaacaaactccgcctcagctatgctcaccgacttttaacttcgctggcgttgg

SEQ ID NO: 23635 - DNA, 1559 bp, Heterodera glycines
  unsure (1)..(1559): unsure at all n locations
agttcagatcttcaacagcacatnttaaatgcaaattttttgctatttcttcaaattcaaatcactntaaagggcttgccgcataattcttgattntaacacagaaaagcctaaaggtgattttgtgctttcggctctgtgccaaaataattcactttttggaaatccctcgggtttgaaccggtataaaaactatcagatggcactttgtccattttttcaagttttgaaccggttcaaaaccggtttaaacgctttgctcagttgcccgttaaatttttaaaagacttaatttgctctttattctaattgattgggacagcttaaatgtcaaattcgcttattcaaaaggaaattgagcgatacaaagcaatgtaaatttttattaactccactttcaatgttcattatattataattaaacaacgcttttttcaaggctttaacatacaattttataagtgcctattaaaagctaaactttttttaggtatgagcgcgaaagggaacaatttgaagagtttcagcggtacagcaaagaattggagtccgaaatggaattggaactgaaacagcgtgaccagaaaatctcggagctcgaatcggtgaagcatcgactgagcaccgccttggaacaactgaaggttggaaagagaaaggaaagcattaaattttaaatttattctttttatttggtcgacggaattaattcttcatcatttcaaaataatttaaattatcgaataataaaggaacataagttttttggtactttcctattatgatgccacacccaaaaatttcaaaaaatcaacaaaagcgcgcgctgcaaaccctgagaagctggtcaattagacgaaattttatcttaattgttgcatttatgcctccgatctagtgttacgtgcgccttgtttgtgcgtccttttttaattttttggatgtggcctcaaacaggaaataccgtttttttaatcaaacctttattcagaccaaaagtgaaaaggaccgacacgagcatcgcacaacggaggaacagttgcgaacgcgactgctcaattcggacggacagtgcacggaattgcgccacaaattgcgcgctgtggaacaacaaaatgacaatttggagcggagggaaaggtttctttttgagggtcggttaagggacattccttttcaattagagaaaagcccacagaaccaaacactgaacaaaactgaagactttctaaacaggagattgatgcatattttctattttttgccccttttctcttggaaaaaaatattcggcgctacttgcaaagaggagtcttttgaaaattttttcaacctttttttggtcaaaattttttttgtttttttacacataatgatgaatattaagtattaacagcacaattatggtgaataaaatgtatattcacgatttttatccaaaaaaaaattacaaaacaaaagggcccccctatggtttttgataaaattcaaaatctatcactttataactagcgccaaatttgcttaataggcccaaataattgtcatattcttgatca

SEQ ID NO: 23636 - DNA, 1082 bp, Heterodera glycines
tttgggttggatttttcctccccataattgtttgagtcccccaaacggacccttgaaaaaattgattttttttgttttcggggcagtccccccgaaccgatgcgcccagatttatggggagaccgaatccttcgggaatagcttccctatagcctgtactttaattctgcgttggatttttgctccccataattgtttgagtcccccaaacggacacttgaaaaaatcgatttttttgttttcggggcagtccccctgaaccgatgcgcccagatttatggggagaccgaatccttccggaatagcttccctatagcctgtactttaattctgcgttggatttttgctccccataattgtttgagtaccccaaacggacacttgaaaaaatcgattttttttgttttcggggcagtccccccgaaccgatgcgcccagatttatggggagaccgaatccttcgggaatagcttccctatagcctgtactttaattctgcgttggatttttgctccccataattgtttgagtaccccaaacggacacttgaaaaaatcgatttttttgttttcggggcagtccccccgaaccgatgcgcccagatttatggggagaccgaatccttcgggaatagcttccctatagcctgtactttaattctgcgttggatttttgctccccataattgtttgagtaccccaaacggacacttgaaaaaatcgatttttttgttttcggggcagtccccccgaaccgatgcgcccagatttatggggagaccgaatccttcgggaatagcttccctatagcctgtactttaattctgcgttggatttttgctccccataattgtttgagtaccccaaacggacacttgaaaaaatcgatttttttgttttcggggcagtccccccgaaccgatgcgcccagatttaattcgatcactcatattttttgctaattgagcagaagcgtaccaaactttgcagggatttttgctccccggtaaaggactaacttacactgaaataatggattttttttgttctagctggctcaaaaaaattttcgaaaatctgagt

SEQ ID NO: 23637 - DNA, 729 bp, Heterodera glycines
gacaaggaagcagatagattttggaattggatgcgggcgatggccaacgatcggccattagtggcattgaatcgaagtgaattttgttgaaaattgagtttttgttcgtacggttttcgaaatgggtcgaaattgatgccggattcgtggtcagagacaccgaaaacctaagaaaagatgtcctacctgactctcaaaatcgtttccagattatgggggacaaaccatgaacccaattgtgaaaacattttctaataggtatccatttcattcataccgtcgtttcattttcagcagaagttgattccatttgaagataatatttcaataaagagatttataatacaactaaaaaagtcaatattacaaagactgaatagtatttcaaatatatatttttgtaaataaacaagtgtgtaaaagcagagttattgaacaatagagatcacaaaaaagaaatataaaagtgaaacaattacataaaacaacgtgtacagttaggcaacataatccaatggacgattaaagcctcccctcctgttcatatattgacgatatttgcgcgcccggttgatcttcgactcaccagaggcatttccctcgacatgtttatttttagttgtgtcaaaattagaaaaacccatcattcgcatcatgtcctcatcaacatcgacaatttcattaatagggttagactaaaaacaattgaaatgttcgtacaagcttcac

SEQ ID NO: 23638 - DNA, 1182 bp, Heterodera glycines
actccaaatttagcgacgaaataattgccgggaaattggtaatcgcttattcaactcttagaaattggaaaaaggaaatatttgaatttttcatgtttgacgtattgtaattgaattgttttatttcgacgttttttgtgttgtgtattttattcttaaaaattttattatttaaacattttggcgcttcaacaagtgtctaagctaggtaatgcccataagtctaaaaaacaactaaatgtccaaaattctaaaataaaaaattctcgactcgagaatcgagactgcaaatgtcgagcagccttattacctacatttttttaatttaaattcaaatttttaaattattcttccctattaactgtttgttaaaaattgattaacaaattgatgaatgctcagaattagggccgaccaacttattggtcatttttggtgattaaaaatgaaaccctacatgcacaaccttatatttaatttaaaaaaacaaaacaaaaaaagaaaaaaaagcctgaaaatgatttttcattttttttatacaaaattttaatggattttaattatacaacaaaaaaaaatttgaaaaaagtctcggtctcatgttttgaatcgagaaaagtctcctgtttttgggtctcgatatctgtctcggctctctgcatcgtctgtggaataaaggaaatttgttcaaacagtaaggattttatcattatttctaatgaaattgtaaagcatacaaacgaagatgggaaaaagtaatctggctaatgcattttttaatattaaggtgatttaattatttttattcgggaccgaaaattttttagaataatgtgtatttaaacatcaatttaattaaattttaaaatatttataattaaaaattgataaaaaaatcataggaaaaaacaagatttttgatttttgcactttttttgtgaagcgcccaaatttcctttcttctaattgaagaaaacaaaattggaaaagctaaaaggaaacattcgaaaaacaatttacaaaggtgaaactattcagttgaaaaacatttaaaatatatatatatctaaaatataatactaacaacccccccccccccagggtttaaaatggggatggacactaataaaaaaagcccaaaaggtttgttacaagctaataaattaatttaattgtcaataa

SEQ ID NO: 23639 - DNA, 1256 bp, Heterodera glycines
catctattatatctttcttcattctacaccatattaactccgttctgttgataaaggaatttgaagttttactggattgtgattttaacacaactttacgtctaagattataagggatgtgaccagaaaattgtgggaatatgtcttttttaagataagtgagaccattaatgattttgaatgcctgaactaaatcaattgtttttctcctttcttctaaagtttgaataaatcaagtctttgtttgtaaggtatgtaaggaagtctgcatttaaataatgcaatttttgtaaaatatttttggcatctttctaatttatttatatcttttttgtttgtcggattccaaatttcaggcgcatattctaaaagaggacgaatatatgtcttataaactttggtccaaatacgtatagagcgggattttaaaattttggcaatattgcgaatccttaaataagcagctttagtaattttagtataatgattagaaaatcttaatttattatcaatcaaaatgcccaaatcactaatagattcaacctcattaataatattgttaaataatttatattgttgttttgaattatttttgccaataaataaaataaatgttttattttgggagatgtttaaaccaaatgcattagcccattttccaatattttctaatgcaatatttaatttgcttctttcatcacgagttttgtaagagacataaattttgacatcatcagcaaaaagcttgatgctaactcccgaagggattacctgcgggaggtcattaatgtatattaaaaataacagtgggccaagaacagaaccctgtggaacaccggactgaatcggatgtaaattagaagatttattgttaattttaactctgtaaaacctatcccttaaaaattcagataaccaacttagcagttttcccttaatgccaatgttatgaagtttatttattaaaatgtttataggaagggaatcaaaagctttccgaaagtccacataaatacagtcgatatttttcttaccgtattgtcgtaccaatcttctaatactgtaattagttgagtattagtaattaaaaggtcagactcgagaattcgctgaatgccttcgtaatacgaccgacacatttcattcaaaatgtaattttgtcattttacattttactgcatgtcaaagcactgtttttggtactaatgtcgtttacagaccataaaaaaatagtttttataaattatacatttaaa

SEQ ID NO: 23640 - DNA, 1660 bp, Heterodera glycines
  unsure (1)..(1660): unsure at all n locations
ttatttntgccgataaaattantttttgccccccattcattcaaacagcagcagcattcagttcaattcaaccttatttttaaccttggacgagaagaatgttgcgacaacaaagagctgtgattttttgaaaatttttatacccatttgatttttttttgtacgtttgggggtctatcaaaaacaatttctaagttcattagagacattctccgttccttaaaattttcaaatatttacttacgcttaattccccctaaaagtccttatttcaaggactgcctttgaatttcatatcccagaaattgagccttcagtgcggagggagtgattggcgattcttttttcaacttttcatctaaaaatagcaattaagctcccggtagataggtgcgcgcgcgcctacttcttttatctcttcatttttgaattttttgttgtttttttaactaattgatccccctaatatttgctaaaaggtgactgatttttacattattccaatttaatgcaatttttctcctaataagaggtcaataaagcagatctatgcgcataccttttttatcccttaatttttgaattttctttaacatggtcgccaaaattttgctaaaaatgtgtaatgacttttaaattcattcaagtttaatcgaactatttgacacctgctgctactgctgataggattggattttgaattcgttcatttttgggtggtccaaatttaattggcccgccaaaatcagtttttcccttttttttgtccagcaggcagatggctgctatataccatctcattatatatgtgtattcagcgctttcactattctattgtgttggataaattacattttggggtaattaagtgtccattcgttttatcgccctctttctctctccactcatccaaaaattcaaaataatttacatacctaattagaaaatgtttttacctttcgaaaacaatatttaaatttataaaatgcaattaaaatgaaactgaagaacgggtatttgaaagattttttggggggggggggctttctttaattaggggcactaattagtaacatgcaaaaagacggatttttttttgaagatttgaacaatttcgttttctgttctatccaattttgtttatttatcacggagcacagctagaggaagaatgagtccccttcttcatttgtcctagcctcagacaaataaaaatttttttttccaaaaaatatattttccacggccactccaaaccgcctactttggtgctatcatattttaataggcaaaaacccgcagaaaaattaaaaactaaaatcctcgccctaattaatacgaaccaattaatttttcagaaaaattaaaaactaaaatcctcgccctaattaatacgaaccaattaattttttttctatttagcattcaaaaatattattaaaactgagaattttatttttggttgatctgtttattttggttttccactttgttacctttatcggtcttatgcataaaacaatttgtcatcacgtccgactttgtgcttttgcatgacggcacatcgcccacaataaataaaagttctgtccttgattcccgaccctaaaattgaatccctgctgggtcggcgtgctttgttgtcaagtttatcttatgc

SEQ ID NO: 23641 - DNA, 1031 bp, Heterodera glycines
tttattataaggcatgataacccgaaaggcaaatgaccctttagggtgcggagtgacgctttcgctggtcaatgcccgcatcaaatcacgcgacgcgggcccaacgatgtccaaagcgatgaagttgttcgtcacgtccttcagaaaacattcattccattaaatgccaattttatttatggcatcaaaacccagagtagtcccccggcatagtttaccccagaaaaacttttcaaaaaaattttcggcaattttttggtaaatttttgaaaaatttaataattcatttaaatttaaaaaaatcatttttgttagttctaaattgtccaatttgtccacctgtaaccgcacgtccatcgcccactcgtctgcccaacgttgaatccaaagggccaaccgaacttgttgaacagtgggagccacgatgaaataccttggaacaagaggaaatcaaatcgatggacattttaaaataaatgattcttacgaatcattgcccattcggctgaccgttgcatcggacacataactgaacaaaaagaaacaaaaataaagatggacgaagctcaatgaaaaagacgatataacacaagaaattcttggtttaggagcgggccgagacgacccaggggagaggataaaccgggtatttacacaaaaacaggaacttttgaacctgtactccaattcccgccccctctggacaggtcggctttgtaaattaaaatggcacactcacccgccctgttcattatgcattccggtgtaaattgtgctaaaaacagtatctcataagcaaaaatcagaaatcaaaaagtcccacgttccgaccgcacggtcaatgttagcagaacagagcttttgcagcaatggaaccacgtcagggccactgatgtcaaacttggcgaagctggtcatgtcgatgatgcctaacaatgggttcgaagcattttagatagtcaaaattagaaaacgggtcgcaccaacactttcccggcacgcctcgtactcacgtgccaccatcggaaacc

SEQ ID NO: 23642 - DNA, 82 bp, Heterodera glycines
cctgaaaggcgcgatcggtttggcgccgcgcgccggtgccgctgtagaaatccaccagcggcacttccgccagcgcctgcag

SEQ ID NO: 23643 - DNA, 938 bp, Heterodera glycines
  unsure (1)..(938): unsure at all n locations
aacattaaatacacgtgaaaaatgaaatgtgatcgatcaattatcgtcgggaaaggggcgacaataagcaaaagggaaattaaatgcgaaatgaaataaatgtgagaatgtgaaattcatagggcttcggccggcaaacaagaaaacccggatctaccttacaatattatggtccccaaaaaatacaagacctctttattgagtagatactgagcttctcgaatgtccgtcattactgtttaggcacagccctaccgtatctaaaacagtgccaggattctgagaatcgaatgcggtcagtgttcaatttcacatttgtcaaatgggcggatgaatttgcccattttcgtgtgattaaagattatggtggcactgctgaagaagcatatcccgaattataaggtgctcctttctgcacaaaataaagaagaatttgttagacttttgtattatgcccaatcgctttgtgatcaaatcgccaatgaattcaaaaacgaaattttttcggcagaaaaacaattaagcaaaactgttgaaccaaataatgcagttgtctttctcatttgctgcacggattcttttaagtttttggtcggtatttattcaaatatataaataatagttattataaattattaaataaccttatttttcaattacatacaaattcatttttgcttattccatatcggacagagcatcaatcgcataattaagaaggagaaactcgaaattcaacctgtaccaaatgctgggcagcccttggcaatctttgaatatttttgaaagttgaataatttaaaaataaataatattaattacttaattttacccagaaggtatgctcttggccatgctggaagaccccctttgtttcccgattaacacatggaatcatcatgaaagcgtcttaatgacatgggacgtacaancaacgt

SEQ ID NO: 23644 - DNA, 1446 bp, Heterodera glycines
  unsure (1)..(1446): unsure at all n locations
ttcggcttttgagttaattcaattggttccttttattaagcatgtcaaactttggcttctcctctccccccccccccctcccgttttttgctcatcgttcgttttccgttcgttcgttacatttatttacttttctattgccatccgacatactttttcttcatttcaatctcttcgaatatttcaatcattcaatgaattctaagcgcaaagcttttgtttatttgtttttggcccaattcttccacgatcaaaggggggggggaggcgaaatgggggacaaagggggaaggtgggagggggaggggacacgcgatgattgtgtgagtgggtcaatttacaaacgaaaagacgaagaaaaagcatggaagaaaattcaaattaatttaaaaaaatttaacaataatgaggatcaatcatatgatcattattataaaaatncagagtgtttgtaattgggcccaatcacttactaattaattggttattgaacccaattaatttactaattgatcaatgaatcaatttgcattaataatctcgttcataagctaatcatttatcaccaaattgttatttaatctcaaacgtttaatttgttcaaatattttccatttttatgcgctgtattattttatgacattggcagaaaatccgtaaattattttgtttaaatttacattaaatcatttttattaaaattaaattaaaaatgcatttttattaaatcatttttcttttcttttgcttcattcgcccattaattaaatattttaccgtttcttttattacatgttattattattagtaatattaatttttttgatcaattttcgccttgcatttgcgcgaacgcatataaaccacgggacaaagcaaaggaaaatgacaatttcccccccccccctttttccattcattcgtccgtttttatatttcattttatatgtccaattaaaatttgtgcatttatttccgattgtcaaaatggcaattaaaattggccccgttcgttcgtccgctgattcccccgaaattgcaaattccaacaatttccgccgtttgtccatcttcgaccgaacgatcgaatgcaaatcggccgatcagcttttaaatcttatcggttttaacttaactgaatttcggaaattcctaagtttaatagggcccaaaaatccgctggtccttttcgtttggattgccatggctttggtttgggccgttatggccatgccaattatgtgctccgcctttctaatggacgatttttgttcgtcacagaaaacaggagacaatggcactgactctgtttgttccccgaggccgggcacagtgacagccgacgtanagcacatccctgnggcgggaagaagcatttggcaattcggcataacatttagtttaatttgngatccagtcggagttacttggtggacattgcaactt

SEQ ID NO: 23645 - DNA, 1184 bp, Heterodera glycines
tattcatttatccatctgctactccgttaatctgatcaaatcccttctaattgctccaccaggcgagcagacggacgcggaattctgccaaccggtggccaaactgcttcaaaatgcgtgcctggtccgaggacagttggtcacccgtcttgcacacagtgaactcccccaaaagctcaatggtacctgtcgatggcaggctttatttcgggggctctaataggggagggctctattcctcaacccccctcaaaaggtggtgctttatttcagagggccctaatgcagggaacgactcgatccctcaactcccaaggggggggggggctttattataggaaatataatatttatttaattaattttcattgttattaattcacattgaaaagattgccctgtgcagtaatattgcgatgccattgtttgtgttgtgcaacggcttctactctgtgcaacaaaattgtgacgttttttgcacaccagatggtctaatgccaattaagaccttcgaaaactcgtattataagcaagattcagtgtgtgtgaattttaaattatttttttattattaccatttaattgaaaatttttgaaatttcaatgccatggtaatgggtgacaaattgttttgtaaggccattcagccattcgtccgtttaaaactgagcaatgaagaatttgtacttattcgcgcaatcatttactcacatatgggtaagctaaggcctaaaaacattataattaatgagttaaaattaatctggattaaattctaaccgtatcgattgaatgcagagagagtttagccttttttaccttttcatagaaataaggaattaaacaattttgatattattaaatggcattaaatattttctataagcatacaaaaattccaaaatttcgttaagttacataaaaattatgaataaaaagatttaagaaaataaaaactacttttccgaactttgttgaccgtaattgaataaaataagattttcttaaatttggttgtttccaagaaaagtttaaaagcttaaactgtgccgcactcaaatgaccccccactttttaaatgttttattatttcaagtttcgcctgggcttagtgatggggcacaaaaattgttgtacagtgaagcggagaaatattcttcagtgttaatgagtgttgtgcaggt

SEQ ID NO: 23646 - DNA, 1200 bp, Heterodera glycines
tgcgccgcgacactttcgccgcccagtaaaaatagacatttgcgccgcgacactttcgccgcccagtaaaaatagattgcgccccgacacttgtgtcgcccagtaaaaaagaaaaatagacatttgcgcgtcgacacttgcgccgctagacatttgcgccgcgacacttgcgccgcccagtaaaaatagacatttgcgccgcgacactttcgccgcccagtaaaaatagattgcgccccgacacttgtgtcgcccagtaaaaaagaaaaatagacatttgcgcgtcgacacttgccccgctagacatttgcgccgcgacacttgcgccgcccagtaaaaatagacatttgcgccgcgctagacatttgcgccgcgacgcttgtgtcgcccagtaaaaaagacatttgcgccgcgacacttgcgccgctagacatttgcgccgcgacacttgtgccgcccagtaaaaaatagacatttgcgccgcgacacttgcaccgctagacatttgcgccgcgacgcttgcgccgcccagtaaaaaatagacatttgcgccgcgacacttgcgccgctagacatttgcgccgcgacacttgcgccacccagtaaaaatagacatttgcgccgcgacactttcgccgcccagtaaaaatagattgcgcctcgacacttgcgccgctagacatttgcgccgcgacacttgcgccgcccagtaaaaatagacatttgcgccgcgacactttcgccgcccagtaaaaatagattgcgcctcgacacttgcgccgctagacatttgcgccgcgacatttgtgccgcccagtaaaaaagacatttgcgccgcgacacttgcgccgcccagtaaaaatagacatttgcgccgcgacactttcgccgcccagtaaaaatagattgcgcctcgacacttgcgccgctagacatttgcgccgcgacatttgtgccgcccagtaaaaatagacatttgcgccgcgctacaaaacccatttgcacctttcatttaaattttaaaatgatttatttaaacgagaacctaaaatattaatttggcttattaaatcttcatttttttttgttttccatggcaccaaatttgccgtttctgctaatgcacgcattgataaaaacaaagaaatacgtgttgtctatctttgtgattaggtgtttttttgcatttcttttaatttc

SEQ ID NO: 23647 - DNA, 1267 bp, Heterodera glycines
  unsure (1)..(1267): unsure at all n locations
agttggcgaaatgtccgaatttgncttagtggcgagctcggcatgcaaataacgaatccgaaaagcattttttgggtaatgaaacgtaaaaaaagaaacttctttcttttttggccattattatctattagctttacagacgtacaataaatctctcaatccctggacaataaattgtaaaatttttaatgtaaaaaatgtaatttagctttttaatgcttagaatttattggacaaagaatcgatttgcttattcaaatgtcattcacaatgacgcgttaagtattgagcaaattaacatgtaaatatttcttacattataataaaaaaagtaataaatgtagaatttttataataagttttatattaaaatatgttttttgcttcaaattttatgaatttttaaatttttcttctaaaagcattttaaaagcatcaaaatttgccgttagatggtatgcatgttaacttattttctggttatctctagagaccggataacaagcgtctgagggatcccgtcaaatccaattcccgattaaccccaaagattcatggaaaacgatcgggaggtatcccgaccaaatcccgatcctgattaatcataaagggtttagaaaaacattcggaagggatcccgggtcaggatcccgtccaaatctcaatcccgaggctttttcgcgatcccgcgcgggataatcgggcttgcttcatttcacattctttcccgttcggtctttaggtatttattactctatttttaaaggattttaatttggtttaaaaccctttgtttttggctttagccgaaattctttaatttaaaaagcattaaaaggaaaaaagtgtgtccccataagaaaagatcttcaaattctcaaagaatttaatttttaaaagcaaattttcttccattaaaattaaaattttatgttgacatattttaatatggggtggagtcgttatttaaaaaagccatcaatatgatttgatgaaaaattatttataacttagctgaaaagcaaccaaatttttaattcttgatattcgatagcccttagtgttctctataagtctacaaaattttaaaaaatttcgttaagtttcaaaaaaattatggctagaggaactcaaaaaaccttggtttttgagcatctttggccctaattttttttaaaacttaacgaaattttttgaaattttgtagactgatagagaacacttaggactatcgaataatatcaagaattaaaaattttgttacttt

SEQ ID NO: 23648 - DNA, 921 bp, Heterodera glycines
tctagagtcatcgcacatggcatgtgaaacaattatcggctaaatatctccttttacggaagttcgggatatactccattcatcgccagcaatttcttcacatagccgtccacatccagcttaaaataaatcgcccagtatagtacagaagtccttaataaaggcgatcccaagtgtctgcgataatctgtgtaaccttcataagccaatttttctgggttttcatcaaatttctgaatcagctgcacaagactttcaataagtacagtcgcagctttctttctgttgccgtgtttatcctacacatcacatcagacaaactatacctaatacaatatttacctgcagtccacaatggtctaaaggaaaccttccttcattatccaccaagtatgggaaccctttattctctagcagcttttttatagcttcagtctcaccgtagaaagaacaccatgtcaggggggtccataacgtagtatcattctttttgttcgggtcagctttattctgaatcagtgcctggatacactgaagcttatacctactcgtctggtagttatgcaccacacaagctgatagcagtggtgtatttccgaacttatcgatagtatcaacataatgacccagtccaattttttcagcacgctcacacagctgagtcacgagactgtagttctggtccagagctgctctgtgcaaaactgttctagcatttttatcgactctctgcagatcctgatattcggcgtctctgtcgttgttcagtgcattgggtgactcaatctcttgatttaaagctaaatttgaagggaattgttgcatagagagagtaacatgatcgacatgatcgctgaggcctgaggattctcttgcggagcgcccctcgggaacagacgataggattcctggagagtttcc

SEQ ID NO: 23649 - DNA, 819 bp, Heterodera glycines
tcaaggacaaaattctatacgcaagtttgaataacttaattgagctcgctggtgtcctttccaacggcaagcccttcaaggatactgagctttggaactcccttgttaaacaattagacgctaaattcgacagacccggacctaaatatgttcaatacagtggatggaaccttgtctcctatgagttggaagccgctgaagagaaagctcctcatgatcctgcaagcgagagattttgggctgaatgtaaagatggcaccagccactatgctatcctcagacatgaaatcagagtggcttttgacagaatcagaggcagcttcttgaatagagttttgcaaagagaaaccagaattgccactacccttgataatttccaggaaagacttgatagagaaaagttgagaaagagccttgaaggagctagaagtgcaggcattaatgttgattcagtgatcggaaaattgagagcataagatatatgaggaggactaagtgatcttttatatatacgtattgattgctttgaatgaagagtatataattgcctaccttgaagcaaataaggaaaaattcaactacaatcttttgaaataataagaatattgaataggatagtgaaactgctgcttgtttacaaatgagtgaagtaattggtttggaattactggctagagaaagaataatctgctgaaagatgaagtcgagttaaaaaaaacacttttttagatacgaagagataaacgcaattttttgctccttcaaggcttcaaaatactagtgagatttttttcggtgaaaattttcttataatcgatt

SEQ ID NO: 23650 - DNA, 1415 bp, Heterodera glycines
  unsure (1)..(1415): unsure at all n locations
ggctaaaaaaagagatgcgcagacagggaaaactaacgctttctcagtgctgtagctgaggggtcaaatagtactagttccaccccaacagactccttttcaccagcagctgagcccgcaaacccagacaaagaaaatgctaccaatagtaaaaataaccaccaacaaaacatcactactactgccaccgctactttatcatccgagacgccagctgagcaaattttagcagatcaagataatagtattgctgagaaagacgaagcaggtacgccgccgccatcaagtggattaggacagtccggtgatgctgctgctacatcagtgactcaagttgaagatggtcgaaatttacctcaagcagccgcgttgacctccaataacccaaaaattgttgctaaacaatcaacagtagcgacagatagaaggaaagagaaaataattgaaaagctgatcgacgaacaagtggaccgaatggtcgatggaacacatgcacagcagaagatgctacaggaagaaggtaaagacaatgagagtcaacaccgcatttcaacatataaactcatcgaagaagtgctacatggtgagcatggacagctaatgtcgcaacagcgcgaatccaaaatggcagctgaatttgcgtacaatgaaataactcagcgattcggcattagaatgggcccaggagtaatgcacgttgatttgagcaaacagctgtcctatgtgttggggtttgatcacaaaacacgcatttacaacaatcagtcggcaaaatatccacctgatctgtctggtggtgtccgtcagctgtacgtttacgcgcctaaactggtggaggattccatcataggtgaccgcatggcaccgttgctgcgagttgtcaacgtgtcagggacaccagggttggacatgccagaggttatatataccaatgaaatttttcattctctccaaaacaaacgcatttctgaaattaacattgaaattcagacagcatttggacgttacgtaaaatttggttggggaactacagtaatcacattacattttagacaaaaactattttagcaaaaaaaaacgatagttatgacgcacgttgtttttaacccggacaacgtaaattggtccgcgttccttgcgttacagcagcagcaggagggaaatggcgaacttcagtattttgtaggcagtaaatttcagcgtggtggcggtctgttacaaaatatttcgcggttcctgatgcctgtagccacaaaccttctaaagtctgcctcaaaggagggcatttccgcagggacacggatgcttgacgatctcgcgcagggaaaggcgtttaaggagtctctncaaactcaggctaagcaaggatttgagaatctggccgaaagctcaacagtgcggaaggntgggcggca

SEQ ID NO: 23651 - DNA, 1794 bp, Heterodera glycines
ttgatttttcggccatgaaaaaattattacccttataagtgttaaaggaggcatattttcatcggatcatttcacacaatttttcacattaattactcctaaaacaaagatcgtaaactttcgttggttttgtccatcgaatgtgttacattttaatatagtcatagcatcaaggctaaatgccttgtcatatgaatgctttagcataaatcaaaaatattccgcctttaacagtatgttgttagaaattttaaatgagtgtattccaataaagcgtttaaccaagaatgatttgactcctaaatacccacaacatttattagcatccatcaaagaaaaggctaaattattcaggcaagctaaaactgacccatccaaaaaagcactatacgatagcatttctttacatataaaaatacaaacaaataaataccatagccaaattgagaaaaaggctatttcaaaaggaataaattcaatttataaatatatacaaaaattcaatgtcaatccctttgaaatacctaatctaatttatgaaaataaatgctatcataatagtgctgagaaatctgaattatttgccacattatttgccaattcatttaataatagtgaaaccgacccaagctatacatgcttgggtaatattatagaaattgatcaatgctttatatcggatataaattttaacatcatcgagacccaaaatcttctgaaaaaacttccgaataaaaatggcacttctcccgataatattagctataaaattttaaaaatttgccattcttctctgtcaactgttattactgacttgtttaggatctcattagacattggttcacttccagacatctggaaagaatcaattgtttttccgcttttaaaaagggtgacaaaaataatcccgaaaactataggccaatttcattaacctgctcactctgcagggttatggaaagaattttaagcaaaaatatttacaattttctattaaaaaacaaaaaaatttcggaatttcaatttgttttgttagaaataggtctacaacgagtcaactaataacagttgtggaagattggtacgaggcaataataaatgaaaaaaatgttgactgtatttatattgattttcaaaaagcatttgactcagtgccccatgaattacttttatacaaattggaaaaaataggtataaggggcaaacttttgatgtggataaaggactttttgagtaataggacttttcgtgttaaaattggggatgatttatcctccagtaaaaaagttggctctggcgtcccccagggctctctgtccttggacctttattatttttgatttatattaacgatcttcctgatgctttgccatcaggagtgaaaataaaattatatgctgatgatgttaaattgtatatttgttataaagcaagaaccgaaacagaaattatgcataaagcattgcataatttatcagaatgggcaaataaatggcagatcagaatctcaattaaaaaaacttttgtacttcatttggggaataaaaaccccaaagaaatatataaaattgatggaaatataataaatgttgtggatacaattagggatttaggcataaatattgataataaattgcaattttccaatcatgtcacacaaataataaagaatgcatatttacgtatgcgttctttatttcgggttattaaatcaaaatcttctaggatttggattattttgtacaaaaccgggggggggccgttattggaatatgctcctgaggttggaatcca

SEQ ID NO: 23652 - DNA, 1280 bp, Heterodera glycines
atgtcgcctttaaattttgaaaaaacataagcctattaaaattttgaattttgaagccgagcatgcactagcaacgaagtcctttgcgcgaagcgctcatgtaatgcatattcttttcatctctcacaagtatactgtctacaccgagcaattactgtgcaaagccaactgtctacaccgagcaactactgcgccgccacacgctagtttatattaccatagagaaaaagggggactcgtcttaaaaactaatttgagtcgaacggctgtcgggaggggtctgaaagtagtggaagggtcttacaactttttgaggcgcatctgggaaaaatatgggttttccgctccggtggccaactgagtcccggcggctaatttctcacttttgcttgcgtttgaaggcccgtaactttttttctaaaactctgatcaaaaaatgcttgctggtaggattttaagttgaagtgttttctaattttcaaaaaaaattccaggcctctacctatacttggaagggctgcagaaattggcaacttttcagtaccaactttgcccagttcagtccccgttgaataactcattaggctttgacctgagcgcagggtggccagcagacttattgtagagctcggtgagctcgatttttccagattttaaaatttcaaaaattttcaaaatttttcgagctaggcctaaaaaacggttttttggtttttgaattttaagaatttttaacgaattttcccagagaaatggagaccacttccaaaacatagtttttcgagctctatcgactggtattttttttggaaaaatttcgattttttcccggaaatagaaaaaatttttggcctgagcgggacatttgagtcccgggcccataactcgtcgggggttggttttagccaaaaatggccttagggcaaaattgtagagctttttaagctctatcgaatggtgtactacatgttggaaaatttcaaaatttttcgagctaagccccctagaaattttcgggaattttttttcgacgaaaaatgggggtgaaaaatatttttctggggtaattttggggggctgacaacgaatatgatgcaattttaagtttcataatttttggaaatttttaaaaattcctttattttttgggaaattttttggcccccccggatttttgggggaaaattggaaaaatataaaaaccccggggggagggggctctcaattttaaataataaaaaaaatttttaaaataaaaaaaaaaaaaaaaaaaaaaaaaa

SEQ ID NO: 23653 - DNA, 1970 bp, Heterodera glycines
atcatggaaagttatgcccgtgggtgcgaattgtgggtcagcggcaagttgcgcggtcagcgtgccaaggcgatgaagtttgtggacggagtgatgatccattcgggtaacccggtcaccgagtacatccaggaggcggttcgccacgtgcaaatgcgacagggtttgtgttttaaaatatggaaaaatattttgggatctatttgaaagatcgattaaaagggttttcgggtaccaaaaatacttttgagttagtttccaatgccatgcgatcccatttttctatttttttcgcctctttgttcaggcgttttgggcatcaaagtgaagatcatgttgccgcacgaccccaagggacagatgggaccgcgcaatccgttgcccgaccacatccaggtaaaatgttctacaaaaactgacacacggaaccgcataactcgggatggatacaagccggaggatctatttttgaaaaaaaaactccatacctttagattagagaaggacggagaatttgctattaaaaatctaaaattctggttttcctagacaaaaataaagttttgatacttttccctaaaattgttccttttccattacaggtcaaagagccaccgattgacgtcgcgccgaccacgccgtactcggagcaccgcgaaccgatgaccactggcatgccgccccagacacaaatgccgcccgcccatcagcagcagcagctgccgatggttggccaagtgccgtccccggcacagttttaattgtgaggaagaaccgctgatgatggtcatgatggaggagggggagatgttcaattaaaatttgttatttgtgtgtcatcggcacagaccacccatttttgttccgttaaaaattctttgttgttgtttttgttttcaatgatttttgttattgctgatgaagcatcgtattgaaacatgtctggaatatttgaaacaagaatatttcttggggcttgatttgactacttttgtccctcatgagcgttgggaattggcaaatttgcctcacttttggcccattgttttgggctgccttttttcgtacattttggttttatacgattgctttcattgttttcagtggtcacacattccgacgcaattacttcattattttgggattagtacccaacgcttttcttttgcagcttttgaacaatgagcggtggcatttatggcggaggtgtgtgccttccttttgcaatttatgttttttgagagtgtccaacatttgttgttcctttttcagatgacgtcggtgcattggtgttcgaccccggctcgcacaggttttgatgggtgatgggtgcgcaaattccgtctttttgtacgccattatatatggcaataattgttaaaaatttgcaaaatctcgactaaaattgcatttaaatgacaatttttccatgtcctcgcctggccatttaaaattcttttcatttcatcccctggaatttcacaaaattcatttctaatactgaacctacaaaattacatgattttccttttttcgattttcgtcatttaaccattatggttttgttcagtttccgcgtcggttacggtggcgaggagttcccccgctttgacattccggcacgggtcggcgtctgtcctcggccttccgccggcactgacgcgtcccaaaccgctgacgccacaattgaagaggtggcctcaggacggggggccaacgccagcaacaaattcgaccattacattggcacaacaaagctgaatgtgccccgggccggcatggaggtgaagccgtacatgcgggagggcatgggtaagcgtgttttgggggcttggcgctcatggtaccaacaaattggatggattgacccgtattatagttcgaaaattcagcgccggggagaaaactagtagtttttagccgttttcgctgcagatgactaattttacatttttgagtcaatttgcaca

SEQ ID NO: 23654 - DNA, 1995 bp, Heterodera glycines
  unsure (1)..(1995): unsure at all n locations
ggggagtggaaattatttttcttgggtaaattatggtgctgatcacgattatgatgtttgtattaagtttcataatttttgaaattttttaaaaattctttatttttaggaaattttttggcccttggaaatttgggttaaaatttgaaaattcgtaactcacttctatgttggacgattttaatacaataaagcaattaaaatagagaaaaataaggagaattttatgggatttaattggattttctatcatgattttaaaaaaagtaattccagaaattctggaaattttcaaattttcaaaaaaaaatttatacctcggttctgaaaagtcattctggaaaaataaaatactacaaaaatccgcaattttttgcgctattatataaattttatttggcatttttatcactttcttacgaattgttacaaaaataaaagtgattttgggattctggaccaaaggggggtgaccaggatttttgatgaaaaaattttttcacccaaaatcttccaaaaacatgtcattagggctattttatgacgctgatcacgaatacgtgatcagatttaacttttgacatagtcaagacctcagaatccctgtgtgattggggattctggtacatgttctgagggggggggggcaggttcggaccctgacggtgtaaattatttttctattatttttgagttaattttcattacatttaatacatttaaatgttttagttttattaataattaataaatttttaaatttgctttaattatttttagagaataatgattttcatttacataattaattattattttttaattaaagaatttcagctattcttttaaaattgaatttgtcaaaattttttcatttcaatttaaataaatattcaattattatacatttcataatttgtttttgattaataaaagtgtattttattataaaaaactgaaaaatataatgcattcgattttttatctatttttaataaaaataattccttatttaattttaaaccatgttgtacctcttcctcacgtggttgtacctcttctaaccacctttgtacctctctaagcactgttatacgtcttttaatcactgttgtacctcttttaatcatatttgtacctcttctcatcacttttgtacctcttctaatcacttttgtacctattctcatcactattttacctattctcatcacttttgtacctcttctcagtgaccaggatttttgagtggaaaatttttctcaccaaaatcttccaaaaacatgtctttagggctatattagggttctgattactaatctgaaatgagatttcagttatgacatcgttaagacttctgaatccctgtgtgattggggattctggaacatgtgctaggggcaagttcgaatccggacggtgtacatttttttctatttatttttgtgttattttcagtgttttaaataatttaaaatagtttttgttttattaataatgaatatctaaatgtattttttaaattaatttttttagtttaaataataaataagaaattctttagatttatttaagcaaaactagatttaaaaattggatgcatataataataattcatttaaaaacaaaataaaacaaaagatttaaaataaattattccctttattaactaaaaaacaaaatttacatttttcgatcaaatatttctttacgtacgtcaagatatcgnattggtttttgttattcaatttctctgagtcatttttgtcacactttcccacccaccctttgttgttaaatcattaaaaacctcgattctgtcaatgagccataactttttatctttgcanaaaattttattcaatgtccccggttatttttcttatatcaaaatgttcatatttcattcccttggcttttttgtgaatttttcttttcattttttcagctgtgtgtgtaataatattttgaatggacatttcccccttttttgac

SEQ ID NO: 23655 - DNA, 1541 bp, Heterodera glycines
ccccccccccccccccaatttcttaatcgtttgttggatcgcttgccatttttgatttatggtgaataaaaaaggggaataacggcccccggacggatggatctttgcgtcgctttgcttttcttttgctttccctttttgttgtccgccgttttccattgcccccccccaaaaaaaatatgcaattttcactttcggccgggtgatttgtttatgtttttgtgatttgctgctctgtttttgtttatgggttcccaaaatctgtgccaaacaaagaaattgcgtataaaagcgttgggacggcggcagcgcaaaggcacacggataataataataataataatgagttggcatttgccattggcattttccaattaatttttatttttatttaaattactttcaatttattcagcatttttataatctttcaaatccctcactacgaaatggaagagccaaagcctgcccaaacgtcgtttttcctctggtgatttttggggttctgttgagggattggaattgaccgagcgattgtttaggatgaacgaaaacaggcacagattctatcagccggggatgactcaggcggacgtggcaaaggccgcaggtcgaacaaacggagggaactgaaaaacggatggtcatttgtccatccaaaattcaaatcccatggacctatccaagggcggtgcccaatttcccgtggcatttaggcgaggaatggcgtcgcatgtccagttccgagaaggccaagtggggagagaagtcggtggaggacaaagaacgctacgtccacggcaaaccaattaattaggcaatcggaccgtaataattgactctttcagaaatgaacgaacagcgcgagaaagaagaaggggaggaagagggcgaatgagaaagagcgaagggacagaagatgagagagaggacaaacaaacagaaagaatctttttggattccaaacttaattaatattaattggccatttcttttgccttttgtttctcaaataaatcattttgttaattttcaattggggacataaaaaataaaataccgtaaattctctatttgaaggccccttatcttaaacttccaaaatttggtcattttttggataaatcattaacaaatttgaactttcaattcaaaattgtgctaaaatgcgtttttttggcgaattcttttacataaaattaatttaaaaattcttcagcggcgcttggggatccccggttgggtcatccccgctctttctccccgttcccggtttgggtaatactggagaatctgggcttcacccaaaaaaaaaattttcttgtgaaaaaaatgaacccggggttttcggtgcttctgatcacgaatatgatatcaaaatttgcaaaataattgactttatcatttattttgaaaatcatatattttagaaattttgaccaacatggcagggcaataaatgttgattgtttatgtcttcgactgttctatgatcatctcattgattaatcaatagagatgatgcatatctggatgcctca

SEQ ID NO: 23656 - DNA, 2051 bp, Heterodera glycines
ggtcggtgtagggactgctcagtttgtccagttggactcgcttaagatggacaaagcgagacagcggttcataccattggaaaaggagcactaaacgggggaacaaacttaggaaatgaatatgaaaaaataaatattaaaaagtgaataagtaaagaagaaaaaaaatgaaagagtgctactgaccagcgtgaggaacggcacaacaaaggtaaaggttttcgtcattgatgctcctttccacgttacactgatagcaatcgctaaaattcatgaatttgcaagcaaaattggccaataatttaacacctttgtggtaatcacccaacttccccgatcctgggccaatcaccaagcaaatcttggtaggccaatctccatattcaactgaccgtgtctccggcattcgaagtgtgctcatcaatgccttcggtttcaacttctgcggcaacttgtccagtgatttggccaacttctgagtgatcaattcctgctggaacagctgcaacatctcatgtctgtacagatacggtgtttttccctgcagtgcggtgagtgtgtcgttgacaacgtaaagccaagtgcaacgacgctcatgaagctaacaattggacgaaatgacaaaccggcgaatcgaaatttaatcttcgacagagacatacttgaaagagggcttcctcctccgtggtgaggtgtgtgagatccattgcaaaaatgccctgctcggcaccgatgatcataaactgtttacggttggccgggtggaaatattgggcacaacaattgacatgaattggaatgttgtgcaatagggagacaaaacactgaaccaatgctgaaataattaaacttggcaagggaaaacgaacgaacagcgcccattgtgacttggggggttggcaccttcggaaaagcaatgaaagggtggagtttcataaggaaagggacaaccattccgaagcagcaggtcatcggacgggactggaatggctgatggatgtgatgccgattggcccacggagtcccatgggaaaaaggaggagccttcgaggaggaaatgcctaaaaaacacgaactatcatttacgaagcaacgaattgacctgtaatgttgaccatcgaagtcgattttgagcgtagtttaagccaacggctccgaaaggactcgtcaatgcgcgcgaacaatcggttcgacttcagttgggtggtcggctgttcgcttgccgaggaaattggtcggtgtgcccgagggaacagtccacgcaaatcgcgcggtctcctggccacccgagcgttatttggtggcgcctttttctttggcgactggtgatttacggtggactcttcctaaagggacaacattccgtgggttccaatggtcacccgttgttttcattgctccttttcggcccacctgctgcagtgtgtcgtctccgttccgttcgtcctcttcgccctgtgaggcgagcagtgtccgttccgtgtggtacgactgctgccgcgtgtcgtcgtgcccattttccacggtttccattaagaaaacctcctcgtcgtcagcgccaaaatgaaggcgttcatgggaggagcaagcggagcaagacgaaggcggagttgtggcgactgtgaaggcattcacccgctggtggtgctggctgacacgtcttcttgcaagcgcctcgaaattttctgaaaattgatcaagtgaaagagtgaaaagacggacgtttttaaattcaaataaaattggtttaaaaaaacaacttgaaaaatatgtatttttgagactcgggaatcccgtgcctcgttgttacaataattgaaaatgcgctaaaaacatgccatgttccgactcaaattccaattgttggttataaatcatctcataagatgggttcaccgccatttccacttcaatttgcaattgctcgtttccgtcagttgcatttgtttggtaaaaatgttcagggtgattcacccggtcgagcagttcacgtgtgagtcgtgcgctcagcaccccggaaacgaatgggtcagccttttttggttgtttat

SEQ ID NO: 23657 - DNA, 1552 bp, Heterodera glycines
  unsure (1)..(1552): unsure at all n locations
tcagtcccgggtctgtactctcnagggatggttcccgcaaaaaaatctttcgatttcttccatttacagaccgaganggaatcgattgatatataatttgtacgatttggtgaactactacacccctaatttaccatatttctaaatatgttaataacaaaaatccaatatnttttatttaattttattgttacactaataatatttaatcgtatgtttttgtcagcatattaaaaggcaaaaatacattttaacaacttaaattttaaacttattattagctttgttaaatgtttagaattaagtaattattttaatacaaatcaaccctcaaatttactttgtctttaagttctcttttttaaaattaaatgcaattttcattaaatccagaatttagaaatatagaattaaaaaaataaaacttaatgtgttttattgagctttatatttatcataaaatttatttttacaataaagaatttaattgataaaatttcagcaccgccttacctcagttctttaaatgaattcccattaatatttctaataaattgattttcaaatttattttcataaattatccatttgttgattaaaatttaactgatatactaaaatctatataatcacacagttttattttaatattcgaataataataataaaacgtaagttggaggagctcatatagatagatgtaaatccaactaactacaacaataacgtaaaaaaccatgcgactgagaaaataaatctcacaaattttttaaaaataattttactcaatccaataagctgtctcacaagttcattccatttagggacgagaactatatggttccgtctttttggcaatataatttaataataaatatgaatagatgtaccatgtataaaataaataaacaattttttttaaatttaattaaaggaattaaatattgaaaaatactggcaatttaaaaataatacttaatattttgaaaataattttagaatttttgcgatttaaaatcaaaagggtcgaactagaactaacgtagaaagggaaatataacgaaaaaggagaagaataaaaaattggaaaaaattcaagaaagttaaaaaatatatatttaaacaatataataataaatagtaaaggaattaatgccaggattttaaaattgtttataggttttcgttaattcataaatacaaaatgccagaaagatagaagaagcgattacattttaaaagatgcataagaaaaacaaaataatatatgaaaatttctaaagaaaaaaattaattatttaaatttaaaaaaattataactatttattaacaaaatgtttcaaaatatctacattataaaaacttgattcctcctattctcttaataaaatgatccccaatgaacgagttttataacagaatgctattaaaatttcaaaaaaattttttcataaattataatataatctctatcttatttcgtcgtccataacaaaaacaanatttacatcaaaattattattaaattacataaagcccataaaatatgtaa

SEQ ID NO: 23658 - DNA, 1222 bp, Heterodera glycines
aatcaaagggtgggcctttttatttcttttttcacccattcatttgttgcgtataagttttcctgattttctggcagcacttttttttgcaaatttattttttacccaattcccccccccccccctctaaaatttcgctttgttacagcttctccaccgcgccattgaccgcgtgattgtggagccgatcagccgagagccgaacccactccgacagcagggcgcttttttgagactcaaatgcaaggttgggttttggcacggaaaacattttcgattttttttacgcatcccaccgaatttttaaaaatttttgccatgcttatttaatgcaaaattttttagaatttcatgcacctctgttttgaaatgaacgacctctccgactgtcaagcggtggcccgttccatcgagaagctctcaaatttgcgtagggttttctcttttttaattactgattttccccgaattatgaaaaaaaaagttttttacgttgaacaaccgcaaattgccattattttggtggcaaaatttcagcaaaaaaatggcttttttaaaaaacaaaggaatttaattttatgcaaaaatggaacaattattggcggcgcccttacaaattagcggccccttggtatgcccttgattcaccgccaccacggcacagatcggagattttgggacaccattttttggcactggaattccgcatttaggattttttttttgggttacggaaccccattccttggcacagatggtgttgcgcatgactaccccttctactaccggtgtccgtttgtcgtgttggacaacggctgggaggcgtacagcgtggagcagctgctgtttgcccgactccaactgcacgccagggacaagtggcgcatcagctcggtcaaccgtggctttgaggtatatgcaaagagattttggggaatggtatcggcaaaaaatgtgccaaaaaaacaaagttggacaaaatgccgacatagggacaaaaatgccggcacagtttccgaacaaaatgccgactaatttccgaacgaaaaggcaacacaatttatttataataaattttcttgacaaattccaacatattttcctttcaaaacgccgacacatttcaaaggtcaaataaataaataattgaaaaatatcgaccgataaacggtctaaaatggacaaaaaatagcaatggcactattttttggcacaattgctg

SEQ ID NO: 23659 - DNA, 1071 bp, Heterodera glycines
  unsure (1)..(1071): unsure at all n locations
acagacgagcagaggcaaaggtaagcagggacaaaaggccancaagatggggacaaaacggcgacataatgaagaggacaaaagggaaaaatggtggacggacaaaaggggccacaaaatgggggacaaaagggaaaaaatggtggacggacaaaagggccagacataatgaagaggacaaaagggaaaaatggtggactgacaaaagggccacaaaatgggggacaaaaggacgacataatgaagaggacaaaagggcaaaaaatgagggacggacaaaagggcaacaaaatgaagggataaaagggcaaaaaaaatgagaggacaaaagttcagaaaaatgggggacggacaaaagagcgacaagacaaatcgtcatgccaaaatgggacaacaggggacaaagggacaacaaaagggcgacataatggagaggacaaaagccaacaaaaacgagggacaaaaactaggggacaaaagggcgacaaaaatgaggggacaaaagggcagcaatacaaatcgtcaaaagaaagatgacaaaatgggacattaggggacaaagggacaacaaaattaatggacaaaagggcgaaaaaatgggagacaaatcgtcaaaataaggggggacaaatcgtcaaagaaaaggacaacaattctaaaaataagtgttacgaattcaggcggtggctgtgaaagtcagatgtactactcgcagtggaagtacgtctacggcaatgtgtcgcgcattggcacactgcgcgagtcgttggcacggctcattgacggtcggtaaatgaatgttgccttttatcgaacgcggcacatgtcatgaaaaaatggaaaatgggctgaatttccccctcccaccagaggacggtcccagggggtggaggccctatatattttttccaattttcaagtatccgaaaaattttttcaaaaaaatttttttggaaacaaatcgcttaaattttgaaaaaaaatgtttggagacgtggatgacaatagctacacttttttaacaaaattatcgatttgaatttttggttgtcttttttttaacccctaaaa

SEQ ID NO: 23660 - DNA, 1733 bp, Heterodera glycines
ggtcctttcaaaattccgaattgtataattaaattaatttttgaaattcaaattttgaaattcaaaatcgaatactaaaaacattctcgtcaacattactcactcgcccgtggcatcggccgactctctccgatcaaattcagtccaaaatcactcgatttttactcgccaccgatcatcgatcagacaattttctgaactcagcgacccatcgggcgccgacaaacgtttggtgcagcgcagacaaaccctaaattcgggaaatttctctattttgatgcattagggaatttttaaaataattaaacaatatatgatcaaaaaccttaatttaaaaactaaaattcagcaataaatttttattttacccatttaaaaaaaaatttaaatctaaaaattcaaatttaaaatgttcgaaaattaattttttatttctgaaataaataatttcactcttttaaatcactaattaggggggttaaatttcaccaatttgagaaaataaaatggcccacatttgtaatgtcgcgcataagtgaaaccataacgaacacatcgccaacatactgctctttggcgatcaaattctttatttttattttatatttaggatattaaaaaaaaattttgacttaattttattatatttaattttcccacttttaaactgcccctttggcaatgcttccaaattgcgtacaaaattggcgcgtccgtgcaaatgccataaaatttgttcaaattgtcatggtcaatgaaacgaagctataaaaatttaaattaaattaattaaatacaattaaaaaaatttataacaattaattaaatttataaaattattaattaattattaattttttaattataaattaataataattaaatataataagatataaaaactaaaatcattttaatcattcaaaaaaatattttgttagattttttttctcaaagatggaataaaaataaacttcgtttattaaaatatttttaatttttcgtaatttaaaatttttttattatcactattaatctttttttttaatttattattttcatttagttatgacaaacaaattatatttttaataaaattaattttataataagtaaaaatattttaaaagtttttttatgtataaattatagtttcaataattaaacataaaaaatgaaaaaaattatttgttattcaatttgaaaaatttttattttttaaaatgaaatttaaaaaatggcatttcaatttcaaattttaaaaatgtatttttttcaattcacctttctaagttgtcctaactgtttggcatcgatgcgcactttgaccaaatatttgacaccaaacacaatctcccggttgtacaaaaaatgggcataagtgtccgtctccaactttttgttgttgctgcccaacgtcactttggtgccacctgaaaaaaagacacaattgaatttgtgccaaacatagcgccaaaacatttagttaaattttcaaaaatataccccctaagaaatgaaaattttctcaaaaattcatctccaaaacatagtttttatttttttgacaagaatatttgattttcaaattagctatctcaagtactgattttgacttaattttgttgctttttgatctttgtcattttaggcctctaaattcgaagctttttccattttttaagtgcctattttatggcttttttttcgaaccaaatcctagtaagtaagcc

SEQ ID NO: 23661 - DNA, 1093 bp, Heterodera glycines
aaccatttcaatttgagttcgggaaaacaaaggaaagcgacattgtcggaaaaaattacgataaaaaaaataacagtaaaaatgtcgaaaaatttagaaaaagccctctaccaagcgatttattctattcgcattgtcaaaaatttgtttgaactgaacctccatcgtggccatgtcaacaaaactgcggtctttcacatgcaaatgttgtattttgactgccacgtattcgtcgcttgacttcagcttggccctgtgcacttgcgcgagagaagcctaaacgaattcgaagaccactcagagatacggaaaacaaaaatgccattataatgtaaaattaatctttgttaattgtatagaaatgaacaattaggaatatgaaagtaaaacgcacagcgccacatggacgggagtcgaactcgtcgaaaacatcgtcaaactgtaaaattgtagtgagtgagtgaaacacggcaaaaaaaattaatttacatttttgtgcaaactcctgtagaagaccgtcttcatgtcgtccaaacttctctccggcgctttcgagaattcatcgtgtcgatgagcatcttaataacctacagtatgactcaaacaagtagataaaacactgagacatttttgttttttaattattgactttcggtaaacaaccattccgctacttcaaaaaaacaggaatcctgggaccttccctccccctcttcataacagcaaacgcattattggcttatattggcattataatccatctcagtttattaagcaatttttaatctcaaacttcgtttgaagaattcatcactccaatgttgacaattatttgttaccgcacaatacgcctttacaggcatgtttttgaaaatatcgtcgactgatgcatatgacagagagacatctttcctacggatttcttccatataatcaacataatgaccgaacctaaatcatttaatattcgcttactcccagtgaaaattaaaatttttcagattgaaacaaacctggaaaattttccttctccggaaaaatcgaatggtttcggcatttctttggagcattcttgacatttcactgttaattt

SEQ ID NO: 23662 - DNA, 1040 bp, Heterodera glycines
ttgcatgtgtaattgtagctaataaatatatgtgcatggtgcattttatgccgttgaccattaaaaacaaaattttcgacttgaaaatcgacccctccaaaacttaattttgtccaccccccaattaccgcttcaaattttcacatcggttgagaaacccaatttttttgtaaaatggaggccaaaatggcaaaaaatattaattttttggcgaaaaacggcgaaaaattttgtaaaatacaccccataattcgggatttcaaaaaaccaaaaatacacccctaaaaatcggactttttgacttcagccccccacccccaaagccaagggtctgactacgcccttgggctggacaatgattgaaaatagattttaaacattttttaaagaaaaccggcagtgtcaacactctcattcaaagcatcggaattggagggttaaggccgaacactctgctcttaagttggcccacgacagaagtgggcaaagacgaagtggccgactcggaatatcgaacattcactggtgaaatgaaaagcgagattgtctaaaaatgaatcagatcaaaatcacattgaatttccgatttaagacaaattgttggctggcgcggttaatggaatggcacttttggtggcgaagggaatacctgaatttccgagcaacgttaaattgagtggctatttggatgtttattggattgtccgagatggcggactgtgtgtgctgataacttttctgctggaacagaacgaagtttggagcagttgcaaaactcgaatcgttgcagtcgctcgtccgcaagaaaacagcgcaaaactgaagaagcaaatccaaaactacctttaccaattgcgaatcgatgccgaaattttggtggggggggggcggggggagtgatcggacggttaattttattcactcattgtcaggtgacaaaactcaatgacccagaactgtcgataaccgcttacgaacggactttgcttatggaggaaaggacgaaaatgctgaaacaaatccaacggcgaggaatgccc

SEQ ID NO: 23663 - DNA, 856 bp, Heterodera glycines
tgccatcgcaacgcaacaccagaaaagcaactctcgcgagacaaacatttgtggcatccgctgttacaggaaaaaaatgaacaatgggatgcgcaaagacaacagacgaatggcaattaacgaactcttagaatgaaaagccgaaaattcattcaaaatcattaggaattacataatattaaaatttaagtggaaaataaatttcatttctttatctctcttttctctctctctctctctctcgcgttttctctcactccctctccaattcgtccgcaatctctggccatgtcgcctcataaagcgcaattcccctgggggcttttcgccctcagataggccccactttccttttgtccctttatttctgttttcatcatccgtcacatttcttcttcctctcccttccatgttcttcatcgccaatatttggatttatcattcttctccgatcgtttcttttccatttttggcccttttcctccaaaatattcccgccaaatgcaatttgttctcttcggtgacggcgccgtccctttccgatgtcatcgatcagaaagtgtccgtcgtcgtcgatccaatccgtgtggttttcgacaattcgtccgactttggcggcaccaatcgcttctccaatgacttttcttctctttgatctctttctctccaccgaagtgcaaattgtgaggagcagcagataaagccgagtgaaaggtgctaacaattcgtattctgttcatttccaaagattgcactttaaagcattgggtgggacacgcgcatctgtttccgctggaattgtgaagggattgggccgggtcagtgagttgtttcgggggaggcggggggggggggg

SEQ ID NO: 23664 - DNA, 1654 bp, Heterodera glycines
  unsure (1)..(1654): unsure at all n locations
taaagcatgcctgtacaaggggggggggtcatccaagaggtctcgagatcggctttgcccccccccctcccatgggggggggggggggggggggcagagcccatttccattacgatcgtccatttttcaattttttgcctagtgaagacctttttttttttgctcttcgggccaaaagattgttttctccagtgttattaaaaaattttgaacgccaattcctttcaagatttccgtttggggccggggttcccacccgggcaacgacttttttgcggcgcttttttcaaaaaactttgggaaaagggggtccggcggtgccgatatgcgccgccgggaaattttttcatttttaatgcgatttgttaacgatttttgccaaaaaatgcctaaattttgcatatttctagcaaattttcaccaaaaaattaacaattttatgcttttaagccaaattttaaagaaaattatagacgaaagggaaaaaattgattttagttgatcgtaaaaatctggaatttttttgaaaaaccggcaaaatttttcgatttttctacccctctcttacgatcgacaattttcctcacaaatcggtattagtcgatcgtaaaatttttgcatttttaatgaaatttgttaagaaataaggcacttttccgaattgccaatgagaaaattttataaagtttctgtttttatattaacgatcgactttttcgctgacttttttttctctacctcatttttcttttctccttcttgaatcattgaagaattccgaattggttttttcggtggaccacgtgactcatgtgagttgcggtgccctggttgaataaagttcgcgtaaattttaagataacaaaaaaggattttcggtaaatcagcgcccattttggttcgggtcgaaaaagtcgggccgcaagtgtcgtttttggatgtggccgcaaatgtgcgaaaaaggctcttaagaaatggtccgcaaatgtccgaggcgcaaatgatttcagtagttatggacggtgaccccccgggctccgggggtggtgtgaaaacatgtgttttcacacctttgagggtgtgaaaacagctgttaccggcaggtgtccggggcccattttcgcgcaaaattttttcgcgtatttttttcggggtactgtattttaaaaaaattttttaaaccggtgggtgtggggggttattttttaccacctttttttcttattatactgtaatttttttaataaatttttttcgtcattatactgtatttttttttattaataaatctttctccattcggcggcgttggctgttggtcagcgaacgaaggggggggggggggtggtgatggtggtgccaacattcatctagaaacaaatttgctgtctcttcgttattccatttttctgcgtatgaataagcggacggatcggcgctttaccggagggggggggggtcaattgacaaaagttttgaataaaattatggatgacaaaaggcggcaatggccgacacaaagatggaaattgtaaaaaagggacgcttgagggggggggggggcggaatggccagaggggatggactgatcatcttcatctgctttcattattaacgatccgacgacgatcatttctccantagcatttttgtg

SEQ ID NO: 23665 - DNA, 1043 bp, Heterodera glycines
aggaaaacaaaaggactactcgagataatgtatacctttctagatttaagaatgttaaaagtgggacattacttaatttgtcactctgtatttttgacaaaacgaatttttattttaccaattaaaataaattttttttttctcaaaatccattttgtcagctgcaacacgtcaaattcgattgtgctcgcagttttggcttgtcgttggccagccaattccgttggctccaaactttccatgtgatcggtcttttccttgctcggctaagtgccatttttgtcgaaatgccatcgctcattttgtactcacttcctactcttatggtatttttacatctaaaatttttaaattaaatttatttttagttagcaaatttggcaattttctttggccaggctctgttcagttttgttccgcacattttgctcgtttttgcaattattttcttcgaaggaatgctcttcggctcgggctacaccttttttggcaaaatccatagaaaggtcatttttattaattttatttgtgaaagtccgctttagcacaaactgtgggcgtaagagtattttctagagatcgacttggacctgtatataggcccggatttttcctggatccaactccaggtccaggctattttttaggcaacctggattttgttggacctgtgtttttctggattttgtccaggaatccaggtcaaatatgaaaataatgaccaaatatgaaaaacttggatttcctgaacaaaattttagaatttattatttcaagtgatcgatgttttttcaagttttcaaaaaatgattatttagatataaaaacagattttcttttaaaattataaatttttggaggttcctaagaaattaattcattttttcaaacattgttttgcttttaaacaaatttcaaaaatacaggtccagccaggcctggatccaggtcagaggagcctggatttttcaggacctgggtttcctggatttttatcaggaaatccagtccaacatgaatccaggcccagcttttttcaaagg

SEQ ID NO: 23666 - DNA, 1750 bp, Heterodera glycines
  unsure (1)..(1750): unsure at all n locations
agcttttgagggaaatttatggtgtggnccggcttgaaccggcatctcaggcttccgggaccaatgttttaccagctgaactatcgaacataccctcaacagctcccaattttctcaaatataaggaattgttgccatgaattgatccattaatcttcctctcgagttagcttttgcttctctatcccgtgtgcacctcaaaacttcagcggacaaatttttgggtcatatttttttcattgtcaaccaaattaagcatcatttttttgttctctatctctatgtctctaccatttagtaaaaaattttcagaaaattaaattggcgaagaaagactcttgcagctttttcctggtttggacctgttttccgtgttttgcattgaccgattgatcatttttggcttggacctcttctccttgttgttgcgcattgtccggttgatcttctttggcttaataaatttaataattagctctggtaaatgttcattttttaaattaccatggaataattcgctgagttctatggagagacggatcactctggggtcaacctcgaggttcttcttctcattgttaccgctccaaatgaaaacatattttggaggagctgaaatttaaatttaaaactttggggtctgtttttcggattgatattattttaacatataaatgtaaaacttagttttgtgcgaatcaaatcaaaatcaggtaaaaaacactaattttcttcgtttacttttttatagcaaatttggaagttgaaatgatcgaatttttcattaaattttatttcaaaaaacttttctctaaaaaagcatcaatcttaagtcgaaatatcaaaaaaatttttattaaaaaaacattcactttatgtgtaattaatgagaagatttaatttaaattagggttgctcccctaccccgagctccccggtccccgaccccgatccccgacatttttgggcctattccccgccccgacacccgacatgtcgccccccgaggtccccggcccccgacattttgccccccgactccccgacactaattcggggaattggggactccgagcgttgtaaaaattaaaaaagttaattcaacaacgaaggggggaaaggttgaaaatttatgaaattttgaacaattttcttaatattaattaattaaaaattccgaaaaacttttcggcggcgcctaccggcaccgccggccccccccaaaattcaattttttttttttttgtaaaaaatgtcccaaaatttcaaaaattggtatttttaggaaaaatctgttaacaaatttcaaattttcaaaaaaaaattttcctcgcggctcctaacaccgtcgccctcatcacccctttgttccccaaaagtttttctgaaaaagagcgccgcaaaaaatggtggtcaaattcgatgttgagacgggttcgcaaaaatttctgtttaaccccactcctttctacgtatttttaaaccagggcttccatcgaaaatttttcaaaatataaacaccaagtccaaaataagattttagtgtcaaaaatatgaacatttttctatcagttatttttccaatttattcgatcaaattttatatttttagtcttctattatcaattttgatattttggagaggaaaatgcaaaattataaatttcagtaaattcgggatcaaaagatcaaaaaaattttgcggcagaccttaaaatttcttgaaaaattgtgacattatctcttactg

SEQ ID NO: 23667 - DNA, 1938 bp, Heterodera glycines
  unsure (1)..(1938): unsure at all n locations
ttttacttgcacttatttgttattgaaattcgaaaaaatttattattattttaatgctcaaattaccgtgcacaaccaaaatgagatcagagaaacttggcattccgtccagcgcatttgcctcctctttgaaaccacggcgcaatggcgtgttgccctccgcgcgggtcacccaacgcaacactgtcaagggggaggggaggggcataaattaaaaaaaaaattaataattgatagtgaaaagattgactaattacattccaaaaaaccaatggaaactgggcaaatcgaaatgtctaaaaccaaaaaacggggcgccccagaatttaaaaaaaattgaagggggggggggggacgagctgctcccaattatttgatggcttaaatgtgtcccacaaattctattttctttttacaaagttatgtttccttacctctcatattccccagtttctcccaaaattcgggtccacgatataacttcccccccgccccccctttgcattacctcgacctttccgtccagcaatgaaaacgtccacaaccgaattccacttgacctccttgtcattccatctcaatgtggttaaaacttaaaaaataatatttagcaaaggtaatttaaaaaaaactttcccaaatttgattttttggcatcccaaataccttaaaaatactaataatactggaaaaacgtacattattgggggggggggggtttgctaattatcccatagttttgcatgtgcctggctttttgctcgactcagcgtcgctgaacactggcgtttccgggatgacgttgtcccgaaaacttttcaaatgatgcgcctcaatttcgtcggcaaaatcggcacggattggttgaaaggagtcggcataaaaccatgaaccacgctggatctgcacttttaaaatcaaattaatgaatgacaagtctcggtggaatttttttttaaatatttttcgtcttgcccccccccttcttccactacaataagcacttaaaaatttaattcaaatggagaggaaagaagcaaagcaaaatttagggaacagttctcgcctccgcccaatttttaaaaaattttcaaacagaatttaaaaaacaaaaaattttttttttgatatttttaaagagaaaaatttactatataaaactttccaaaatatgatctatttaatgcatttccgggttatattttgaaaaattaagggatttgtatcgttcggtggtggcgaaaggcattggcgggttgaacgtattaattaaaaaaatacaaattttcaaaaatttctttttgcaagacaaaccttgagtgcatcttcgccccaatagatggcactcactgactccatctgttcatcggcacaataattgccgtccaatacaatcacagaattctgcgggatggccattttttccacatgcgcttttgccgcttcgtccaatggcatgccaacttttcttcgataggcaatctccaacacagtcgaatcgaaacctggaaatttggttagaaaagcgcagttttgcggggcagcaagtcgtccattcacaaatttccttagctaatttcatttaaaaattccaaaattttcaccccgaatatcgaaaaccgccgaaaccccccccccccccccccctcccactgttcctcaaaaaatttggactttcntttgcctntctttccccgagccccccccctgtctctcttgggctgaagcttcccttgcccccctatggtaattttcgattttggcctggatttgaattttttttaaaaacaaaacagagcggcgcataaattggaaaaaactaccccgcctaaaatttttttgtggcataaatgaacctaatttgagctaaggatcctttaaaatggataatggaacaaatattttgggcaattctcgcgcggtcttttaaaaaaaaaa

SEQ ID NO: 23668 - DNA, 1358 bp, Heterodera glycines
  unsure (1)..(1358): unsure at all n locations
ttcttcgtaaaggttgaaatcaacaaaatgatctaaacagtcttaaaatcctattttaatattcaaaaattaattttaatatctcttctttaccgatttttttgtggtacattttcgaaaaatttaaaaatgttcaccaaaaattcttttaaaagatttagaaagaaggggggggggaagcttgggcaccagaaatttgggcaccgggaagtttgagcaccaaattaaggatttaaaaaataaaaattattttaattgtctataaattgcaactatctaatttaaaacaatagtaaatttaataaagttaggaatagaaagttttcttaacgaatattcactcgattaagcatgcttgtttgctaaactcattaccattaattttatatcaatgccaacacatgtattatttacaatttataacattacaaggttcggtctgttcaagacttaattttatgagtttaaattgaattagacgggtctcttgttatttcgggccaactaagccggtattcaggcctaagtccaaacagaaactagaacacgttttctacgtttaaacaaccgtaaaaatgactaaataataagattgccagtttccatacataaattttgtcgccggaaagaatgctaaaaagtcaaaaattttaccaatatgtataaatcccgaaatacttaaattatgtataaaactccgacatggtaacgagaaggccgtaaaacaaaattaaaagtgcctccctaaactacaatgtgccgatatccagttttaggcattaaaaacctggactttttggacaatttttttttgtctttttatgccgaaacgtatttaaaacgggtataaatctaacaaatttcccaaccggcgcttaaaaagtccttatatcataaaattggttttaaatcgcaaaattttatctttttttcaacaaaagtgtaaacaaagcgcattaaaaattacagaaaatttactgcgcctaaaaataattaaattacaagattttgtcaaaagtatcagccaaataattcagcgaaaattcaatttcccctcaacatatgattaatatttttatctcaaattgcttcttccatttaaaaatactctcccgacaaatttttagaaattccgcaatttaatcttcaattcttttttgctttatttgccaatatgttttcattttctccattttttctttctccgttaatctttctcctccattcattccaaattgtttcttccattttcgaattgttccataacttactccaattttcttgccaatttcggtataattttggtgccattcttttgccgaantattttcttcctttttgcttatattcatttttca

SEQ ID NO: 23669 - DNA, 1977 bp, Heterodera glycines
  unsure (1)..(1977): unsure at all n locations
tgttattttcttgtatttctaaatcccagagacattgcgctttcgtttgttaccaagaattttttttaattttaatcattttctcaacaaaaagcactaaaatttcaaaaatgtttcacgtcggcgcctatcggcaccgccgggtcaccattttagcatattttttttgaaatttggacataaaaatgacaaaataaaaaccgctagaaatgtctgtttttgctctacggcgctgaaatttttaaaataacactggacaagtaagaaaaaattatgtgccaagaaacttaggatggccactgattggacgcgtaattagaattgagccgaaatttgttaattttatatcaattagtgcactataattaattatcctcatagaaaattttcctttaatttgaaataatcaatttcaaagtgcaccccaaaatgcgcgccttcgtctcccactgcggtttgaacagtgtcagtgaggcaatccaatttggagtgccaattttggccattccgctgcttggcgaccaactgtacaatgccattatggcacgtgtaaaaggcattgccgtccaattggacattggccaactcaacggggagggggccgaacagctgctggtcgatggaattgacaaggctaattagcaccagctaattatgtctttaataagtttaattgctttgcaggtactaaacgacccttcttatagccaaaatgtcaaattattgaaacgaaagttcgcttcggccccttttggggccaaggaaaaggtgatccgataggtggaattcgcagccgaattccccgatctgaacgagttgaatttgccgtgggaagaagagctcggcacattggcctattattctgtggacatcattctgtccattgctgcaatgttgggaatatttgcttggattcttttcaaattggcaaaatttttggcaagaaaatatttgatttctgtcggaaagggagggcaaaagatgaaaatgaattaattgattattttgataaaatttttgtttttatttgttatgttcttttttgaaattaaaaaaataaaatgcaaatgcaaaaaaaatacttgctttttaacaggaaaattaattaattaattatgtgtctaagtagcaaaggataaaagaaagtaaatgaataatgatcagaaaaaacaagttagaaaaggttgtattttccaaaaaatgatataagatttgcagatttgtgatcaacagggatgccaaaaatatgcacgaaaagtagacaaaatatgcgcataaatatgcaaataaaatcatgaaatatgcacaaaatcgcaaaatnatgcaccaaatatgcacaaaaaacttaaaaattaggggtgcaaattaattaaaaaaaatttttttttctcatagagtttatcggttgtttttgcaattacagatcacagatcaaaaatttctcgatttacggcagtgaggcttcctgtttacccactcgcacatccattcagatttggatttaattttaggcataataaaaattttttcctaagagatattaaaatcggaaaatatttgacgaaaaatggcaaaatatgcaaaaatctgaaaatatgcacaaaaaatggcaaaatatgcatgaaatatgcataaaaacccaaaatatgcaaataaaagtcccgatttttatacgcaaacacaaaaaagaaagtgtttttcctactatttagagcatggagaagccaggaaaaaaaatatgcatttgcatatttttggcatccctggtgatcaatataaaagttttttttcgtttttgtccaaaatagtattatgagaatggctttagttttcgattttgagtttatgaggcatcggcaatatatttgatcttcgaccatcgccgagtctttttcaaaagcgtattcgaatctatctatccgtccgacaagaataatgaagcgcctctttttgacttaacctcaataaattcaataa

SEQ ID NO: 23670 - DNA, 1626 bp, Heterodera glycines
ttgtctaagtgttcgttcattcatccgttattatttcccccctcagtcagtgctttttcgttctgccaatgtgcccttctgagtttgtgcctttggcatgacttcgacgcttcgcggtttctgcctttcccccgctgatcagcagacgaatcttttctcattttgcagtgaaatggcgacgaacgcatcacagaaaaggaaggagatctatcggtggcatttgacaagcaaatgaatgcctaatttcgtcaatttaaaactgtttaaggtataaagcgtcgttcaatgtttatgcgatgggatggtcaaccaaattggacaagtgaacactcttttcgcttttattttgttttttcattggtttagtcacctcaaatttcgcttggccatcggcagtttcatcgaggaatacaacaacaaagtgtccattgtgcagctgcacgaggaccaaggcgaatttggccatctcggcactttcgaccatccgttcgttcccttccctttccttttatttcttccgtttagttacccctcgacaaaggtaagaactgacaatgagtaggctctatccgtgaagttcctccccatttgtcatcattttctcttttcggtgctgtggatccccgatccaaagtcggcttttcctgatttattagcgaccaccggcgattatttgcgcatttggcgaatcggcggtcacaacggcgcttcgttggaagttcggctggacaatgtttgttagggagttacaaataatcgaaaattgctgaaaatgcctcacagaaccgttcgtctgagtattgcgcgcctctcacttcggccgattggaacgaagtggacgtgtcactgattggaacgtcgagcattgacacgacgtgcaccatttggcagatagaggcatggaaaagggaatttgtagcaaatttaaatgccaaattaaagacagggcaagcagtggcgaacacggaacacgcaatcggagggaatgtgaaggtaacaaacgaacgcaccattgggggagacgaatgaatgtattattctttcttcgcctaacagacccaactcatcgcacatgacaaggaagtgtacgacatcgaagtgagaggggacagagacgacacccctccccaccagggatggcacggaattccgaaaaaattttggacgtcggaatgccatcctttctccccaccacccccaattgtgccttccctttcttagttctctaaactgtcctcgggacgcgacattttcgcatcagccggtgaataatgaaaaagaaacaatccgttaaaatgcaaattgacaggcgctgacggaagcattcgaatgttcggtttgtgttgcgaaaggcgcagcaacaattaattcgcttcttcagatctccgccacatggaatactcaacaattgttttcgaagaaccctccaaaaagcctttgctcagattaggtgggccaaataagaaaaggaagggaataattttaggttttagcatggaacaagcaggaccacaattacttggcaacattcgcccaaaattccaacgaagtctgttttttgttttttatacggtccgaactggactcaatgcttttcagatttacattctcgacattcggatcccg

SEQ ID NO: 23671 - DNA, 2017 bp, Heterodera glycines
tttttctttagcacttgattaaatttttttcttggcatttatcggcactttttggacattttgccctcccataatttttcagattcacgaaggtaataagacggacataaagcatttgccatggactgtgtgtttagaggacattaaatcttataatgccacagcaaatattcacgagttatccttttgatagcatattatttaatcgacgttttcgaaattatattgggtaaaaattttaaaaaattaaaatggaagatttaaaatttaagtacattaaattcacagtaaaaattgcttataactatgctctaaagcagccgagtttttaattcttgatatcattcgatagcaagtgttctctatttgcttgcacaatttcaaaaattagttaatattcaaaaaagttatgacgaaaattttcaaaaaagaaggaaatttttttgaaattttgcagactgatagagaagaagagttagtgctatcaaatgtcagtcattaaaaacaaaactattattctaaatgctgaacatcagctgtactaaaatccgattcccgagatttttgggcatcagatttccgatttcctttttgaaaatttttggggcctcaaatgctttccctgctgatgaaaagtagagcaagacttatgtgtcttgggttcttctccatcccgaacaaaaggaaaagaaaattcagggggcgactcagaatttttcctaaagataaaaatagcactctcaccgaatttgagtgtaacaggcgacattcacacatccccgatcttaaggaccaattttactttaatcacttaaaataccagtagtgaaattagtttcttacaaatgtaaaaataagatgttaggcctaaaagaccaaaaacaaagttttatttagttttcagtcccattccatattttcagaaatttttaaaaatttctttacgaaattttttttattttttcccgaaattgtccgcaaatgtccgtccgcaaatgtcccactgcggattttacgcatttttaattgaaacagcgcagacgatttttcacttgattatcgtctaatccagacaatcttggtatcaaacgaaagctcttaacatgctctattagccttaccaaatcgaaaggattttcaagcctagaaaaaattttattaagaaaaaacttcaaaaatttcgactttttgcaattttcagtgtataacttttttggtaattgtctaatcgtgaagcagtagcttagaaaaagcttctaaacatgttaagctttcgaatgatatcaaaaatgctggatttggatgacattgaaaaaagttatacaaagctttcgtggaaaaacatgttggcgcccaaacgagcgcgcccaaacgcagtggacccggttagaataaacctcaaatttaggggtataaaactgtaaaatgacaaatttttattttaattacaaaactaaaaggcctaggccttataattagggcataaaattatatggatccatatttttttcctggactctgggaggcctgaaacgcacgaaaaacatgtttttagcttggcttgaagcttctaggatggatttctatatccatatttttccatatttcgatatttcaaaaataagcaaaaaagcgaaaatttcgcttttcatcttgatctttcgctaaaatgagtaaattttagctgttcaaggatttttttgctacttcacctacttcccatggacgaatcgagctgaaaacaaaagccgcagagacatgcggttttttgcattatgtaacaaattgtcctctttctgttagaaataaggacacttgggagccctgtctaaatgtgatcatagaaactcacatacttgcaaaaattttgagcttaggggtcgacaaaaccaaagggaggaaccttttggtcgcaattttttttaaatacctaatgcggcgctacttgcaaagcggtcctttttgaaatttttttacactttttttggtcaaatttttttttatataatgatgatat

SEQ ID NO: 23672 - DNA, 943 bp, Heterodera glycines
aaaccccttttcctttgttaaatatggaaactgataatcggtatttatctttctcttcattacaaacattttttaagtcttttttgtaaaatataaaggggttttgaattcaatcactaattagtagggattcgttttttaggcataaaaattgcaaaaaggcacctaaacagaaataatcgtaaaataggcattaaaaagcacaaaaatcctcgattaggcacaaaaataggcaaaaagcatattttaaagggtttttgtcagtaaaacatgcaaaaaacgtaatcaaaaaatggatttttatcaagaaaaaaaatcaaattttacagatcaattttttgaaacttttttcaattcttaggtgtatgtatataaatcctgaaagaggcgccaaaatggcgaaatatgcataaaataataggtgtttatgcaaaactttattctaaaaaaaattcaataaaatatctttttttgtgaaaagagggccggcggcgccggtaagctcagccgggaaaattttttaaattaaagtgagtgttatgtgttaaaagattttcactaaatatgaccaatttttgagattttgagctcagccaatttttatgaaaaaataagtctgcaccgtcgtgggaaaattggaaattttggccattttaaacgattttcactgaaaaattgcatttaggtcaattttgcgctttgaaaataatcatttcaaaaagaaaaaatcatcattgaccccttgaaatcagcaaaatgatgataaatcaccagagttggctaccctggcaataacagtgaaattttaaaccctccttttttcatttgatgtgcgaaaagaaaatgtagacaaagcctggttaatttagtttaaattttttcgagattttataggaatttagagccggctgtagagttgtttattggaaagcgagaagaaatt

SEQ ID NO: 23673 - DNA, 1559 bp, Heterodera glycines
tagcaattttttgaatatatcacagaatgtatgtggatttgaattcatatatattttgttagtctaagaacacaggcataactgtcagttttatttgcaaaaaatattcatttgagaatatgtatggtctgtttgtgtttgtgtgccatttgaatgacggactgccgacctctcatttttttttgtttgtgagaatgaatgaataaatgcgtgagaaaacccactgtttatatccccagcatttgcatcaactcaattctttcatttattaacacggcgattcaatttttggctcccagtgcaaataagtttattatttatttaagaatcagaacgccaaaactttgcaaaacttaaaatttattggggattttcccttgtaaaaatgcaagagccgatctcgagttagaaaagaaactttcaaaaaacaaaagagaattcgatagatggggtcaaaatatgggcctatgaaaatttcaagaaaatcgcaactttggaaaaatttttacgactgggcaaagttttttctttttctctcattttgacgcactatttccatgtctctaacatataaaataacacatggttcatttttttgccaataaacaattttttaaacttttgactaattaagaaatattcttcagaattttcccttcaaaatgagcacaaaatggttttgtttggtctattattggccaagttataagctaaaaaaatttcataaaatcaagggtaaaatatagtgtgtaccttttactgtttgcatttgttcttttggcgttctgtatttattattattttatttatttgctttaaaaaattgaaatttatacacaaacacaaggaggaattgaacttgagaccccctttttgttgactaactcacagaccactaagacgaaaaatccagcatatttgtacttggagcccaaaattgggccgctgtgtttatgattgtctaaataaaatttggtctttaataaatgtttaaaaattttcattcatttgttaccacattttaaatatttttaaaaatattcgactcaaggttggtacaaattacttttgttcaacgctgagttattgaaaatgatctttacgaattaacttttcagaaaaattcaatcacagtacggtttatgaaagatggtgcaattattttgcaaatagttggtctggctttatataaattgagttaaattgttcagcattcacttagaaaaagattctatttttcaaaaactttagatatcaaatttgctcagtttagttgggagtgaagggagttatgctgatcaaagtaaatagtgcaaacaagagaagctgcgggaagaaccttaataaaccagaaaatgttttctgtgtaactgtttaattagcatgaaatttttaaaccaaatgaaatttgacatatttttaaactttagatgatcgtgataaatgatgcagcgcaatgttctttttcagcttcaaatttacccagtatttctgagtcaaaaaatctaaaggcccgtgcgaaaaatggggcgaaacaaacaataagcagttttactgag

SEQ ID NO: 23674 - DNA, 2647 bp, Heterodera glycines
  unsure (1)..(2647): unsure at all n locations
aaagtactatctcaaatagctaaaacatttgatccatgtgggatgaatctccaaattattttagctgctaaactttatcgtcaagaatcgataaatggaaaaaacntaaaatgggacagtaagttatccgattcagaagaacaaaaatggaaagaactaatgcttacatgggaaaataaagagatcaaatatccacggaaattatttcaaaataatctttcagaacataccaaatttcaattacacgcttttactgatgcatgttcaaaagcctttggcgcagccatttatcatcgaattgaaaatgaccatcaaatttattagtggtgcctgctaatatgccaaaaggcaaaaggacaattccaaatttagaattacatgcaacaatgctatgtgggaaatacataaattttgtgaaaatcgaattcgaaaaggaaattaagattcaaaattgcactatttggtctgattcaaccgacgttcttgattttgtaagaagtgaacgcaaatttgacaaattcattagaaaagggtacaaaatataaaaaagtggcatttaaaacatataaatggtaaaaataacccagctgatttggcgtcaagaggaacatcagtggaagaactacaaaatagtgaaatatggtggaaaggccctaattttctttcagaaagggaaaactcttggcccaaaacaatacgagaatatgacccaacgaatccaccagaaataaaggaaaaacaaaatgttatttttgagataaattcagctattaaggaaaaggatttttgtgaatttgaaaaacatttcaaaagattttcaaaatgggaccgtttaaaaaattcaattgcttacgcactccgggcctttaaaaaggaaaaccaaaagaaggtttcccaaaatatggaaaaaatttcggatatcaaaaataaaaaaaatggaaatgagataacaaaaggaattattaaattaatcaggcctttagaggctaaagaaatccctaaagctgaaaagctgatttttaaattaatccaaacaaattcgtctccaaccaaatctatattaagaaatttggatttgttcaaagatgaggatgatttatggcgcacaaaaggaagaattttaaaaagtggtttaaattataacactattaatccaattttcattccaaataattcatatattgcgactttattgatcagagatgctcatatgaagacaatgcatggcggtcgcgaattggtgaatagcaaattgagagaaaatttggattcctaaagcagaaggaaaatttatgaaatattaaaaagaaaaaacaaagaaaaatgcggaatttgtgcaaaatttgcaaataataaatatacatatcctaaaaaccctcctctaccagtgtttagagtaaaagggaaaagtgcatttgaacatgttggaattgattattttggacccctctccgtaaaaactttggatggcaataaaaaatgttggggagcaatatttacatgtttaattgtaagagcaattcatttggagttagtttccgacataagtgccgaaaaatttcttttagcatttcggcgattcattaaaagaagaagagtgccgaaattaattatttccgataatggtacaaattttgtattagcaaataaagcactaaaacaaatagtactcgaagaaaatatacaaaataaattatggtcagaaatttatcgtgatccgacggtacaaaatttttcatcaaatttgggaattgattggcaatttaattcgccatatgcgaattggcgcgggggagcttacgagagaatgataggacttgtcaagacacatttaattcggagtttaggaaaacaattattgagctttgaagaattaatgacatatttaatcgaagtcgagaggattgtaaacgaacgccctttaagctatataacccaagatgaagtgattgaaccattaaggccaatcgatatattaaatccgacagatggagaacctttctcactaaaattggatccaacatttgatcggaaagacgtgaatgaatattttgaaaagaaaactaaaagagaagaattatttgaaatttacaaaaaagcaatttttaaaagcgaaattttttggaaggaatggagtgaaaaatacctattatcgttaagagaaaagcacatcaataaaaataaagaaggaaataaatacccaaaaatcggacaagtagtaattgtgagagaccaggataattatccaagatcaatgtggaaattaggaaaaattttcgaaattctttctgataggactgttaaattaaaaataggaaaccgaatggcggaaagacccacaaaattattatatcctttagaaatagaggatgaaggcgaagaataactatgattttatataatttaattaaatatatatatatattaataaaattcaaatttatttattgatttatttagactatataaaaatgttgatattttaattttaaataataagattttttctcatttatcatatcattattttgacagaatgagcgacaaccaaagcagtgatgatgaactgatgtattcggcggatgagaatttcaagatgaaagtctcggttcaaagcagaaaaaattatggacaaaattccggaagt

SEQ ID NO: 23675 - DNA, 2212 bp, Heterodera glycines
  unsure (1)..(2212): unsure at all n locations
tcccaaaccagatgataattaatccaatttttcattgtctttcagatcaattttgcgccactgctgatgggtggcccataaagataaagtcatccgttcccntggtcattactcattacatttctttttttatggaaaaataattctgtgaatgttttttttgtcccactgctgattgatgataatgaataatcaaaacattcgtccattaattcattcattccatacgagcagctattaaatcatccgacgaccaccaccgccgcaaaccatcccattttacacaattaaattaacaattttattatttattttcatcttgtattgaacataagcattaccattttcataaaataataaatgaattaaattaaataaataataattctgccttaatcccttatataccgtgccgtaatcattcatttcccgctttctcagcggcttgtcctccgcatcgtccgccgtgttgttgtcctcctcttcccactccgtttcgccgtgttcttcttcctcctttgtttcttttgcttgtcggccccggtgacgccgtcgaagcctgccgtggaccaaattatcgtgttggttttcacttttttttttcttttttcattttttccgagtccttcgtcctaccgtaatccttaccctaccgtaattaaattaactccaattttctgccctaatctattttgtgccctaatcattcatttccccctttctcggcgggctgtcctcctcgtcttccgccgtgttgttgttctcctcttcctcctccgtttcgccatgtccttcttcatcctgactgtccgtggaggcgttgtgcgcggagggcgcggggcgttcattttcattggtgctcttgcagtggcagccgtcctgcagggggcaaatgctgaccagcaggctgccgacagcatacaaattaatgtaggtatattcaaaaatataattctgtttttattgtattttttgcttttttcgtccactttttacttttatttttttgcctttcattataggggtgggacggcggcgttttttccgtggttcgcgaacgcggcaatttgaatccgtgactgtgggattttttttttttgcgcggcgttccgtggatattctgtgacaaattttctgtttgaagtcgattgtcttctctgaatacttatatatgctctctctctccctccgctcctctctctctctcgctctctctcccccccgctcctctctctctctcgctctctctccccccccgctcctctctctctctactaagaaggggcggcagagagagagagagagagggaaaatgaatacccctttcatagcaaagtacgaaaggaccattcgttgtcatcactcacatggtgagtcgggtgattaatgcatttcaaaaaatcacaaaaattgctatgtttttcaaccaaaaaatatattcgtgcaagaaatgttgaaattttttatatgttcgatagccgttgtgtcctttatttctctctataaaattttgttgaatctcattaaaattgatattaaaaaattatttttgctatatttatttaaaaattctgacgaaatgaaattttgcaaaaaacttttcaccaaatctttgagaaatgaattcaaaactttgttcaacgaataattattgtaaaaaattagaaacccattaattatgacgaaaaatttttcatacattaatatcccaattagtgatcataatctcataattattcaattataaaaaaagcatgtttttcaaaaatatttaacaaatgctaaaaatttgaaaatgttggcacacaaatgtaagtaatgccaaatcaataaaacaccggatggaatatatatatatatatatatatatatatgtgtgtacacgctttcatcaattaataatcatcagaaaaataatgttcttcccactcgatctttcaattttggccttactggatgtccatttttaactgcgttcgcttcgtttttgaatcgtttaatgatttccttaattggaaatttcaaaaaattaaatttactcattttattggcaatccaaaaattttttaaattttttctgggtttttttttaaattaaatttttacatcattctgatgaggcccacaagcgaatttcccatccaaatagatcaagttgaatggttgacaacatgacggcaatggatatcgacaaactccgatgttgcatggt

SEQ ID NO: 23676 - DNA, 1145 bp, Heterodera glycines
aattggtccgtttgacaccgaatttattgtcattgcgcaaaaaacgtaaaatggcacggcaaaagttggcacaatcgttccgaattcgtttgttcagcagcaaatacaccacgggagggcaaccttttgcaaaaattatttttattttttaaaataaatatgctaaccactcgaaaaaacccatgcgtaagtgccaacgatgatgtaaattttgctgattctgacaaattgcattgagatgtaaattacggaggcaattgaattgaacaaacttatgataatcacttggataaaaatctgaatatttataataaatgattgaaaagataattagctttttcaaaaattttgcatttttgcttaaacaaaaaacctcattatagtcattaaaatatatttgtttattgccattttttctgcccaagatgactgatgtgtttggtggcctgatgacattgtgtaggtttgccaacaaagaattacaggaaacaacaaataaatgctggatagaccaataataacgatgtaattatgtgcagaagctatcgtgttggagtactgtaattgttaaaatttattaattacataattaatttttcttacaatttctccaaaatcgtccgtatagccaacatatgggttataaaaccacgacaaataaacaccactaaacagaacgggttttgtgaacatggctattgcaaagccataacaaattggcagcgcaaataaataccgtaatttattgccttaaaaatattctttattattaattaattattctaatcgtctaataaaaatattgataaaaatttgaccactaaaaatggcaaatgccaactctggtcttaataattccatgcatctgttaattgccagcaacatttcgacacttgtttcggcataccacaaagctgaattaaaaaaatatataataaaattagaaataataaaaattacatacctgctcccaatgctccggttgtataaatcagcaatggatagtcacaataaacggcaccaataatgccaagaattcccgtttccaacgcattcatgaacaaggccgactatggaaatttaattaaaaaatacaaatacataattaataaaatatgagaattcatgaagcagacaaagcaatt

SEQ ID NO: 23677 - DNA, 1558 bp, Heterodera glycines
catttcaatcactgggactcaactcaacagcatttcaatcactgggactcaactcaacagcattccaatcactgggactcaattctcctgcatttcaatcactgggactcaattctcctgcatttcaatcactgggactcaacccaacagcattccaatcactgggactcaacccaacagcattccaatcactgggactcaattctcctgcatttcaatcactgggactcaattctcctgcatttcaatcactgggactcaacccaccaacattccaatcactgggactcaattctcctgcatttcaatcactgggactcaattctcctgcatttcaatcactgggactcaattctcctgcatttcaatcactgggactcaattctcctgcatttcaatcactgggactcaacccaacagcattccaatcactgggactcaacccaacagcattccaatcactgggactcaattctcctgcatttcaatcactgggactcaattctcctgcatttcaatcactgggactcaacccaccaacattccaatcactgggactcaattctcctgcatttcaatcactgggactcaattctcctgcatttcaatcactgggactcaacccaccaacattccaatcactgggactcaattctcctgcattccaatcactgggactcaacccataaattcaaattaaaactgacctgtttaaaactttccacctaaatttgatcccgcaagtggcacgtcaatatcccaattgcatataaatattccactcgaacacaggcaaaacatgagttgtagcatttatattgctttttctatccatcaaaggatttttctttcattttttattactatcataacatgctttttattcaaaacaaatatcaaaaaccaaatcagattcttttcatattataagcaaggaaaagtacaaaaaacgtttttaagtaacaaacctttttcattcaagcgaattataatgcatttttttaatcaaacaattctccattatcgtttacataagcaaaacaaaagctttcatatcaaaatcacatcaattaacaaaaaaaaaatttagacaaaaaaataatgataaacacaaattttttcttacacacaaaaacagaaccttcatataccggattttccactcaaacaaacacaaaaatgtgctcattattttattaattattttatataataaaagatgggttataaataaggaagggatgcgagacaaatttcccattatctctccctttcctttcttttactctcttttcttttccattgcaatttactctctttttttcccactccctccttctcccacacacacgcacgcgtccaacagactgctgctgcacagcagcacgcgtctgttcactgtatgcccatcacacccgccgctgcccgcgtagacagacaatcagacagtgcactattttcccaccttttcctcgctctacttttttcaaatcatttttaacgcaaaactcaaacaaaacgccacacaaattcaaacactggacacacacatacacac

SEQ ID NO: 23678 - DNA, 1945 bp, Heterodera glycines
  unsure (1)..(1945): unsure at all n locations
tttacatttactaccaaaaaaatnagtggcgcaattaatcatttaatgttaatcatttttcgccgacgccaacgcctttttttcctccaaaatttttacaaaaccaaaaaatttcgtcgtcattccccggcaggcgtcgtaggaatgggaaaaaaataaataaaaatcatgaaattttaaatttaaacattccgtgtcctcctctgctgttgtgcgagtgccccccccccgctccccctcctgctggtcctcgtaaaaaatttgaaattttaggggttccattgttcgctgtcctccgccggtcactgatgcttgggactcccatttccatatattttctgccatttcactccatttaaattcatttaaatttatttttaatggtgggctaatccaaatcctgacgccatcccccccgcccgcccccgagtcggccttcgaacttacaggtcgggcgcaaaaccgagcacaaaaaaatctataaattacggaattcagataattgacttttttgaccaacattgaacgctatattagcataaatttgatttttttgcactataagaaagtttatgtcatcaaattattttgaggctataattttgttacagcaaattggaggaattttcagataaaatttcttttttttcatataaactttcaattttttattgggtgcttcttagtatttgtgggaaacatgtattatgaaacaattttctgcccgattgatcaatgcgaagtatgagaatatcaaaaaaatgttgaagccaagccctaattttgttacagtctgtatatcttattccatattgatgttatgtatatgtacataagtagggaacggatttctaagtttttgcttattttttctgcggctttaattcgacgagaaatgcacgaaaaacacattttttgttcgaaaattttgtgttttaacgcacttattcgaacttagaaatgcttattttggcgtttcgtgcttaaaaatgcttattttagaggttcgcccttaaaataagtttttgtacttattttagcgttttatgcttattttcgttcttatttcgcgatttttgggaaatttattaacaaaaatgcaataaaaatgataaatacacccctaagaatcggccaaaaaaatttcggaaaaatacacccctgagaattgacctaaaaattttcaagaatacactcctaagaatccacccaaaaaatttcgtaaaaatacgcccctgagaatcgacccttaaatcctgaaaatttctaaatgtacttcatttctaactgcaatcagtaaataaaattgtttgacttaattttaactaatttacatagagaaaacagcaattttaacaaatttcacctctacatttggaattttttcatgcttattttcgcacttatttcgcgcttttttcgcccttatttaagcacttattttggactttttcgcgcttaaaaatccgttccctatacataagtgagctaatgaaaattcttggaaaatataatttgaattgattatttgcaacattatgccaaaaaaaggagaattgcaaaaaaatagaaacgatgagatagtgcatgtctttttttctctccacagttacttaaattgactgaccattgtgcaacgtcattcatcattcattcattgctcattcaccacttcttgttcacttactcgcacacgcaattgaaatcaatatgaatgaagcattaagcaatgcaagcattatgtatgtgttagaattgcattacatacatgcataaaacaagtcattaaattgcctatttcgtcatcaactttttatcctgaatttcgttgaaatcatttttgttggattaatttcttttccccgctcatttctaaaaaacgttttatgtgtaatgcaccanaaaggttttttgagtcctaatcaactaacctattctcatttaa

SEQ ID NO: 23679 - DNA, 1437 bp, Heterodera glycines
  unsure (1)..(1437): unsure at all n locations
ccaccaacatttccaanntcgccgggactcaatccaccagcatttcaatcactggggactcaatccaccaacattccaatcaacgggactcaaccctccaggatttcaatcactgggactcaatccaccaacattccaatcaacgggactcaaccctccaggatttaaatcactgggactcaatccaccaacattccaatcgccgtgactcaatcctccagcatttcaatcactgggactcaacccaccaacatttcaatcgccgggactcaattcttctgcatttcaatcactgtgactcaacccaccagcatttcaatcactgggactcaacccaccaacattccaatcaacgggactcaatccaccagaatttcaatcactgggactcaatccaccacattcaagtcactgggactcaattctcccgaattcaaatcactgctttcatatcaaaatcaaatcaattaacaaaaacgaaaatttagacaaaaaaataatgatacagcaaaaccacaaattttttcttacacacaaaaactgaaccttcatataccggattttccactcaaacaaacacaaaaatgtgctcattattttattaattattttatataataaaagatgggttataaataaggaagggatgcgagacaaatttcccattatctctccctttcctttcttttactctcttttcttttccattgcaatttactctctttttttcccactccctccttctcccacacacacgcacgcgtccaacagactgctgctgcacagcagcacgcgtctgttcactgtatgcccctctcacccgccgctgcccgcgtagacaaacaaacagacagtgcactattttcccacctttccctcgctctacttttttcaaagcattttttaacgcaaaattcaaacaaaacgccacaccaattcaaaccacggacaaatacatacaaacactcaactttaatatataggatcatagccctcgtcaaagtttaagtcctttattcacaagaatgttatagtaaattaaaaagtaaaattgctattaaagcgtgtatataaaaataaaagaaactactagtgtataaaagataggaattaattcacactctgccgagtcattaagtcgttttccgaactgctttcttccactgttccaattctttgtcccgctgttcgatgttcatatctggacgatactcagttgtttttccctcccttatgcgttgttgcaatttgcacattgtatccacgcttaaaagtgaaacttttgaaatacattaattgttcgactcaaacatttttttacgtctcaatttagtgaacttacaaaacaanacaaaaacgactacagtctanatgcgaaaattttaggttcttcgaaattcactttcgaccaaaatggcaggctttgttcaaacacat

SEQ ID NO: 23680 - DNA, 1396 bp, Heterodera glycines
gcccccgggccatcactcgccacggccatcaccgaacgaacaaccgatcattccccccacattttgtaaggtctgtacatttgcacgtgaatccaattgttgtttaggggggaggggcaacggacgacaaacgatcaccccatcacatcactgtccccccaccactccgctgccatcactgtgatgagtgcaccaaattataaaaggggggccgcgagaggggccaccccaaaacgaaacgaaacgcaaaggaaaagcaaaggaataaataattaattattcactcattccatcgcgaagaagccaagccatcttcaccagcaattgcccctctcatttcattcaattttcagcaattgtgccataattaattattaattggagaacaatgtccgtttccgtcactcaaacgatcactcgaaatcggaaaagtgcggaaaagatttccgagggccaattcctttcaatggaagtggacgaattgcaagagttggaagaaaaggcgaaaaaggtaacacccaccgcttttggcattttggcacaaattaattggcacaatttaagacgcagttcaaaacccaaattgtgtggcgcaacgtgatcctgtacctcattttgcagaccggggcactgatcggagtttaccaattgttcacaagttcaaaatggctcaccgttttttggtgtaagtttttaatttcaacgattattacccaaaactttcgttacgaaatacttttaaatgcttttgtctttccttagctttgccaaatggccaattgtttaggccttttcctttggatggtcagcggagttggcattacagctgggccccaccggctgtggtcccacaaaagttacaaggccaagtggcccctgaaggcgttgctggtggccatgaattgcgtgtccttccaaaatgacatcatcgaatggtctcgggaccaccgatgccaccacaaatggacggacactgacgccgacccgtaagcattggcagcagaaaatgccaaaagcgaccaacaaacactccctcagacacaacatcaaccggggcttcttcttcgcccacatgggctggctgctggtcaaaaagcatccgctggtcaaagagaagggcgcctccctggacatgtccgacctcacctcggatccgttgctgatgttccagagaaagtcagtcgcttctccttgccgttttgatttggcatctcctctttgtttctgttcaggtactacttgcccttggtgggcatcttctgctttttgctgcccactgctatccccgtgtacctttggtctgagtccgtttgggtgtccttttgcacttccgcactgttccgctactgcttgaacaagcacgccacgtggttcatcaactcggccgcgcacactt

SEQ ID NO: 23681 - DNA, 977 bp, Heterodera glycines
aattttgcaaaatgtccttatttggacccaaaaatcttattttttggccttatgttctgattttgaaaattttccgatgagaaccctggaatatagatgtaaaaataaaaaattattatttataatattaaatactttaaaaattaacaaatgaaataaataataaacaaattaaactcgccttttttccgtctccgtcgcccaccaaaaagtgcacatccgcgtactctcccgtgctcagcatcaactttaggaaagcaatccccgctttggacatgataatttcaataaaaattttagtaactaaattttaggctccgattaaaaatgaaaattggggcaaatttatttggaagggcaaaaaataaataatgttgcggcaaactaatgacctaaaaatgaacataaagcagagaaatttgcaaataatgtaaagttttgtttcagggaattgcgaaatataactctctataacttttttctttgtcatccaaatccaacattattggtattatgaaagcttaacatgtttagaagctttttctatgatatcgcttcgcgattagacaattaccaaaaaagttatgcccgaaaattgcaaaaaagttcaaaaattttgaaattttttcttaaaaacatttttaggatggaaatttcatataaatacatttttttttcttggcttctccatgctaatatgaaaaaagttgcttttttgtttttgctaacaaaaattgggattttttattacatattttcgcaatttggcacatcaatataatgtgtgacagtttaagtgatacgtgacgtgctaattgcttttgtttaaatatcatttcatcatttatcacgttatccgtctcttcaattccgtcaacagctgattaatttttaattaattttattcctaatttaataaatccccccccccccccgctgcatggccacccatttagttgatttttaaaatcttttgg

SEQ ID NO: 23682 - DNA, 619 bp, Heterodera glycines
aataaaaattttttaaggtacaacgagaacaaggagacacccttttatttgaatgaagaattgaggaattattgcagaaacgacacggagatattgctgttatcgattattgagtttgggaggatattgatcaacgacattacgaaaggattcgagccgttgccgaggagttgtacgaatgctggggtcgcgatgaatatttttaaagcaatgtttttgttgacggatcatttatctattgtgccggagaagggatatgagcggtgtgatagagcgagtgctatggccattaagtatttggagtggaggagcaagagggatggaactgagatacggcacgcggggaatggaagagaagtcaaaactggaaaatttaaattggatggatttatttcaaatgagggaggtagggacaagtgcattgaggtcatgggatgttacatacacggatgtttgaattgttatgacccggcgcggagctgattggaggaaggaacggcccaggaattgaacgatgaaacgcaggagagattggtggagctgcggaagactttggaggtcgaagaagtttgggtatgtttatttatttcatagaaatttttatctccggttttttagg

SEQ ID NO: 23683 - DNA, 1541 bp, Heterodera glycines
aaaagtcgaaattttgcggggggctttcttaataaaatttttttcagacttgaaaaacttttcgtttttgataaggataatagagcatgttaagagctttagaatgataccaagattgttggatttggatgccaaagaaaaaagcttaagtggaaaaacgagctggcgccgaaacacgagcgccgaaacgcgtggggtcccatttgatttgctgtcgaatcttcaaaaaaatatttttattttaatacataaaaattataaaaatttttcaagacccggttggacccgacacccggaaccctagtttgaataagaaattcatttaaaatccgcttaagtttgacctccaagtcaaaaaggcaggcctgtgcatatgccaaaaaaacattgcgcaatttgaagacgggaacatccaaacacggattgacaaggccagggatattgtactttttggctaattaaaaataattatttaatttaattactataaataaaattcaccggcgtaaagcactgccattgcattgtctccgtccaattcactcaactcttccgtatagatgaagcttaacatcactttgaacgctgctgcttcaacatcggggacctccacgggacaattagcagaggctaattgaaaattaattagtgtaattagtggaggccggttgaaaaatgaagaaagtgaaagagtaaagtaatcaaaaaatgggcaatgaaaaaaggttaattaaaaagaaccaatcaaatcgcaaattgaaacaatgccataaattaattttttattcattaatattttaccaaattccgttttttcgttttttgagtcaaaacggaacattgcctcaaaaacctcggaagctgacctcaaaatgagtttatgtgctggcataagcttaaaaggattgaaataaaaaacacaatcaaaaaacgaccaatttacaaaatctaaaaaattttcacttatttttaattaataaattaatttttaatttgaagactcgcctcttttccatcaccgtcccccaccaaaaaataaacatccgcgtcctcacccgtgctcaacaaattcttcattcgttcaaccaacgatttggacatgataggcaaagtcgaaatcgtagataaatatcggctaaatgcctttgttctacaagataattaatcgtattccatgccaaaaacaatgaataatttaatgtcaaagcccccccccccctcatttctgtttttttttttggaaaattcgaaatcacaaaatggtcaggggaagacaatggcacaaaattgatgcgcattgttttattcatttttaacaaaatgcctatggcagtaaaaattgaatttcaattttttatagaaaatatttttgattaaaataaatttattgaaaaatgacttcctaataaaagattgttcaacttaatattataattatgaaaggattaaacaatttacggcaaaacgatgacctaaaaaggaggaggagaacagaaagaaacaaatgtaatttgaaagaatcaatgggaaattgtataaag

SEQ ID NO: 23684 - DNA, 944 bp, Heterodera glycines
aattgttctggaatttttttctcagcgcatttgatcgtgaaaattttggaaaaatggctatctctttttctggtctacagtcaagggaattccaaccgcactctcagcataatgacgccgatactaattgttctggaatttttttctcagcgcatttgatcgtgaaaattttggaaaaatggctatctctttttctggtctacagtcaagggaattccaaccgcactctcagcataatgacgccgatactaattgttctggaatttttttctcagcgcatttgatcgtgaaaattttggaaaaatggctatctctttttctggtctacagtcaagggaattccaaccgcattctcagcataatgacgccgatactaattgttctggaatttttttctcagcgcatttgatcgtgaaaattttggaaaaatggctatctctttttctggtctacagtcaagggaattccaaccgcactctcagcataatgacgccgatactaattgttctggaatttttttctcagcgcatttgatcgtgaaaattttggaaaaatggctatctctttttctggtctacagtcaagggaattccaaccgcactctcagcataatgacgccgatactaattgttctggaatttttttctcagcgcatttgatcgtgaaaattttggaaaaatggctatctctttttctggtctacagtcaagggaattccaaccgcactctcagcataatgacgccgatactaattgttctggaatttttttctcagcgcatttgatcgtgaaaattttggaaaaatggctatctctttttctgggctacagtcaagggaattccaaccgcattctcagcataatgacgccgatactaattgttctggaatcattttctcagcgcatttgatcgggaaaatttttggaagaatggctatctctttt

SEQ ID NO: 23685 - DNA, 1903 bp, Heterodera glycines
cttctctcatactcaaaatttcattccctccaatttcctttcatcgttttcaaaatgatgtggatgttcttccacactcaaatcaaggacacggttctattcaaatggtggaaagtcgaaactgtcggaagtgagtttttggatgaacgaatgaatgagcgcgttctgtttaaaaggtcttctgatcacttgtttggtcatgtattttggtgccatttgcttcgaagccatcaaatggcttaggcttatgcttgaacaaaagtcgcgtcagccgaactccgccaattccgccggactcaacatgacagaccaaaacaaaacagtgccaatgactaagtgagcaatggaaacggagggcaggattatgcccattccctcccatcagtcgccggtacgccgaatcgctcctctcccgggtccatcttctccagagtgttctgttcacggttcaactgctgctctcctacctgctgatgctctgcttcatgactttctctgtttggattggaatggccatttgtgccggtgctgccaccggtttttggctttttgggaggagagtgccaatgttggcatttgcatcgagcggagcaacggggagcggacagggatatgcgagcaccggccgaacggaactccattaaaagccatgcattcattttccccaattaatttgcatcgaataaacgcatttggccaagtgccccgtcatgtttcctttctgtcgaatgttttgtcactttgtgtcaatcttccgcttatgtttcttcgcttgtatttgcttttgctttcggttatcgttagccatgccaaaaatggacatgaccttccacttccgtaccagtgagttcattctcctccgagaatggcttcctcagagtattttcggtcggtttgccctttcctctctctctccaattcccttctctcccttttgttagcttatctcttttctttgcttgctgtgctcgccctttcggtggcttatgaattgctgcgtgtgttcagagccatccttttccaaatcgctgaaagacgtcagagtgaagaggtcagtaagtcaatcagtcctctgcttttgctttccgataatcggtccaactgatcagtgatcgctttcccagtgttgttcgccggtggcgagtgctgccccatcctccggtgccattaccgcctcctcctcatccgtcgccgcctgcaactgcttgtctccccaactcttttacaatgtcccccaatggtcgtaagtttcccgcgccctcccgtagccaaaaaaatttcgatgggggaataacccaactttttttattttttttgctcttgggccaaaaatatttttccagtattataagtttttcaaaaaaccaattttgccattgaaatggtgtaggtgccgccggggaatttttttcgaattttcaagaaaatctcccattcccatcactttcagcttctcctcccaattggtctcccatttccatctcttccaatctctgctccatttcattcagttttttttgggtttctctctgatgcttgttgccatgacgtgagccatcaaagttaagcattgtccgcttctcccacttcgttcagttacaatgtgcccatctttgtcgccctcctcttgggccattcgatcggttactttctcaccgcccctctctatcgccatggattggctgaagaaaatcggactggcggagattgctgctgttcataaacttcactttttgtttgcataaattcattagcaattaagttaaagcgttttaatggtccaaatgagaggacaatgacattttggtggagtaagagccggtcaaacaattaatgaggggcaattgccctcaatcggaagtgctcgccctcgctcgctttgtccttggcgaatctgcgttga

SEQ ID NO: 23686 - DNA, 763 bp, Heterodera glycines
atattgtaaataaagtccattaatgaaaacaaaaaaaatcacaagtactttaatatacagtcaaagttattaaaaaaaccgccaaatgaaaaatttctttagcatcagctcctgtcatgattttattatatacgatcgttttttgaattaacaaaacaaaaatgaatcacttttataaaaacatgcttaataataaattaaataaataagaaaatttttaaacttgaagaattataaaacataaaaaatctattttaagcactttgagaataattagggttgaaattagatgaattaattgcaaaataagtaattttttagttaattactagtgaaaaaggcgcccggaaaatgcgtcagtgaaaattttattgtcataaaaacatgttccttgtgttttcgggggcactgaccacgaatcctgtatccaattcgccaattccgaaccccgggcccgaattcgaacaaaaagtcgaaagtccaaattttcgaatttagcatttttggttcaaaaacggcataaatgatctcttatttaaggattgatggcttttagtttgttttcgtgtatttaaaccggtttttaagaaaaacctaatttcgaaaattttgacttttgttcgagttcgggtccggggttcggaatgcagaacaatcttcttataggagtttacttctatattacaatactaatgccatagaactttattttaaaatatttgtatcactgacgcattttccactgaccgattttccggtcacg

SEQ ID NO: 23687 - DNA, 926 bp, Heterodera glycines
  unsure (1)..(926): unsure at all n locations
aaattttgaaaattgctggggttattccttatncagataaggaatgccagttttattacgatttataagaaaaaatgcatggcacaaagcctcggtccaagtggtagctcatgttagagaatgactttgaataaatcagggccagtattttggatgactagaactttatgactggttcagaggctttattctcctatacctaagccataaaatatctcgagatgtcctctcaagtgaccataaaagtcaattaaaaaaaataaattcgctacaaaaaaagttaaattaataggacaacaataattttaaaaataaattgtgtattttacactctgttaaaacaccataaagcaggattaagtcgaatttttgttaaattaaccaagatagttttatcttttgaagcgcggaagaaagacgatttaaaagtaaaccataaataatttaaaccaaaagtagtcattaattgttattataaatgaataatgcaaaatttacacagtatgaaaaaaaaatttatgaaaaaatcgtactatattttatgttatgttgaagccaaaccaattaatcaattgttaaaaagaaagtgttattaatataaactttaacattttactaccaataaaaaagtaatcctaaagtgctcttgcttgcctagcgaaaacggaggaatttttcatctgtcttaactcttttaatatataatgtttaaaaacttatctttaaaaaataattattttcctaattatgtttttttatcagttttaatcttctaacgtttttttttgcattaaagcatttattttaactaattattcaatttacgattgatatatgtttttcctgaaatatcgttaaagagattttaagtcaaaataaaatattaaataaaattaatatctatttatttattaaattattctcaa

SEQ ID NO: 23688 - DNA, 1509 bp, Heterodera glycines
tctaattaaagtaatgacaactgaacatgttcaatcctataaatggggataaaacatttgaaaattttattttaaattgaagtaatattattacattaaattagtgggcagaatatggtcaattaaataaaattgttttgaggtaaaattttaataaaaaagattaattgttaaaattaaaaacattgatttaattcataattaaataaaagtttttcatctaaaaatagcaaaaattaaagaaaatattggtataaaaattgaaaaatgaacgcaaacaaataaaaaatttttggtttcattacaattttattaacatttagaaatttagcaaatcaaatttctaaaggactagaaaaatttcaatttaaatatacaaaattaactatttacaaaaatactaaaggcgatttttgaaattggtcaaaatttatagtttttaaggcacaatttggctaacaaacaaaaattttttctcggataaaattctttggcgtagcttaaaaagcaatgttaataaagtttatttaaaaaattaattagtgttttttttaattctataacctagagcaagaaaagcaatataagaaaatgaaatactttcaataattaaaattaagaattatattaaaatacaaaaaagttgttactcaaaaaaaaggaaaaaactcaaaaaagataaatatctaatttaaaaatttttacatattagaatgaataattaataatttcatatactgccaaattcgaaccaattcatttaatttttttaattcaagaactcattttgttacagataatttttatttgattattaatttaaaattatggatttatgtattttaaaaattctaacattgggtatcaaaaatgttccaccataagtatatttcgaaaaagaaaaatatataaaatattataaatctaatttacaaaataattaacttttattaaatatatttatcaataaaaataaataaatctaaaaagaattggaaaatatgaaacaattattatgctgatgaattattgcggttgaaatcacataatgatttatattttttacaagatgaaattacaagttttaagaattaggcgcagaccatttatgtaaaccaaactagcttataataaatacagtatcgcaaacactgtaataaataacccttgtttaaaaataattttaaatttgctagttttttacaataaaaacaaagcaaatactttaaaagtataaaattataaagttatacgtccacgaaattcactgttgtcacctatcgagcctagaaacccgggaagtttgggcacaagagtaaggaattaaaaaataaaaatatttttaattgtctataaattgcagccatttattaaaagcatattaattaatcaagttacgaatagaaagttttttaacgaatattcactcgattaagcatgcttattttggctaactcattaccattcattctatatcaatgccatacatatgtatgtattatttgtatc

SEQ ID NO: 23689 - DNA, 832 bp, Heterodera glycines
atgccatgccattctttggaactctctttccccgcgttgaatgaatgaatgaatgccgctcatggtcagtcagtgttttgcccgtgcttttggcattggaaagatccgtcagacaaacatttgttggtgatgatggagggggagggggaaattgtgcttttttaacgcctaaaaatacacacataaaattcaaaggacatttgactgtgtaagaaaagataatttttggagaatttcaccctttttcccgtgtctcatttcggcatttgtttaaattttccttgaattttcaccctttttatgtctcgcatttcggcactttttccatttcttttttcttccaatggcaattgccctgaaacaactgaatttttgtgatctgtgcatttccgacgaaaaaatggtgacggtattttggaaagtgaaaataaaggcataaaataaaagtaaaatatctgaaaatgacaaattgaaaataacattcagccaaagactgtcaacggcatcagcaaaaggcacttgaattagcataagtgaaatggttgacaatgccgtgggcatttgaatacattctgaagggttttgggtcggttgaattttaattttgacacaaagggggagtcggtgaaatgtttgtcagtggaagagggggaagggagggagggggatgaacagagaaacagtgccaataataccaagggaatttggcattcggtagaaaagaaaaaatttaaacgaagttaaacaaaagaattttgaaagtgtaaatgttttaaatggctcattaaagaagtgactattttcgtcagaacagagccaaaagttagtgctg

SEQ ID NO: 23690 - DNA, 1663 bp, Heterodera glycines
ttaaatagtgcaaaaaaaaggcaataatcagtgtgatttttaaattcgcgcaaaaatttatgccaattaagtttttggcgttatgtacaattttgtctacacttgagtttgtgacgttaacccatagttgtacaaggtacataccatattcatttctaccagcacctccagactccccaagttcccaaaaagttttaaaaaaattttgccgtaataagttcgaccgccgacctttccaaccctcggtcgaccggttaaaggcgaattcaggaccctaaattaatttatttggctcttttttcgcagtcaggctttttgattatttttgtgactttattcccgtcctaatgccaccaacgagtaaaaaaacaggtattaataatgcaaattgaatttgactgtgttctttaatttaaaattttttaggaaaggctgtcgcaaaggctgtggaggccaagaagaagctggccaaaggccagcacattgtgcgcaaaaaaaacatgcgcacgtcggtgcacttttaccggcctcggacgctgaagctggcgcgttcgccgaagtttccgcgcaaagcggtgccgaaacggaacaaactcgactccttctccatcataaaacacccattgaccaccgaatcggcgatgaagaaaattgaggacacaaacacattggtgttcatcgtggacgtgaaggccaacaaacatcagatcaaaagtgcggtcaacaagctctacaacatcgaagcacagaaggtttgtccactctttgttttggtcaagaaaatcgagtatatgcaaattggatgagcgcaaaactgaatttttgggggccaaattttatttaagtttcaacttttcgaacaggcacttttaaaatagcgccgaaataccttttgctcacttcaattttatttattcgtatagatccgcattcgacttaggcgacatcaatgatatcttcaatttcttaggccataacttttttctttcttagtcaatgcctaattctgttgccaaccgaaaactttcccagtattttttaaacataagaaaaggacgacattggtaacaaaaaaaagctatagcataaaaaaactgaggatagtcattgattggacgtctaaaagtcgattgaatttcgcaattgtgagcataaatgggaaaacgtccggtcctctaacaaaaaatcagtatttcgtcatctgtattaattatgttggttgaataattaatttttaaatatttaatgactatcaaatatcagtcacaatcacttgtatgactatgtctaattctgtttaggctatcgtggcttgaaaaaataaaatttgaacccgatttttgacaggcgcaaatgtcgggactttaagggaagggttattcgaatagttaatacgctttatctcaccgtttttttttctaaggtcaacactttggtcacaccagatcacacaaagaaagcgtatgttcgcttagccgccgattatgatgctttggacgtggccaacaagattggtattatttgagtatattctgcgctttgttttgttgatttttgcgaataaattgttgctatgtttttctgtattgaattgaaagtccatatggaaaaattataccattttttggcgtcggaattccgtaatttttgataaaaaacggag

SEQ ID NO: 23691 - DNA, 1924 bp, Heterodera glycines
tgtaaattgtataaattaaataaatccaaataaattgcatatgccacggtataaatcaattgcatgaacaccctgtaaaatgggctaaataaaggtggggaaaactcacaaatgcacataattttttttatcactaaaattcattcattaaaaattataataatttaatatttatttctaaatttagttacaatgattagaaaagaaaaatttcaaattattttatttctaataatctccctgtgtttggccataactctgatcaaatcggcatgcccaacaattgtacatccaacggcagcggaaggtggatttaaattcaatttttttgcattttataactgcaagctctgatcggtaagcatagggttaaacccaaaaccgatctgaatttattctgttgcacttcaaattagatgagagttcctctaaatgaatttcgaagaattttgttttagaaaaatttctgttttcttttttttttgactttttatgaaaattcgcaccttgactagggtgttgctccccaacatttttttaaaatttctccaaccatcccgactaattttgtcgaaaaaatttcctacctgtcccagactgttctctcaccaaatgtcagggcccaaccctaggtaagacaggccatttcaaggaatataaatttcatttttcaaaaagttctgatcgtttttctgtttggcaatgccaaactgaacacattttgagttccatttttggctttatgcattcgttaattccataaagaacgcaaagttggcattctgtcgtcgtcatctccgttggcgccaaacacatcgccagaaacaagcattggaaatggcatttttgaacctcatcaacaccgtcggcgttggcgccgtggaaaaagtgcaaaaaaacaatttgtgaggagtcttagcagcaaatcgatgaagagcagctcgtatcggaccaagtcaggccgacgtgtgatggaggaattgttgccaaaagaagtgcttaagaagaaatcatttctagaaaagttgtttggcattttgtctaaaaatgcctgtcataaaaatccttcgaattttcagggtgaaacaaaaattagtgcccacaagcagacgtacatttaagctatcacttaaccgggtatagttttttttgtgcatatttaaaaaagccaaatatttatgagtttttcaagaaaatatgttcgaaagttaaataaaaataatttttaaaataaataaaattattaaattttttaaaattaaatttcaagatcaaaaagaaacaaatgcatcttgggtttgagatggcactggccaaaacgttgccacaaatggagaaaaagaaggaactgctcaaaatgttaatttacgtggagaatgcactcattttagtgaaagtaaaattaacaaatatttaaatttaataaaaaaacatttcttttataaaatttaataatattaaagtgcagtaattttacttggcaataagaacgaactggggaagcttttgagtagggttaagccccgagccctcggggggcaaaaagtcgggggaggagacctcggggggcgacatgtcgggggtcgggtcggggggagctcaattgtcgggggtcggggaccccgatcgggtagtgtttggcattttttaacaaggcatttgaattaaaatttgaaccttggaattcgctttccgaattatgaaaatttttgggttgttaagggaactttttcaaaaaataaaccaaattttttgattttcgagccaatttttaggaaaaaatttggagttttggggggacggcggtgccgataggctaggcgccgccgaaacgttttttggaatttttaattaattttattaagaaattgttcaaaatttcaaaaattatcaaccttttcctccttcgttatttaatcaactt

SEQ ID NO: 23692 - DNA, 1047 bp, Heterodera glycines
ttggatttttgctccccataattgtttgagtaccccaaacgtacacttgaaaaaatcgatttttttgttttcggggcagtccccccgaaccgatgcgcccagatttatggggagaccgaatccttcgggaatagcttccctatagcctgtactttaattctgcgttggatttttgctccccataattgtttgagtaccccaaacggacacttgaaaaaatcgatttttttgttttcggggcagtccccccgagccgatgcgcccagatttatggggagaccgaatccttccggaatagcttccctatagcctgtactttaattctgcgttggatttttgctccccataattgtttgagtaccccaaacggacacttgaaaaaatcgatttttttgttttcggggcagtccccccgaaccgatgcgcccagatttatggggagaccgaatccttccggaatagcttccctatagcctgtactttaattctgcgttggatttttgctccccataattgtttgagtaccccaaacggacacttgaaaaaatcgatttttttgttttcggggcagtccccccgaaccgatgcgcccagatttatggggagaccgaatccttccggaatagcttccctatagcctgtactttaattctgcgttggatttttgctccccataaatgtttgagtaccccaaacggacacttgaaaaaatcgatttttttgttttcggggcagtccccccgaaccgatgcgcccagatttatggggagaccgaatccttcgggaatagcttccctatagcctgtactttaattctgcgttggatttttgctccccataattgtttgagtaccccaaacggacacttgaaaaaatcgatttttttgttttcggggcagtccccccgagccgatgcgcccagatttatggggagaccgaatccttccggaatagcttccctatagcctgtacttaattctgcgttggattttgctccccataatgtttgagtacccaaacgacacttgaaaatcgatttttttgttt

SEQ ID NO: 23693 - DNA, 1799 bp, Heterodera glycines
ctgtggaatgtgagcaacaattgttggcgttctgttgccttcggtggttgttgttggcagtgcccggcccacccgctgcagcaatgccattcccagcgaagtgacccatcaaagcccagcggaggactgaccatggcaagggatttttggtgggggggggggggggggtaaggactaatacgctgcattttgccgatgtatcgcgctcgcagccccggacatctaaggggatcacagatctgttattgctctatttcgtagtggatgaacacagaaaatccctctaagaaggagcgcccacagaagcaatgagccaactatttagtaagttagagtcacggtcgtagatcggaataaaccagacaaatcgctccacaaactaagaacggccatgcaccaccatccaccggatcatgaaaaagctatctatctgtcaatccatacagtgcccgggccgaaagagtttccccgtgttgagtcaaattaagccgcaggctccactcctggtgcagcccttccatcaattcctttaagtttcagctttgcaaccatacttcccccggaaccggaagactttcgtttccgggaagctccccaccagggcgaatagatccgccggagcgatcgctagttggcatcggttacggccagaactaaggcgtatatcagatcgccttcgaacctctgactttcgttcgtgattaatgaagacattcttgcctaatgctttcgctgtagtaccgcttgctacggtccaagaatttcacctctcacgtagcattactaatggcccccggatgatctctgttaaccattatctcggtcagcaaaaccaataaaatcggaccgaaatccttcttctattattccatgcacgaacattcaagcgaaacgcctgtttgaagcactctgatttgttcaaagtaaactcgccagcccaccgacgccgaccggtaaaggccaacgccggggaaagaccggcagaaaagccaaccaaaccagtaacacacaaagtgtgcaccggacggctagcacagatccaactacgagctttttaaccgcagcaataattctatgcattttgagagctggaattaccgcggctgctggcaccagacttgccctctcatagatactcgttaaagggtttaaattgtacccattccgatgaccggcctcataagagatcggtctcgttatttctcgtcactacctcctcgcgttgagagtgggtaatttgcgcgcctgctgccatccttagacgtagtggccatttctcaggccccttctccggagtcgaacccttatcctccgttacccgtcatcaccatggtagtcagatacactaccatcgaaagttgataaggcagacacttgaaagacacgtcgccggtacaagaccgtgcgatcagcttagttgttctgagtcaacactggacgcccggagggcgcttggttttgtggcgaacaaatgcgctccgctctggggagattggagctttggtgcatgtattagctctagaattaccacagttatccaagtaagaagtcaaggtcaagtaaattatagctggtgtaatgagccgtacgcagtttccctgtctggcaggttaaacttacacatgcatggcttaatctttgaaatgaacacatcagttcaggcaggatcaaccagatagctgctagcgagcgttgccaagcgccgctattacagccgtcttgtaaagacggatagtttcagcagaaacaactccgttcagaggaagcgtgcgcatgggcagcgaaggagacagagcaag

SEQ ID NO: 23694 - DNA, 2197 bp, Heterodera glycines
  unsure (1)..(2197): unsure at all n locations
atcattaaaaaattttaaatagttaattatttctatattacttcatcttatattattattattttgatttgttctctgtgtcaggttagcgtttttcattatcagtccgttgtttttcatttaatattttacggtttagtattccttatataaaaagtattaacaaaattatccgaaattataataattttgaatcggttgtgaaaaagaaattacaataagtgtcaagaaaagctgcgatcgaaatttccaaaaaatattattattttttgttatttattaataaaattaaattatttggcagaaagtgttcggtgagcgtgaattatatgcaaaattttttaatctttttggctgcttacatggatcgtttcgtgaaatcagccacaaatttaatatttttgttaacattaaatagctctaaaaattatttatcgaatttccaaaatctaagggctccatttttaattattaaaaaaaaaatttttttttttggtggggctctaattcgggaatgggggctttatttttttaaccactcaactcaaaaggggggctctacttcagagggggctcgctctaattcaggcgtgtgggtacaattcaataaataccgtattacagttggtatggttttttttttgtttacatgcccataaattgagcctttagctctgttaactttagtaaatttaagaattttgttagctttgtaaagttatcttcattaagtattttagaatatttttaattaaataattcttatatttatattgntttaatatgtatactttaattaatattcttaaaattcattttgtgaaattttaataccgcgcatcagatgaaattatttttttgctgatctttttcctgataaataaagtttttatttatggattgatattatataccgtattttctctaattaaggccctgtctccattaaaggccctgtctcctattatgtccccctttctgaggatgttgaaaaataatcgcccgtctctatttatccccccgggggataaatggaattattatattttttaaatcttatttttaataaaaattaattttaattaattctaaattgaaattcatttaaatgtttaataaacatgaaaaaataatacagaaaaatcatttactttacttttcttaggagtgtattttcccgatttttttttggcatttttagtggaatttttcggtaaaaaacatgtcactattttattaactatttcgaaatttttcatcactaaaagtcgcggccctagtcattaaaaatctggtcgagtcggcttttatttatttttttctataattatgtttttttaaagaataaaattatggttaattaaaaagttttaaaaataaaattcttgcgtaaatctgcattttgcatcacacatttattatatcaaagtcagaaattattttaaaaaccatattttgtttattttattttcatggcgaagaatttaaaagaaaatgatatttaaatggattttatctatagtttattattaataataaaatgttttttccgatgcttccgcaatgtaaaaataacttttttctagaccaatgccaacgcgcttcaaaaatgctcgataatgatgctgaccgggcagcaagcagtggtttgcacgcagtcgcacagttgtaaagcccgggaacaatggcgaattcttgaaacctatttctatttcactttcagaataaataattttttaatttattttaaattttccaatttatatttttaaatatatttgcggcacagctttcattaatgcctcatgtggtgtggtgctcgaacctcgagtatcttccaattaaaacggtcggatgaagaaatattctcaatctaattaattgtatttcatatctccttttaaatattatttgtatttgtttatacgaactaggggaatcttatgccctaaattgtagaataaattttgataaatatacatattcctgcaaaatttaatattttatttttgttaaaatatatacattaataatatttattagatttttttcgttaaaattattttctcaagttttaattaaattaggagttctattgaatttattaaaaataaggattatttcattagtttacttcttttaaagaaaaataattatatgcatataataaaaattttcgggtaaaaagtaataataa

SEQ ID NO: 23695 - DNA, 1595 bp, Heterodera glycines
  unsure (1)..(1595): unsure at all n locations
aattctataatttcaattaattgctttttgtgctcagattgcccccatttttacgatgccaatttcgggcgaactttgcacttcttcgttgggttgcccgtcagtttactatttgcatggaattgttaccataattttattcactatttttatgctggtaattacaaggagaaattataaataataattgataattaaacaattcattaataattagtaccaccgaaattcaccaaacaaacatccgatgatgggcaaaacggaaattatgaaagtaccgaaagacaagattttaaaatttgaatttcaaacccaaatttaggtgatgttcaataagggcgcatcaatttacagcggaccatcgatggacggaaaaaggccgcccaagaagaaaaagtcacggaaagtgccatattgggcaatgtattcggacaaatccatttgggcaattttggtaattgggcaaaaaagtataaagaaaattgtaaggaaaaagctaatttaaggtggcatcgttcggtaattttatgggcactcaactttcactccaatttatgcccacttacattaacaaggcaaacaattggcacttttttaatgggttaattaatgaaaaagttttttttcatcatgtctttttataattgttccgttttttcattgcgtcactttcgcaggtccttcacatgccaatcgaacagacggggatggcatcggcaatttcacccgcaattatgtttttcatcaaactttttgctgggcagagctctgatcggatacagtaaaacaaattgataaaataaataagtaaaagaaaaatgccaaatttgtctttagatttattagtgacggaagaaaattgcgcatttacaacaccctttcgctgggaatgatgggccttcttttcattgttttggcattgctcaatccgaacaaaactccggctttatgtttggtgaatttgttttgtggcttcgctgtctttgatcgttaaatctctcttttcccaggtcattctgatcgtctccacttgcattctcggctttaactcgggcggatttttcaaatcttcgcaaatggcatttgttttctaacaaaatgcttttgattatgaattattggatcaaattcgattttgaggtgtcgcgtcagcattcccacttcactttggcaaacatttccttcctgaattgcgtctctatgctccttgtgccgttactcaacgaaattattgcaccggaaaacgaaccaggcatttttatgggggttaatctgtgtggaaaatggcaattagtgaataatattggggggtttaatttcagaaaattgggccattgttctgtggattcacgggatcattctgctgttgacaaatgcctttttctgtgcgttcgcttcggcaaaatccgccgaatggacaaaggacaatttcaaggacaccaaaaagggatggaaaagtgaaagactcaaattgaattaaaaaaacattttatataatttaggaaataanattgcagtgaaaaatggaaattgtgcagaaacaccgaaagtcattacggtaggaaacgaagaagcgacagtttaattgaagaaga

SEQ ID NO: 23696 - DNA, 1877 bp, Heterodera glycines
ttcagttacggccatacgtaaaattttcattgcctaatactccaaaaaattacacgtaatagatgggagttttaacaaaaattcaacatacatcattttgaatcggcggggcaagattctgcgcaaaatgattgttgtgtgccgaaatttggaggcgcacttctgaaaagccatttatttgattatttaaaattaagaaattatgataaatgctattattaaagatccatttttaggcaaattacgaaaatttctgcgcaagacgcgttttccgcttatttttgcgaaaatacaccgccgatttgtttaatcagaacatttataccaaaccagcctaaattattttaatttcatccaaaaatacagcaaatgtataatgcttatttttcgatttttctgccttttaggtgactattatgcggttttttgtgcccaaaaaatgaatctgtaattttcataatcactgaaatattttatatggaacatttttagaactttgtttaatcgaaataacaattacaaatccacctaaataatttttaatttaattcaaaaaatacataaaacgcaaatttaatttttatgtcctttttgaaacaaatcaccaaaaatttatttttatgattattggattcttccaaattttacccaccgttgtggaaatgtatgtcaacgttgagcattaattcatccgacacatttgcaaaaggaattgtgccgcgtccgccaagcgcccaaattattcttctgatatgagccgccgttttgttgcattggttggccttaaatatcaaaaattaaatttgaattttgttgattttttaagctgccaccattgttgtcgaatttttttgcagataatgcgaaatgaattgaatttgctaaaaaataaaaagtcagttaaatttaatatggaaaagcaaaaagtaatcacaacaggtaaatatttatataaatgaatttggataaatgaatgccccgcggatatgagtcgagcggagcggtgggagaccaaaggggggggggggggagacgttacaccgttcagaataaaaaaagaaaaaaactgttcaactaaatgtaaatttttttccacatttttcacttcccatcaagcatcctttccacctgctgctgtaaaacataatggaaattgccggacttagccattagcaacatttacgttcgcataagctaccgccacttcccccacttctctgcccccccccctcttttcatccgttcatcccttttgcttgcccccccccctccggctgtcagccgtccccacaagctatgagcatttttgcgagattttatcgggttaaatgttttattttctcatgaaccccccccccttctcccgctcaaccgttcgctacggtcgccgccgacttggaaactgaatgtgagtttagtgcagataaggagagcagcgactagggctgcacacaattacggattaatgcttatgaattacggaaatttgtgttatttttggaaaaattacggataggaaaaatggttgtaccttaatttaaacgtacttgtgaaaaatctagggttttttgtcttgagtctcgggttttcggtgtcagtctttgagactaaacgagattagagactgagttttttacaccccctaatgaatggcttttggtaaacctcagaaagatagtaatttatttttggtaaattttggctgtgcacagaatgctacttatttgaccaaatctatcaaaactctggtaaaaagctcaattttttcattctgtggcgcctagaattccaaatttttcttaaaataaactaaaaacccataaaaatttgttattattgacaacttcatttagcaaagtgcaaatggttagacaaag

SEQ ID NO: 23697 - DNA, 2170 bp, Heterodera glycines
attccctatataagaataatataccccagtttcaagcttaaaaactaatttaagactttttagcgcgttttatgggtcgggagtggtatcattcgatagggttttggactggctataaggaaaaactatcggcatcccaatcagttaagaattgttcgaactgcattcgaaaaacaagtcaaaaaatcacacttttttgaatgtcccatttttgaacgctttttgcatgccttaaaagtggtcaaatcaaaaaacaaatatgtttgtgcacatctacaaactcttggcttccgaatgataccagggttgttttggtccgggtccgggaagtgccctaaaaagggagctcaagcacttttggtcgggatttcttccaaaaaagaaggaaaaggaaaagggaattaaatggaaaggaggcaagtgattcggtggtcaagtggttagtgtgcttgcctttggttctgtgatggctgatggttcgagtcccattaatttatgggattttcccgtcaaatattatatttaaattattcgttttaaaatttatttttaatgttttttttataagaattttatgagtgagttaaaagagaaagaaaggcataataaaaaatatggaggagcaaagtacttttggataaaaattgatttctttcctttctttcctttttttatatgtaatgcacactcgccagtggtctttaacctcgccttttcaataagcaaaaaatgtctcctccttttctttccccagttcattatcaattgtttccatttacatcagttttttactgctcctacttttattcaataaatatttccaactaaattattgctgttttaatagcataaatttttagtttttgcctttggtggtggtgggcgacggctcgggtcccacctattctgggtgttttcatccattattttattacattttttgaacgattttattttttttaaattaattaagtttattaaaaataatttattttaaatattaaaaataataattctttcttcctaatttagcccaaaaatctattgtttgaccttttttgtgcaaaatcatttaaaaaatggagacaaattaataagttacctaaacataaaattataaatattttatgccaaaaaaagaaggaaagtgaaaaggaaattaaaaggaggcaagcgatccggtggtcaagtagttagtgtgccttcctttggtgctggcttcccatgggttagagtcccatttcttctgattattttaaagcaaatattatattgaaatttttctaatttttgtttttttacaatttatttttttaattaattaactttatggtattttaaattaatgataatgattttttgaattaataaaataataaatatttttaattaatagaataataaagtctaaattaaatattaaaattaatcgaataaaaattaaaataaacaaatattaataaaaatttaaataatttataaatctcaaaatgagttaattttaggattagacgaatccgggtatttgggcaaaactgggtccggatatttccgggtccagcaaagccgggtccgggtccaagtttttaaaccgggtacgggaggaacagaaagtggaagaggaacagaaagtggaaaggaacagaaagtggaagagaaagtggaagaggaacaaaagtggaagaggaaaagaaagtggaagaggaacagaacgtggaagagaaacagaatgtggaagagaaagtgtaagaggaacagaaagtggaagagaaacagaaagtggaagagaaacagaaagtggaagaggaacagaaagcggaagagaaagtggaagaggaacagaaagtggaagagaaagtggaagaggaatagaacgtggaagagaaacagaacgtggaagagaaagtgtaagaggaacagaaagtgtgagaggaacagaaagtggaagagaaagtggaagaggaacagaaagcggaagagaagaagaggaacagaaagtggaagagaaacagaaagtggaagagaaacagaaagtggaagagaaagtggaagaggaacagaaagtggaagagaaagtggaagagagacagaaagtggaagaggaacagaaagcggaagagaaagtggaagaggaacaaagagtggaagagaaagtggaagaggaacagaa

SEQ ID NO: 23698 - DNA, 1477 bp, Heterodera glycines
ccccctccttactgtacctcggcatcgtagcggtccaaccgcacactgtagtgactgtggacggactcgttgataaattgcaccattacgcgctgcacggggctaaccaatgttagctgaaacccgtaatggaacgggacgccaaaagcgaccaaaagagagcaaaggaaaagcgaaatgggcggcagacggcgcatttgggcgggtggcgtctcttgtgcattagcagaagacgggcaggaaaagttgaccattaagcagaatggaaataagctgaatgtgcgaatggatttaaattagtgtcggcacggtaaccgataacaaagggtaattaccgcgtaaattaccgccatgttttggaaaaaaaccgtaaatttcccgttttccagacgacttgatttactgctgactgctgaaattacatatttaccggtttccataaaagattttcatgaatttaataatttttgagggtcatagaatttggactccacaaaaaaacgatcattcttcttcgattgaaaagtctaacccggaggttttcgggttttttttatcaagatattagatttgcaaaaatcattgatttaaaatagtggcgtgcttgccagagagaaataacacacaaaattcatggtttaatgtgagtttttgaatcagagatcttaattccttctcaaatttcaattttctcaacatcgcttgtgggtgatagaactcctaaccaaagtaattgcctcaaatcctctaaaacttcacttaaaacaatctcttgacaggttttagtaaattcaaaaattttccgaacttattcttagtttcttctttaggatttgattaatagtgagattctaaaattattcttttttgggcaaatccaattgtcaagtttcaaacagtttaaaattgattacaggcattttaatgttcccttaaaaagttataatttcaaaaaaattaaattttcacaaaaaggcttatgtagtaatttacaataaaaataaattgcgggaacaaataagaattttttgaaaaaaaaaattcagacccaatttaagaaaatttaatttttattaataatttcatgaaatgaaaagattatttgaacacttaacaaaaatttcttctaatcaatgaattaatgaatttatttataaatttcaaaaaaaacatttgataaattttgtgggttttgttttctacaaaattttttccccaaaataattaaaaaactcagccctcatttttatcagtgtatttttggacccggataaatcgggtcgggttccgttaatgggttttcaaaataaattctgtattttgaaaaatccggatatccgagtctggaccggtctgttttgcccggagccgtctaaccctacttttttttgtttaaaagcggcttttaaatgaattgaatggacgaattgcttaatttaaaaataaaattaaaataaatttaaaaaatacacaaatt

SEQ ID NO: 23699 - DNA, 1975 bp, Heterodera glycines
  unsure (1)..(1975): unsure at all n locations
aaattgctgttgcttctcacncaatgggatcatttgcaccccacaaatcaaatcggatattgttcaaattggcatccgaataattggcatgccgtagagcaaatctgacatagttaaaattggcgcccgaattttcgcggtttttccacttaactggcgccgtcgccgtctccccaattgggcaccgtttcaacaaccaattatatattatttcgttggatgattcttcggtctcctgtttcagtgtcagcttttctttcgtccgttcgttcaccaattcaaatggttcaattggcattgtgtccacccaaaaataaagttgaatattgtaacagacagaagtggtggcacggcgaaatgtctaaacacaaaaattggtaaaacaaaaacaaattgacgaaaatatggctagacacacctctttgaagttttgtccaaagcatcgccatcgtcaaagcccaaatgacgaatgtttgtcgcaaaaattggccaaatttcacggataaaaacatcccaaatcggttggacatccgtatcaattgaatgcacaaacactttcaatttggtgccatttctgtcaaagaatcgcttcttggagcggagaaatttgatcacggaatagtcaatgtacctaaagcaagagaaaaatgctttagcgtacacaaaagttaaggatgactgaatttgaaggttcttaaagctgattttgttgggcaacggatggtccggcaatggaaatcccacaaatttgccatagccaccaattaatatagacactttcggttttggtccaatattgtttgcttttggtcctttgtccttgcgaattacgacacttctccaaattgtcaattcgctttttctgtcgaaatgtttgtccaccaaaacatcgaaacggtcggaaagcaatgccattttgaggccgagtttggcatagttaaaagatgggagaatgtccatccacacgtcgttacaaagccaactgaaacatggaaaaaatggatgggggaaaatgaaaatttgtaattttaaatgaaaattttgtaatttttcaaaatatttgctgaccggcggttcattttgtggttcaatcagcacaggtctcaccaattttttcaatttaatttgtgtgtcacaaagggcaaaaaaactgtgttaacttaaagcatagacaattaggaaaaatgagagagcgcaaaaagaacacaaaatttagagaaggtacatgctatcgcatgaaaagctcaaaaatagcatttttacctattttcctaaacatattttggactttttgggaataaaaacatattttggggtttcggcagtttttgtcatatattttggcaattctttgaaaaaatttgatttttttaaacaaaaatgtcttttttggcagcaaaattcttggccaaatgcccaaaaaatttttcaaaattttttattttttttttcattttttgaccattttaatgatcttttcatttttatggcaaaattcaaattttagcgaaaaatccgaaaataagcattttgctagcgaaatgggtaaaaaatgagacttttatgcaaaattcacgtatttattaagtagtttttttcagtttttggcacatattttggccttttttggtgtttttagcacatattttgggggttttttggcacatataaatccgttccctgttcatagcatatacgaagaaaaaatatgttaatccatataatttacaaccctagaaatatgtacaaaaagtgttcaaaatatgtacataaatatgtaaaaaaaaatcccgaaatttgtaagaaaaccccaaaatatgtaccaaatatgtaaataaaattgtccaaatggttgcacactccgacaactgatggtcaaccgaagagattgtttgcagtgattatttggatccaccaaaaattgattggatcaacaactacaaagaggtgtctcgccatttttctcaaatttttt

SEQ ID NO: 23700 - DNA, 1314 bp, Heterodera glycines
aatatttaaagatttaatcagtataaatacttctataacttcatcactagtcaacatcaggtccttaaactacaagtttagtgaacgagaaagaatcaatatataaataaagacaattaagcaaaataaagtccataaatagataataaatggaaaaatttatatttattaagtaaacataaatttgagaaataatgtcaagaacggattcagatttttaagcaaaaataaatcaaattaataaaattaaatgactttcaaattttcattaagggataaatatttattttttatttgcattattaaaacaaaataaaaagtagatgaattatattattcattaaattttcaatttttgataaaagaatatttctcaccattttcgaagaaataagaaaaatttggaagactggtttaaatagaaaagcttagctcaaattatattaatctttcagataaggatgaattaaatatgcagaaaaattttaataaaaataataaaagagaattggaacaaggtcagcatcaaatcttaattttaaaatgaatacactgaaattcataattagtattttttactaaatgcaaatagaaaatctttaattataaaatcatcatacaaaatagagctcattgcgcgccataaataccggaactcaccgcctgaattcattatttttagaaagtccaaattaatttataaatactttaatcatttaaaataaatttaagtgaatacttattggaataataattgctttgagttttgcaatttctatattcataaaactcatggttcgactttggaaactgaatagaaaaaattgagaaaaactaaaaatcctttcaagtaagttctaagaaaaaatatcaaaaataaatttattaaatataaatttgcaaataattcgaaataaataaaaataatagcaaaaattcaaataattcaagtttttaaatctattccggatccaactttataaacctattccgggtcaaactttttaaacctattccggatccaactttataaacctattccgggtccacctttttaaacctattccgggtccaactttttaaacctattccggatccaactttataaacctattccgggtcaaactttttaaacctattccggatccaactttataaacctattccgggtccacctttttaaacctattccgggtcaaactttttaaacctattccggatccaactttttaaacctattccggctccaacttttaaacctattccgggtccaagtttttaaatctattccggatccaactttataaacctatt

SEQ ID NO: 23701 - DNA, 1814 bp, Heterodera glycines
tctatcaattttcatgtttttgcaattttattatcattcatttttggattttcactttttattttccaataaattttcattttttctattttttgttcctccgttattttactgcgaatgccaaaatgtttcttccatttctcaattattctttgactaactccaattttcttacaaatttcgtcataattttggtaccattcttttgctgaatattttcttttttgcttatattcctttttcatttcaatgaatttttgtacaaattctaatttttgttcatcagtttttgatttatagcttttttgtatttgtttttgaagaccaaattctttaatccatttgtaaatatatttccgatttgtccccaattttttcgctatttttgagttaattttatcccattcttttgctgaatattttcttcctttttgctttattttttctttaattttataatattttccaattatttctcgttttttgagttcatttcgcctttcttcttctttttcttgccatttttctccaaatatttcatcaaatgatttctgctgaagttttttcttttctgattcaattggaataattagggcaatcaaaaataaaaataataaaatacagaatttcattttcaatattttattttatttttcttcaattaaatggcaattcattttttgaggcatttaaatgattttttttcttattagaaaactgaataaatcattattttacttaataaaataaggaaatcctgtttaatttcaaagaaataataataataattttatcttaatgacaaaataattgccaattggtaaattaatgattaaataaattttattactttctactggagctcattcgtaaataataaacatattttcaataaaaataaaataaattcacaatgtaaagagattttagaaaaattaatgcaattttcgaattaattttattccattcttttgctgtgtattttcttctcttttgctttattttctcttttattttataatatttttcaattatttcccttttatcttctttttcttcccatttttctccaaatattgcatcaaatgatttttgttgcaatttcttattttccattttaatttgatgaagttcgatgatcaaaaatacaatcaaaatgaataattggtgtagcttcattttatttaaaaattcttaaaaattaacaagcaattattatttttactataatttaaacataaattaaattttataaatgaaataattgttagaaatcagaaaaaaacctatttatttgaaaataaatataagattttattatttgttattttactgaacaaattagtggcaataataagtaaaatattgattaaatttaattttccattaattacattttgttattgtggccgcagaaaaataaaataaattcgtaaaacaactcatttaagtttaatgcaaacgctgtacaacttttagagtttcgctacctaggcttatcaattttttgatttttcaaaaatatttagtcctttttttgctttttaacataggtatttatgttatattttattaattttaacaaatgatcatcataaaatttgcattattctccattcaactaaatattataaatttaatgaaatgtgaaatgaagtgaatgaatggatacaatggtttttggcatttctcgggttgatgatcccttttatccacgggtgccatttgtacatggattcaagtacgtgcttggatttgggtatctgttcatcgaaaattttggctgtacttaattctttccccaagtgattttt

SEQ ID NO: 23702 - DNA, 1352 bp, Heterodera glycines
ttttttgccattttataattcaacggtttgtccaccattcccccagtcccgaggccacattccgtgcaaaacagcgcgagccgccgaaaaaaaaagtcctttgcctgtgccaacaatcgctcatcgcccgcatttccgccactccccgaaccgtccgcagcgtaccaatggaatgtgtacctgttcataacagcactcatttatttttatgaatttggctaaggtcgagagtctcgacaatctgtagaaaattaatgtgccatttttgtacatgagtggaccaaattcgcctggcagtgcgtggtacaacgggtcgtacagtgacatgtcgtatttgggagtgccgcaaaggatcaaattgtgtttgtcattggcacgaattgccttaaaaataaatttgagttttggattcgaaattgaaaggccaaatgacttgaatgacgcgattgtggtgctgcaccatcacattccatggcacagtcacagcttcgttccaaatttcgtaaatgatgattttaaaatagccgtactgtgacgatatttggccaaagaatttgaccgcttcttctgtgtgtgggtcgtcgctcgtcaaatgtcaatctttgcaaaattaatttcaattttttatctaaattattaaaagtccaaccgataattaagtaaacgttccacttgttacatgcgttaatcactcgcttcaatttttccatttctcttaccgggttctccaggtaaccgttcggttcgacagccaatggggcgcgaatcttaaaaattttaattgagtaaaattcgcaaaactcttcatgtcttccaccagaatcaagtcatcatcgcatagcccatacttttaaagtatgaacttgaaaaattaatttaaaaaaggggaataaatgttagtttgttaaatttaaaaaattttactattgataattttttttattttccattcataataaattaattaatgaatagagatgattttgaaaaaaatatgcatgaaaatacaatagtatttcacttctgccactgttaatcatttgtcagatttattcggttaaaacgaggcaattaattagtacggcactctttccacgttccgctcgctcactcaccacattgacatgccaattgcacttcagctgccggatgctctcttcgttccaaaacgtgtcattgtactgactccaaaatagagaaacgccttaagaatttaattgttttaatttgtttaattatgctttccccttttgcctattaatcgtgcaggttggacattctccgcaacgagtttatttcctttaacactcaattacggtaggcaaatttggtaacattttgaagatgcccta

SEQ ID NO: 23703 - DNA, 1166 bp, Heterodera glycines
tttttaccattttttttttaaaaaattataaaaataaaaaggaattaaaaaaaaatttaattttaaaagtaactcaaaattgaaaaaacaataaaaaaaatttttattttaaattttttaaatttttttttaatgtttcgacgcaaaataagaagtaaatatattgttccctatttattttcgaataaatatttacattcatttttattaaatattttcagttacaaaattaatttttatttaatatgcacagaaaaaattaaattatattcagaaaatatttttcgatgaattaaacagattttattcgtcttaactcctatttttgtaaccatatttcaaaaaatgaagattgacggtctgctttaaaattttgatgaaataattctacgacagagctatagtttgtttattatcgttttttaattgttacttagttctatattttctaatatattcttgatttgactgcattgagttacgtagttgattgaagaccttttaacaatttttttataattaatattagttgcaaattattcttttttcaaataggtggataaattttttatttaaaaatgaaattttataattctttatcttcttgagcagccaagtacaagttctttcacgaaatataatttgcttcacacttgacccttggatatgtttattcatcagtatttattatgtaattttcaaaaaaaaatcttttcaaatatatctattgcttttcctgctacatttataaaataaaaattaagctaattgcagttatgttttataacaaattttactaaccggaatttaataataaatataatttttatttaataattataaactttcatttaaaaaaaatgaaaattgggctcgataaattataaaattttattgtatgaaatttaaaatacaaataattagggatgcgatttttaggccttctccgtaatgggaattacaaaagtaaaatagtcacaaatgtaaaggataatcagattaatttaatattcataaatattattttaatccgtattttaaaaattaattttatttaatataaatattcatttaaaaaatttattcattatatgcggaataaataacaattaattacgacattttacctttttttaaaatataaaaataaattaaataaaaaaaca

SEQ ID NO: 23704 - DNA, 1582 bp, Heterodera glycines
ttctaatcacttttgtccctgtcataatcacttttatacctcttctaatcatttttgtacctcttctgatacccaaaatttaaaaacgggagcgaagcgccggttcaagcccaaccaagtttaaaaacgggcgcgaagcgcccgtatgaggtttcaatgaggtagcgaagctcaagaagcgcgaagcgctttatcccaagctcagatccgacggttcacgcacccgctatttacatgtttatattaatttaaacgtaaataaattttttaaattaaattaatattttttattaaataaatgttttaaattaaaattagttattttttaattatacaatttcatgaattttttaaattgatttatcaaaaaattaataaatttaatttaaataaatattcaattattatacacttccaagttctttttaaattaataattttctaatcactgttgtacctctcataatcactgttgtacctcttctaatcactgttgtacctctcataatcacttttatacctcttctaatcatttttgtacctcttctgataaccaaaatttaaaaacgggagcgaagcgccggttcaagcccaaccaagtttaaaaacgggcgcgaagcgcccgtatgagtccaacaaaatttcaaaaacgggcccgaagcacccgtccattccaaaccatatttaaaaacgggcgcgtagcgcccgtccaagcttaacaaactttggaaaagggcgccaagcggccgaaaaggtccaacaaaattttaaaaacgggcgcgaagcgcccgtctgaggccgcgaagcggccgaaaatgcacatcaaaatttaaaaacgggcgcgaagcgcccgtatgagctcaacaatttaaaaaacgggcgcgaagcgcccgtctgaggccgcgaagcggccttaaaaccccttaagattttaaaataaattccaaatctctaaaaaaactcaatgcttatctaggtagcgaagctcaagaagcgcgaagcgcttttccccagctaaatagccgacggttcacgcacccgctagtttatattaccatagagaaaagttgcagttcgtcttaaaaactaatttgagtcgaacggctgtcgggaggggtctgaaagtggtggaagggtcttacaactttttgaggcgcattcaggaaaactataggttttttgatccgagcgccaactgagtaccagggaccgatttctcacttttgcttgcgtttgatggcccataactttttttctaaaactctgatcaaaaaatgcttgctggtaggaaactaagttgaagtgttttctaattttcaaaaaaaattccaggcctctacctatacttggaagggttgcagaaattggcaacttttcagtaccaactttgcccagttcagtccccgttgaataactcattaggctttgacctgagcgcagggtggccagcagacttattgtagagctcggtgagctcgatttttccagatattaaaatttcgaaaattttcaaaatttttcgagctaggcctaaaaaacggttttcgggtttttgaattttaggattttttaacgaattttc

SEQ ID NO: 23705 - DNA, 1363 bp, Heterodera glycines
agtaaactgccgcattgtagacttttcaccagcttcggagcccgaaaatttgccgttggtcattttcaaaacattcgtgtgccatggcaacacctgttccaacagtgaaggacagaaaaagcagaacaagtgcgcgtttggaaacggcactagtaccaagaaatgtaggaatggaaaggaacaacaacaaaatcatccagtgatggagaaggcaccaattcgaaatgccgcggacaacaaaaagaggcccttactcacaaaaaatttggtggccccactgaaaacaaagaaactgccgaccaaaatttctgaaatatttgagtcaagtgaaacgcgtaagcaccggtcggacccggataagaaagtgggcggtttagaacaagaaaaagtgtggatgccagtcgacaaggcgaagaaacgcgtttggagaaggaaaaattatggccaaattcagttagggacaactgaaaatttaggtagggggaaggtgagcccaaaaacggcttcgtcggcaaatgggatgttgggtctatgcgaccgcctccttgtttctcgatcccaatcgccataccaccgcggcgagactgacgccaaatttggcccaagaattttttatcgtggaggaaaatgtcttaaagagcccgaccgtggaatgttaggagacggacgccggcacaagctgaactcgcccaccacctatcggatgccgaatgagcataaaaggcaggggacgcctttttcttggagggtcgggatgtgttagtatttgaaatttggcgtttaatttgtttttaattatgttgtcccttcataattttgtctaattgtctgtaattgttatctctcatctatcgatatttgccactcccttcccagcagaatatgttcccccaccgtcttcccttcaattcattctgttggcagtgcactttcatatttgtattttgttcttattttcctccgactcttctcccattttattgttgcggttttaaataaagtgatttgtctccgtcttggaaatatttgtggaggagaagcagtgtattagcccgacccgaaaagcattatttagcacgtggcgctcctggcgaagagttagctgtgccggcattgtggatttttgactgttgaggagaagccaatttggagaaacggccagaacaaacgcattgttgcggttctgcattcttccttcgctgccgacagaacaaacgcatagctgcggttctgaattttaacgcattgttgcgattcaccaaatttcatcccactgctaacgcattgctgcgataagtgaggattggcgccgacttatttaacgcattgttgcgaatttcttggatttggaacgccgaatttt

SEQ ID NO: 23706 - DNA, 1435 bp, Heterodera glycines
tttaggaaaaaatttaccccgtttcactcattgatgtaatgttctctgcctttgcccaattaaaaaaaaaggggggcgggaaccaaaaatattttttaagaaattctgatcttcagggaaatctgtggggtaaaaattcagagtaaattaggtacctttctcggccaatttttatttattttttagtgtctgatcagtgatcacttaaaacattggataaccaaattttgtaaaaaatgggtaaaataaagaaaagtgggaaattaaaacaaaaacttgaaaattactcaccccctcccccctctcttcttagcaaatgccaaaatcgggcaattgattctcttgatatttgagtttcctgcctgtctgtacagaattactgtaccttctggtagcgttgaaaatatcgtggcggaatacgcaaattgagtgctcttgcggcggcatgggaagcaaacaaaaggagggggctaagaattataaatttttaaaattttcgatttaatttttcggactttgtctcgtccgtggtgtcaatttggattggtctcccgtcaaagccggcccattgttgggcagcggaaacagaaagtgaccggttcagtgcggacagctgctcctcctccatctcttccaactcctcctcatccgatgccacttcgccttcctcagcaaaaatttctggcactgattttgccaattttggctgccgttgctgtttcatttttggcactctgtcagtgtcatcgatcattttggcattctgttggtttgattgtcgccgccggcgtttcatggacaaagccaaactttcgctggcatttccaccggctgaagggggtgaagcatcggtggaagaatcattattttcggcattttcaatctgtgctatgagcgcgttttccaaattgttcagttgctcaatgttcgggtgcaattctttctggaaaggatcaaatatccaatttcctaatccggcaggcgtcaaagtcaataaattttgatgcccaattttctcgggcatttttgggataagttagggattggcacattcaatttaaccaggatcaatgggagaatgtcgaattatttagaaatttcatcgtcgattctcaaactgataaataataataataattctattaaaaataaattttataatttgtgtaatcttccgttttcatatttaaattaaatttttttttattaccttaaatgggtcacaaatgattgtttcattgtccatcccaattgactttgcgtcttctggcggtttggaaaaaaagtcccgtcatattccgcgcaaatttccaagtcaaatggccaccgcctgagaaaaaaaaaatttctaatttgacaacacttgaaaaatatgacaatttctatggaaaaaaatttggccccaaattgggggggccccctttttacaaaaatt

SEQ ID NO: 23707 - DNA, 1491 bp, Heterodera glycines
cctccgcttcctcctccccctcctcctccgcttcctcctcctccgctttctcctcctccgttttgccctccactgcttcctccccctcctcctccaccgactcgtcccccaccagttcctcctccacttcctccccctcctcctccgcttcctcctcgtgcgtttcctcctcctccatttcctctcccgtccccattttctgctccatcaccaccatttataacgccatccacatccacgtcctctacctcactctcttcaaccacttcatcatcattcgcctctctctcttcttcctctctctcttcctcactccgttcttcctctctctcctcttcttcctctctctcttcctcactctcttcttcctctctctcgtcttcttcctctctctcttcctcactctcgtcttcctctctctcttcttcctcactctcttcctcatcactctcttcctcctcctcattttcatcaccaccatccattttctcacccgccttcaaaaagttgtgccatgcattgtttaaactatacaatgcttctttccgcttaaaattttttaattatattgattaattatattatagaatagtataaaacttcaaacaaaaaaattatatttgataaaaaattattcactttttattaattttaggccaaaattttactaaattttaaaatttttaaaaattgataaagaaatgttatacgttcaaacatttaatttttcaaaatttaccttcatttcatgaaattttcaaaaaaataataataataataataatcaaacccaccaagaaagacacatccaacaaaatccagccggcttttcgggactgatgtttctgcatccgcggcaaccaaggagtttgaaaccggactgaagagaagcgtgccaagacaaaacggaatgtctgttgacatgttggacaacgccgccgcagatttgttggttcgatgtcttcatattcggtggtgcggttgtcgtacaattgtttgtacaattgccaattttcgttgaacaatttggtctgagaccaatgcagatgttgatcggaacagtcctgttgttgtgccgttgttttccgtcgttttgctgccggcaactcgactggtggtgtaatttggcgcccaagtcgctggagaacaaattgttgtcgcatttggttggaagcgcagatccgtcttgaagccccctacaatttgtctgtaaaagaaaaaaatttttatttcaattaattatgtgagaatcaaaaaaaacaaaaaaaaagaagcaaaaaaaaaaaaaagtttttggtgagatttttgactccaatggatgaccattggacggcattacgcaacgaaaatcaattggagaatagttaaaggcgtccaatggtcactcattgacctcaaaatctatccccccccccagaaaaagaaattgtatgagcaaaaaaaatgagagaattgcttatttccattctttctaatccatcgtacagtcac

SEQ ID NO: 23708 - DNA, 2236 bp, Heterodera glycines
tctcttcatctctcttcccctttctcctcctctctctctcttcctcttccactcctgtcccccatccctttcctattcccctttcactttctcttccccttctgtccctcatccctttcctattcccctttcacttcctcttccccttctgtccctcatccgcttcctcttttctcctttctcttcctcttttgtccctcatccccttcctctcttctcctttctcttcctcttctgtccctcatccccttcctattcccctttcacttcctcttccccttctgtccctctttaataaatagtaactaaattttcctaattttctccatcggcaccaccagacagactcattaattattttgagggtagcttttacgaaagtaaaatgacgtaattcatccatcatagttcattgatcaaccaacgcctgatgacatttattgaaacgagtttaaaaattgaattgaaggaaaaaacaaaaatgaaacatttcgtgatggtgatacatatgtttaattgtattcccatttaacaataatagttcacctttaatttcttattaacaaatatcccaggggcggaaaaggaaaagggcggcccctctttttgtgtcaacctttcccggcattcttctctgatcagtctcggcgttttgccaatccaatttgctcgagtaagacattagacgcccttctgttcccgaggacactttctggatcggattcgccatgatttcacttttaacattggatataaaataaataaagtgattagggcgtaaatgcatttaaatattctccccccgcccccctaattaacccgagaatagatacaaaaattttcatcaaaattaaaacaaagttgaaattatttctcttcttttctcggccactcattcaacattactagggcttccttttttaggcacaaaaaatcgcgaaataggcaccaaaaaaagcattaaaaaatcgcaaaataggcattaaataggcacaaaaaacctcgaataggcagtaaaataggcaaaaaaatttttttataacgctttttaggtagcaaaacacttaaaattaatcaaaaaattattttgcttatatttcaattgttttaaatagttcaataaaaataattttaaaccaaaaattttatgaagaaaaaataattaatttttggtgaaaaatttttgtgaaaattttttcaattcttaggggtgtattttctgaatttttttcagtcgattcttaggggtttatttttcatttttattgcatttttgttaacgatttttacggaaatcctgaaaaattcgtcaaaaatggcgaaatgggcataaataggcattaagcacaaaaagtccaaaataggcaaagttaggcattataaaagtcatcgtagacaccccaaaccaagcggaaaatacgtttttcgtgcttatcagtacgtattaagtgcgcaaaaattttaggcatttgcctaaaaatcgcatccctaaacatcacatttaaagctcatcgtctcattaaatgtcaatattttgtcatcaacaatgttctgcttttcgcttctttttttcagtattttcctcttaaagctttgaaatcgcaccttaaaaagttcattggatttgttgaataaattacttaattaaaaaaggacaacaatattaatttggtggatttaaaaactaaaagaattattctctttgagtttcctttaatattttgccaatttttcactttttatttttttccaacaccaaaccaacgaacattgggcagttgttggacaaacgatttgttcaccaccggtgccattttggccaattgttccgcgccggtgtacaaatgggtcatgttgaacaaccgttcgtacacacacaacaaagcgccaaaatcgaaggctggcgaaaatctgttgaagaaaaaatgagggaatgcggcgagtcgggccaaatcttcgacgccaaaaatgcaaatgccatgacgaaaatgggcagaggggcaggaagtatccggagcccacaaagtctctctgaaagcttggtaatggggttatgttcggcattttttagagactgtgagtgatccaaatgagaatgcgaacctcgtcaaatattttgtgggccctgcctttttttggttgaagcaagtctgcgtaaagccgcccggcgcgttaagctgatcagccgagtgcagagtgatcagcataatttcgtcccgtccatagccgatcagat

SEQ ID NO: 23709 - DNA, 2465 bp, Heterodera glycines
ttatcatattgatatgcaaaatatatgcctttcttaagaacatatttgaaatttacggctgattcattaaatttaaatataaatgtgtaacataaattcgtgttttatcagttaaacatagaaaaatctgaaatgtgtatattttaataataattttatcttttgagtatttaataggctaatggggtacctaagattttgaattcgtcaaaattatatgttcaacgaaaaacacatttatagcctgttggtttgagcttttggggcatatttctataggcatacttttggcattttttcactttattctaggggcccttcaaataaagaaaacattatgatatccttgaatgttctggtagaaaggattaatatgcaatcgtaatgacataagctgctccattttgattttaaagggataatcaaatgctaattgatcccgattaatagcatttattggctatttaattttgactattaaaattgtttccaaccttaaaaaacatcggctgcaacttttgcatcaaaatatgcgcggagcgctcttcggaggtaaaattgagcaatttgttcgtaatttcgtcgtcccaaatgttgttgccaccgccttctttgctcggcttgagcacataattactcggattaacaattgcatcctaaaaaattcaaatccaattaattctcatttaagtgattaatttatgaatgaatgaattcttcaaaatcacgagctccgtggttttgctggtcattttaaaaagtcatatttattttcaaaagtttaaacattgttatcttcattgagacgcaataaaactaaaatatttattcgttgctctagttattcagttatgatggataaactaatataaaaaaattaatttttttaaacccagtcgattctttttttgaaatgtctcatgccgaactaattaccaagagctataataataataatacgaactatttaaaaatttctcttgcctctaaaaaagaaaaggtaagcttttaatttcatttattaggttgggcctgattaaaataaaacaattttcttctatgcttatagttaaacaattattaattgcttcaccttcgtggcttcgatggccgcatcgtcctgatcagtcaagctccacagcccggcgaacgtttctcttatggcagcggcttttttcggattttcaggcagaaaacgctcgaccatcccgggttgcgcaagcaccttaattagtgaaactaattaactaattattttaaatggaaatttgtatctgaaagtaaaaagattaaaattaaaaaatatgttcacctgctgcgttttcttcatgctggccaattggagtccgctggttgggcttttctgaacagcaaccataaaaatgcgaattgtgcgggaaaatatttcgcaaaaattaaatgagttaaattttcagaaaatgtttatttttccttgactttcttattaaatttacagcaatttcgtgtgtttaaatataaaacttttacattttttgacaaattttagttttcggaaaattggcctaatttgaatatttctgaaaagtgatttggcatttttacaattatacgtacaatagcggtggaacgttcgatcatcagtcgcatttcccaatcatcttcgcttggcttaaagaaatcagtgacaaagtaaacaatggccaccgtccgatcatcaaaacgcagtttaaagttgtcatcgagtgttaatctgaagaggaaatattcgagaattggttaaacaaaacgcataattgaattttttcagttttttaataaaataattgaaaaaatgcccaaaataattggaccgttaaataataaatataaagtttttaattcgtaggcttaatggtgttccccttttctcattaaatagtgctaatttaaatgcttttttaattgtttttttttgccgaacattcacacaaaaatcgcctgacaattttttaaatttggtttatttcgaatttggattcaaaaataactttttttgaaatttttatgagtaagcaacagaaaaggatgattgccttgaaaaaagtacatcttttgatgcttctgtcactccaaaagaagtaattattcaaaaaaagacaaatggacactctgccgaaaagttaaagttatcccatgtatcaagagaacctctaatttcggaaccaaaattcaaaatatgacagggtgacgttatgccagagattggttttttacccccccccccaccgatcgctttaatcacctgccatttttcatcatttccgtacattccgggtatccaatgcgcacagtttccgctttatgctttgtcaaacgccacaattcatattcaatgtgtcgctgtgcaaatcggtttcggtttcgtcggtgtgtgatgaacagaatgatgccttttggatcaccaaatgcgtacctttaaaataacggtaatgacgggatcagaa

SEQ ID NO: 23710 - DNA, 1453 bp, Heterodera glycines
ccccccctgtcccccaaaagttctttggaaaaagcgccgcaaaaaaatcaacttcgatttttcatgcttagaatctcacaaaatgcttatttcgaacaaaaaaattactcaaatcgatcatggacaatcaaaaatataacatttgaacattttatacgtgttttgaataaattttgtaaaaatgaggcttttttgcctgccaaatgagactttttaaaattttcatctggcaaccctgtccatgatggacttgtgaatgctagttgcggcaatggaaaaaaaattattgtagattttccgagtaattgcacaaaaattcctcaatttttaataagggaaatttctttaattccagtcttcgagctaaaagtaatatttttttcaccaatgttatttatttctcgtcgccgggagaaaaagcaggagtctttgcagttgatttttcaatcaacccacccagcagaataaaaatcgctggaaaacattaattttgcaaaaaaaaatatttaaaactttttgggagattcaggggggacaataccgggaggtggatattgatatggaaaacaagctattcccgaatccgtaccgtgttcccatttaaaaaacgaaaatgtcaggaggacgtaaagaaattttgaggatcttggtctgcagcgatctctaatacttacaattagtcatgcaattcaaaaggattttctgttaatgaacaacaactactgctgaactaaggcggacgacgatggaccagcggggggggggggaatcgaacggacgacggacctgcgtacggaagggcggaaacggacggaccaacgggagaatgaacattggcgacggcgattgtgaacggcgcagaggcagaggtgctgtctgtcgtcacaaaggcagcgtcggtggttgtgaaggcagcattgctgcagcattcaatgtccacgccgctgttcacgcaaccgtgcacaatgaggcggaggacactccgcactttgcagaacaaatactattaaaattcattaaggatcagtatattaaattaataaataaactcgccgcaagggagagaaggaggatgcccagcacaacgcaacccacaattattctgtaatcgtccattaaaaaagagtacaatttttaaaccgaccccaaaggaaattttgtgacgggcgtcaccaccgggacactgctggggtccacaggcaccttcggatcggctttctcctcctaattctcctcttcttttggtggagttggcaccgggcagtcgcacggcggatcactgacgttttcgaaaaattgctttttgatcattgtgagacatttaaaaaattcactcaatttttatttaattatatttacggctcaaaaaagcaatacatctagcagattcccatacaattgtggagtttttcaaaatgtatattaccgtccatgaaaagctgaaaaggcctga

SEQ ID NO: 23711 - DNA, 1127 bp, Heterodera glycines
tacggacactaaaatgccgtattacagtcatttaaaaattgccattataacggtcgctaattaccgatattgccagtcactcaaattgctgtaattacagtcagtacaattgtccttattacggtcaaaaaaactaccgcaattacggtcactcaaattgacgtaattacgtcatatcataaaaataccataattacactaattctgggttttcaaattattgccattattgcggtcatccaatgcgcatacctgagtggccgaacgcgttttcagccatatgtgcaggatggatgaggaatacagttgaaccggcacagtaacaatgccactcgtgtttgaaccgcccaattggctactgtaagaaaacggttttttcgctttgcctatgacataataattaaccgaataatgccccaggcaaccactgccactacgatacaaactccgactactgtaagcacaattgtgtgctttttggccatttggaataatttaggaaaaaaatcctctaaaataggcaatttttaaagaatgcaaaaatggaaatctgttgacataaaagcaaagaatttagataatgtaaataaaaaaatgactttcttatcattaaacaattttatgaaatgattttttcaaaaaattggcagaccataaacaaatcataaatcaattaactgaccgcgaaaaatgcgttcaaaaatgtcaatagaactaaaaatgattgataacaaatttttgagaaaaaataataaaattttaaaatgtttgtgttaaataaaaataaaaaaataaaaaaaaactaaaacttaaatttaaatttgcattttattttcaattaagtaaaaatgaatgcaaacacattaaatttaaaataaattttgaatataaaagcaaatttaatataaataattggaaaaaaggcttatagaatgaattgacaaaaataagaaatatatcaaattttgaaaaacattttaatgttttcatagattaaatttaatagaattgaatgaattgcctatcgaataaaaatgtttttgtgtgatttaaatataaaggattaacctccctaaactgaacaaaaaaaatatttcgcgatggattaataaaaaatgctgtggtca

SEQ ID NO: 23712 - DNA, 1666 bp, Heterodera glycines
aaaacagcccaaaagctgaatccatcgggcagagttgtaaagttttgccttaattaaaggaaaatttatgaacggaaaaaaaaagttaattagcgattatgaacaattacccagggcaataattaagctaattgcgcgaatataggcaatatcaattttataaataaaaatttttagtttaaatttatttaaatatgatgatttgtagatttttcaaaaagtccaaatccaacttcacataattctgaacaatcaactagaacggatctaacttcccctgaaaagcaaattggaaaggctcgtgcaacaaaaaataatgctgctggaaataaacggtaagaaaaaatttaaaaattttttatccctaccagtttctcccactttctttccggaacgggccaactccgtctggccaactccgtctgagccaactttgagtaaatataactcttgaagttattgaccgaatcaaacaatcttgatatcattcgaaagctcttcacaggctctattagcctactaaaaattacagaaaatttcgaactataaaaaaagatagaaataaaaaacttcgaaaattctgccttttttgcggttttcaactgacaacttttttgagagctgattaatcactgagaaatagcttataaatatcttctaaacatctagggcttttgaatgataacgtgattgagcgaaaatgtgcaacatccataaaagaggaatagatattggaacaatgggtgagcaagaacctttttgaagtgggggcatccattggggcaatggacaaattaatgttcgaatgggcgaacattggatggaaatagcagataaaagcgatgacactttggttgaaataactgaaaaagaattccgaatttaggggtgtaaaaagacaaaatttattcaaaaaagtaaaaaaattaggccaaatctgtattgagctaaaaaattttaaaaccacaaattcttgtcaagaaataaataaatttttgagattgccacgttttttgattgttcgagtcgtcgtcgtggcactgtgaagcgattttgtgtataaaagtgaatttttttgaaaactgatttttgacttttttgttcgaattcgtgttcggggttcgaattggcttaaaacagatgccagaatcggtttccccgactctgaaaaccctaaaataagtttatttaaataaaaaatatttttgaaaatctgagtacagataaaaaaatatcggaaaaaaagattagttttgccttcgaacaccttgaaatgtattgttttgcaattgtgcgggtgaaaatgataaagaatgagattttttgggatttttatgcaaaaatcctttgattttcaaattttaagtacatatttcgcacatatttcagcattttttagcacatatttttattacatatttcaggatttttagcacataaaaatccggtctctaacaatcaatatcctgcttactaaaatatatattttaccaattttttttatgtttaaataattaatattatatcattatgccatttactcaataattttattttataaaactattttaaaaacaatattataaatcataagaggtttactgatttataataattgaaaaatatatacggttttactgaatatttgctatttttgtattcattt

SEQ ID NO: 23713 - DNA, 742 bp, Heterodera glycines
tcaaaaggaattttaaaagatacttaaataaaatcaattttatagaattttaaaatattgcttcctgattctcaacaaacccaagcaaatgtaattcaaagtcgagaagttctttgttcaagaatttatagcatttaccctaaaaaataaataacaaaatttcaattaatgtttctcataaatatcaaaaaaatcatatattcgggcaaaattgtaaaaaaataactatttattaaatacccataagagaaaaaaataatcattagaccctttgctagctaataaatattgacatttaaaaatgaaaaaaataaatttattttaagataaacgaaaataatgataaaaatcattaaaacaatttttacatggattatattcaattaattaactacgccgtgataatagaaaatttaaatttaatattaaaaatataaaaaaatagtgcaaatacaaatcagtaataatataacaaaattgtttaaaaagttaataaatgataaagatttgttattatttaaaaataataatttctgaaaacaaattttttatcataataaaatttaaagaaattaaaaaattatataaataaattgtttatattaattaataactagcgggtgcgtgaaccgtcggatctgggcttgggataaagcgcttcgcgcttcttgagcttcgctacctagatatgctattgcgttgtgaagagatttagaatttttacaagattatctgggatttt

SEQ ID NO: 23714 - DNA, 1366 bp, Heterodera glycines
ataaactaacttttaatggctgaaaaaagtattttacagcaataagatcgttcaatccttatgataattgggacacccccaaaatacactgaaattcgggaaaatcttcgaatgagggggttggaaaatatttggaaaatttatgtgagatttcattttaaaattaaattcaatgaccaaaacaaataggtgtaaaaataagttttaaagtaattggttaaaaaagaagtagcaagatcccagtaaaaatcccgtcaatttttaacgggagtaccggcgtgaactggagtaatttccaaatttaaactataatttttatatacaagatttaagccacaaaaaattgtgaaataggcacctaaaagggcaattattttcatttattgtcttttaggtattaaaacaagtaaaatcttaatcaaacgctaaattttggttgaaattattaattaataaggacaactttttaaaccagaaaatttatcaagaaaaattatatttaatggaatcaatttttgggaaagatttttaattcttaaggggtgtattttctgaaaatttatcggtcgattcttagaggtgtatttttcctttttattggttttgtgttaagatttttccgaaaatactgaaaagcgccaaaatcatactgtatttccctcaaacttttacagtacctcttacatttacttttgcataaggcctaaccacactgcaaatttcagaatttttatgcacttatgatttttaaagaaaaaatcagttttttccaacctgaacgtcaacttgggggagtcgtgttttaaaaaggcgattttttgtaaaaaaaaagttttacgaatatgaaaaattctgaaattttgcatagagttaggtctcatgcccagtattttcatgcgaaatttcaagccattatgataactcctaactgaattaccaaaatcaacttgagcaaaactcaagtttttggaacatcaaaatcctttctctactaataatgactgaattagtaccacacgaaagctctatatctttgaagaaattttaagctttttcaaagcgattaagcaacccataaaagttaaagcttaaaaactcgggaataatcaaactcattaaattttccaagactttaagccaaaatccaagaacgtccttggcatccaaagacggatacgagccccgttttaaggtcatttaaactcaacaacaaaaaagtgtatttgacttaaattcccatccccaatgatgacgaatttattttcctttagcacagcagacgaaattcgcaattcccaaaatcggagtggagagaaatcttagcatatttcaaaaaaaagaaaaattcttaaaaatatttaaatta

SEQ ID NO: 23715 - DNA, 1763 bp, Heterodera glycines
taatttagacattatttcattgaaaaatgttcggcgctttagctgtggggcgcgcgaatattgtcaaaaatcaggcccgaccaatgcccgaaattggcacaaccgtcgcactgtttttggcaccaaatttggcacccaaaaaattcggacaaacttttacggatgatggaacaacttcggcacgatgagacggtgagatttttggaagggggaaggattgggtcaaatgtatgccatttttgtcatttgcatcttaaattacaaaaagttatggcattatattaatagtgcgtttgtttttactattttttgttgtattattttcaggcctcttcccaattcgctcctttcattttcatgccaaattgtgctccgttttttgcttggttactgtcacaacaacaattaccttacagcaacgggcggcggcacaaagcaacaaaaggtgccgacaatggcattgggctagggggaagtactgcttccgcctttgttgtgttcggccgaattggcgacgtcgcgcaacggaatggaactcgccgagtggagcattcccttttcgcacacccaaattggctgaaaggagcggaaatggttcgaaagcgatttatatttaaaaaaacaaaaaaatcgctgaaaattttgacacagggggaaacgacctgttccgggttaattgtgagtagttcatttctccaacgccggttctccccttcagttttcccctaaccaaaatttgttcctaaacaaatagtttctaaaaaaattaattcgaaatatgtgatcctccgtcctccatcaattttcaggtctctgatttgtgttccgacgttgccacaaaaatggatgaccagaagcagtgcgtcaacactacgacgaacaatggtcttgtccaccatcgtcgattgtcgtcaaaattggaatggctcgtatttctcgtggaggtacaaaatgtttattaattatttttaataatttattttccgattttagcagtgccactcggtggcatcgtccaatttgtcctctcttgagctgtctttggccccatcagaagccattttggtgagttttgccaattcaattttcaacatttgctccctttccattttggtctcgtttctcggcctctgtgttcgtcacgctgtgctccattttccaacacgttcaacaaacattttgccaaaatggcagtgccaaatttcgattttctcaaccgaatgtatgcacaaagaaattattgtaaaaatgaattcttgagattttcgaaatatgcttcacattatttccttttaaataattaaaatttattaattaccttcctaattaggtaataaattgtcttccccccatttagcccacaatttgtgtcccattgtcccactttttggccagcatttgcagtgtttacaaagcgcgcattgactccgatgagcgctggactttgctcaaatttttgcctctccgtttcttcgaaatgccagtaaaaattgcgagagaaaatggtagaagtgccgaaagcgaatttttaaaaaacattttgattttttaagaaaatggaaaagtctccggagacggacaacagaagctcggtgaacaaattgccgaattcaatgcgcgaacaattgctctgtcgcattttgccaatgcgcaagcgtcgcccaaaacaactccgattttgtcaaacaacaacggcacaatcggagaccgaattggcaatgggccaacggaagcgccgaaagccaaacggagagaagagataa

SEQ ID NO: 23716 - DNA, 1976 bp, Heterodera glycines
cgcgcatcgcggattcaatttgccgcgatcgcggatcgcgcaaaaaaaaaaacgccgcgaatcgcgcatcgcggtcgcgctccacccctgatcggcaccgccggaccctgaactcagcaattgttgtaaaaaataatacgtttctgatttttgataaaaaatgtgtaataaactgattaaattaattgttgattggataatttaagaaggattttgttttagttttttaaaatatttaattttttagtcactgaaaatattttcccgttttgtgcctggccaattttaaataaaatttctgcccgaccattttccgtaaaaataacaaagaaaaaattttgattaatttttgtataaaaaaaaattcgtctcgtctcgtgtctcgtattttatttccgtctcgtttttctcgtgtctcgtgtctcgtattttattttcctatttgcaacggttataggacatttgcggtccggacatttgcggcctgctggaaatcggacatttgcggcccgacaaatgcggtcggacatttgcgcctcggacatatgcggcccatttcttatgggccattttcggacatttgcggcctgctggaaatcggacatttgcggccaacggaacgccaaattatcacttttttaattccaaaaacgatatttgcggctcaactttttcgactccaaccaaaatagtgctaatttatcgaaaatcgtttttcctcttgaattttcgatgaactttattcaatctagtaattttaattgggtcttgtttcgctggtggggagagagagagagaaagagaaataaggggagagagagagagggggagagagagaaataaggggagagagagagagattaaagagagagagggatatgagcgaatatgcgctgttaacaaatcgcattaaaaattaaaaaatatcggcaccgccggaccccctcccctcgctcattcaccaaaagttttttggaaaagtgcgccgcaaaaaattgttataaatctcgtttttgatcccgaatgcactgaaatttaggatttgcgtatttcctccccaaaattgtaaaatcgattatgggaggtggaaaatataatattaatacatttttgatcgaataaattgtaaaaataactgttttgacgcaatttcgcaaatgttctgattttcgaccctaaaatctgattttttgagcctgctgttctgatttagaaaaattttcaatcgcatccctggcttatttcccacctgatgccctcgggcgaccaaccctttccaccaattcattgacagttttggcaactgtttccgcgtcactgtcaaattcatgctttggcgtgatcaatattcgacttttttccgaatatttgccgggctttggcggcacactttggtgaagtggcgcgatgatcgcaatgcgcaaaggctaaaattttttttactaattaattttcataacaacaacagttaatgtacaatattgcaacccgtaaaaactaaatctttttttttttgaataaaaaaccgaatttttatttcaattaaaatatgattttttggtatttttaaattgtcattgaccgaataaaaattatattcatttttgtttttttcaccacaacatattattaaactaacatttttatattgcgactaaaaataaaaaaaatatttatctaaattaattaatggttcactttaaatgccttggcaaaactgttgtcgctgatcagtggaggatccgacgctgacaaatcgtcaacatccgaaattggtgatcgaattgatgattgaaaggtgaatgcgtcatggagcggtggagacgaaaacagcagatcttctggatcactcgctgagctaattgagcccgggaatttgtcaagcgaggacggcgatgaaacggccgaatcgctttttttgatcaataacggggccagcagagggttgggttgcattttgatggaggcccagcgct

SEQ ID NO: 23717 - DNA, 1541 bp, Heterodera glycines
gggggggggggggggggggggggggggggggccccgggcgagggtgtggagaaaaaaaaaaaaaaaaaaaaaaaaaaaaaaagggggggggggggggggggggggggaaaaaagggcccctttttttttgtttttttttttttttgtggtttcggggcccccttttttttttcccccccttaatataatttttttccccggaaaaaaaacttttcccaaaaataaaaatctttctttcccccccaatggggggcgttttttttttttccccccttcggggggggggttttttgtttttccccccccctttttcccttttttttttctttttcccccccccacattttttccttttttttttttttcccccccaaccccttttttcccttttccggttttgggggggttggggggggttcccttttttcccttccccttttttcccctttttggggggggaatttttttttcaattttttcccttttctttgaccaattgccaattgtcccttcctttttggccgttttttttatttccgtcgcttttcctcccctcccaaaatgggggaagttcgctttcactcggattacgtttcctccaccgcggaatcccaaatcatccaaattgtgctcggttttgtcgtctgttcggtgctttgttcgaattggtgtcaaattgcaaattaacgtggtaaaaacacacaaaacattttgaggtatggcgggtacagctgtttcggggagggccgcctcggttatgtgagcggattgaactttgtctgtttgatgattaacatgtgagttgagggaaggcggcactgacaaagagcaaacgcaaatcatcgcctgaggaattgtttgttttcataataataattgatagaaattgtcggattccccccccccccaatcggttgtcttttggtaggctaattgatcaacaattcactgatcagcagctgataattggcaatgggctcttatgcagtttaacccccataaatttttttcgcatttcatgattaaaaatgccaattaataggttttcggggtcgctgatcacgaatccggcatccgtttcgaccaattccgaaccccggacccgaatttgaacaaaaatttgaaattccaaattttcaacaaaattcacatttactgcaaaaaaacaattaaaatgccacgaaatgtgtgagtaaaaaacaagaaattattggattctttcacaaggatatacaacgctaatttgggaccaaaagttaaaaaactgttcattgtgaaattttggagttcttccattttcggttttatttttggggattcggaatggtgacagccgttcaaaaacacagtgttggcccattacaccacagcaccaacccctccctccccttccccctccactttggaatttgaacaaaagctcggcacggcagcagcgattggtggatacaaaaggccttaaaattcacagcaagtaatggatggacaaaggccagaagactgagtggagagacgaaagatggccaacgaacggccaaatt

SEQ ID NO: 23718 - DNA, 845 bp, Heterodera glycines
atccttttcctcctctttctccccctccttcttccgtcgtatttttccttttcctctctttctcttccgactctcctccttccccactgctattttcatccttttcctcctctttctccccctccttcttccgtcgaatttttccttttcctctctttctcttccgtctctcctccttccccactgctattttcatccttttcctcctctttctccccctccttcttccgtcgaatttttccttttcctctctttctcttccgactctcctccttccccactgctattttcatccttttcctcctctttctccccctccttcttccgtcgaatttttccttttcctctctttctcttccgtctctcctccttccccactgctattttcatccttttcctcctctttctccccctccttcttccgtcgaatttttccttttcctctctttctcttccgtctctcctccttccccactgctattttcatccttttcttcctctttctccccctccttcttgcttcgaatttttccttttcctctctttctcttccgtctctcctccttccccactgctattttcatccttttcctcctctttctccccctccttcttgcgtcgaatttttccttttcctctctttctcttcccgctctcctcctcccccactgctattttcatccttttcctcctctttctcccccctccttcttgcttcgaaattttccttttcctctctttctctttcgattctcctccttccccactggtatttttcatccttttcctcctctttctccccctccttcttccggcgaatttttccttttccctctctttctctt

SEQ ID NO: 23719 - DNA, 1798 bp, Heterodera glycines
ggcgaaaagttggcgaaaatggcggaaaaaaccgatgacattttggtcgatgtaactgaaaatggatggagaaaaattgtataaatttttagcatattagccaattttacaagatgctgatgcgttcgaaaccgatgactttgcgtggcatttcaatttgcggaattggcaatgcttctccaccatcattgacaatttccacttccttggtgccattctctccaattttgctgtgaatttgaataaatttcagcgcccatttgcgagttttgaagtgttcgtccacgtaaatgccaaatcggtgactgatcatcgcaattccgtggccaagttgtgaaggcgtaagcaaatcgaatacacaaagccaacaatcggcggagatgaaactgaaaaaataaatttcaatttttgaaattttatttgttttttacattttcttttttggtggttttttgaagtggttccaataaaaccaaagaatggcacaacatccgacaaacattggcacaccaaacagactaaaaaatgaaaaggaaaatggtgaaattgtgaagaaatacgaaaaacgtacagaatcatttttaaagacattgtcagggcgaaaaagtcgcagagagagagagacgaaggcgaatggaaaataataatgaaaatttctttcgtcgctttttatatgttttccattacataacaaattagataattatgtttgtgttggaaacagggctgcacgcaattacggattacggattacggatttttgggatttttccgtaattttgatccgtaatttgacttttggattattttttcgagacgatttcttgtaagattatttttataaaaaacaaatttttctattttttatttaaagggctacccgtatttcgatttatttaagaattaaaatagatttataattttttattatttgttgttaaggctatttgggtagttcgcctagaaaatagaggcatcacttttttgtcacacctatttttcacgcattttatgaaaattcataaaaccttagccaggtgaggggaggaattccctccccccccctcccccgcccgaaatgaaaaattaaaaatttttacaggaaaaattgggacttttaaatttttttttgtcgatttttcttaataaaatcattaaaatttaaaaaaaaaaaaatttgcccggcggcacctatcggcaccgccggaccacgatttactcgattttaccttattttttaaaattttgactacaaaatggcaaaaagtagtctttttttggctaaaaatggttacaattcctgtttttgctgtccggcgctgaacttttttaaaaaacactaaataaattttaccaaaaaaaattcttcggattcccccccccccccccgtaattttttttctggctattaaaatgttgaaataattatatacatatacataaatccaattataatgatcagactttcaaaaaattttcaaaaatcaacccataaattcaaaaagaatgatttgatcagacacaaaattataaattatttgtaaaatttaaataaaaaatgaagaaactccatcaagaaaatcagttttttgatttttattaatcattatttaaaaatttttttctaaaattctgacaaaaattgatttttaaaaattacggattgcggattacgggaaattacggcgtttttggacccccgtaattacggattacggatttccgtaactgagaaaatcgccgtaattacggattacggatttccgtaattgcaaatccagttgcgtgcagccctggt

SEQ ID NO: 23720 - DNA, 860 bp, Heterodera glycines
  unsure (1)..(860): unsure at all n locations
agttttgggggcgcggcggggccgataggcgccgccgggggaaaaaattggaaattttgatcatttataaacagtttttcactgaaaattatccaatttataggtaaaattttgaaaaattttatgggaatttaatccaattcttaggggtgtaaaagtcgcgtttcgcgccaaaaagcgaaatgcgaaaagcgaaatgcgaaacgccaaaaaatgcgaataatgcgaaatgcgaaaagcgaaacctaggcacatccctggtatatattgcttttaaaataaattaagcgatttcctgaaactgtaattgattttaaaaatgtttaaaaaaagaattaagaggcccccggcattccgataggaaacgtgggacaaatttttgaaaacacaggtcgaatttcaggcgatggtaaagaattggggtctctaatttgttttatattttaggcgcaaatcagttttagagggtactgatgacgaatcggaattcgtacatattttgtctaattcctaaaccccggatccaaatttaatagaaatattttaaataacttaatataaattatcatcgctagggacgcgacttttagtgacgaaaaatcccgaaatagttaactaaaatagtgaggaaaaagtgctaaaatagtgaaaaaagtccaaaatagtgacgaatagtgacataattttcagccaaaaaatgagcaaaaaataatttttattcactggttgcacttgccaatgagctgctacatttcttttataaaattctcttagcaaatattgacattttttanatcaaaaattttgtcaagaaaaaaaatttggggggaagaatttttgaaaaaatttttccaattctt

SEQ ID NO: 23721 - DNA, 873 bp, Heterodera glycines
aaaaaaaatattttggttcgattcttagggggtttaatttttagattttttagcatttttgttaataaatttttcaataaatttcgtaataaggaaatatagtgacaaaaatgtcaaaaaagggaattttccgtattttaagtgacgaactggcaaaatagtgattgctagggaggaaaaatgacgtccaaatgaaaaaattttattgcagaactgcgttttttagaattttttagattaaaaaaaatctaaatggattttctagcctagaaaaactttttaagacacttaaattttcaaaaaatttaagaaattaaaaaaaatcagctgaaaaaattcgtaaaaaaacttaaagaatttttaaaaagtttttacattcgtgtttcgtgatgcaacaatgatcgagccaagtgatcagcagcagaagtgaatgaatgatttatcgagaagtgatcaaaatagaatgaagtttgatgtatataaaattgttcttttgttgcggtgtgatcacaatttgtattatatatttatatatgccttaggataaattaagcggttttctgaaaccgtaattggatttaagaatgtttaagaaaagatttaagaggtccgacattcagataagaaccgtggggaaattttttgaaaacacaggtcgaatttcaggcgatggtaaacctccgatatggatttcgcgcatcatttgatcctgagtacccaattcctgcgcccagaaataagacaaagaaaacacctgcttaatagcaaggtgagagccggcgaaaaaagtgccaacaaggcagcccatttccggacgattgcactgtgcgtttttgcaactgcattttccataatgctgatttgggcgaggtt

SEQ ID NO: 23722 - DNA, 2179 bp, Heterodera glycines
tgtgaaggagggcgaggagaaggaggaagagcctcgagtgaatttgcttatctgctgcttctcgttgccactatttgtgggtggttaagaaacttataattgtgaaaattaaaaaaaatttatattttgtttagagccggaaattaaaaaaataataattaattttaaataatgcaataatattattgagattaccatttctcagctttgtgcccgcttgatcgggtggctttcagcagttcctctactgctcgccatgttcctgtttccatttgcttcctcgtcaacatttgattttataccagaaataattttgttgggtaatttatttggttattttttaaaattaattttcctaattttatttgatgtttttacattaaggcgccgaaatgctttgtgtgctttcactgttttttggccttcagcatcatcagcccaattatttgaggccattcctattttttggcgtattttaaaaagcatttttttcgtttgaataattatttttaaggtcatctggaacttggcacttttgcttttgctccttttcgccttggtaaaatgtttgggctgttttgaaagtagaaatttccaatactccaccagaccgtggcatgaaattaactacgcgctacgagaccgaaaccaaaaaacccacgaatttatggaccccgaaacagagactttattcttagaataaaaatattatttttacagcaatttttaaggcttagatttttaggaaaccagcctgttttttacggaaatgaaatacaaatatgtgacttttgcttttttaaatgcctaaaaatttagtaatattttaaaactgaaaaaatttatcattttcccgttttaaccgaaaactcaagcttcatagtttgtttgtaaaaaatcttagtcgagaccaaatgcttgagaaagttttccgagtctcaaaaaccaaaaatttcttgatttgaggatagtgaacagctctaggaaaattaatgccatgaaattttgccctaaaatctcaatgcccttattttggattccgaaatggataccatacagtacattttaatatggtaccttttttaatatcgaattgtttgtgtcaccggcacggttttgtgttcaattggatctgaccgttcaaacattgctacacggcaaccagcagggcagcaagcacgcttcactgatgcccgaggaacatcaaaacgaagacggtaataaatggaacagaaacggtccaagggtgggttacggtatacggagtaacgcctcaccagaagcgagggtggatccgaggctaaaactgcccctacccagacaaaccagataggatgaaagattcttaacaacaataaatcataaaacaggcatagattataatttttctccacggtggcacagaactccccctcccaaaaaagctccatggtaaaaataagtaaaacgtactatggtcaattatgttatatttaaatcatttttattaccacaaacaaaactttttatttttttaatgtcattagaattctaagttttattctattaacattttttgactttgtccacttttttggaacctaattatttacttgatttattatataaattactaatttggcctaccgaattaaatcaaaatgtttatttttgttacttctaaaacaattttggtgtatttttattggaaaacaattatgaattgttccatcataagttccattaaagccgtccaattcaaaattctgatcatatggtcttcaaaacgcagattagaatatataattattaatttttgtttattttagcacccaacaacacgacatttaccatggcattttgttttatcactcttttggccataattattctgctcaatggatggttgttgaacattgttttgttggcatattttcatatgcaaaaggcatcatactttcatactttaccctccctccatattacggtaattaccaaagaaatttagctgcaaaacgaggacaaatgcattcgacagaaattgttggttaagccaatgaggaggcgtacgttagtggaggaagacatcccagcgccaaatgtaaaaaaatgcattaatagtctcggtcatctagattttttgcaattgggattttgcaataaaaaatttgagtctttgtgccgattctatcaaaattaa

SEQ ID NO: 23723 - DNA, 1017 bp, Heterodera glycines
cgaaaatgcaggaaaacagtgaaagttttagaaatatttcagtgtcgaaattacttagtgacgaaaatgtagtgtcgaaattacttagtgtcgaaaatgtagtgtcgaaattacttagtgtcgaaaatactcagtgtcgaatttacccagtgtcgaaattacatagcgccttaaatttgagccaagtgatatgaaatcgctcttaaatattgcaatgggtcttgacccgctcgttgttggaattcagcgaagagttgccgcaaattgttcttgttgtagataaatggactttctcttaaggccctttccccttatcccatttgccggtgcattgtgaaaatcggcaacaatgtgctgccaacgttcaaattctttaagcattcgcttaacaaatttgctgaacagtgggtttggttcaagaagggccccccaaatgttatgccacgcttctaacgaattgttgcttcttgaaagaccaatttcgaggcgatgagtcagattccatagctaaattacagaaatatgtaaaagtagatagtcaagaattttttaccgctattggaaatagcatttggggaattacatttaggcactcatgtttgggaaacgagaaattttgacgtccattaaaaattttttacggtgatcactgatcagacactccaaaatttcaaatacataactttatttaaaaaaaaatagttttcactaataaataattctttattttatttcagtgacgaaaggttcagtgacgaaacgttcggccaccaaaaaaaatttgttatacttctcgtgtaccataatttattaaatctatattgtctatctttatatcttaagcaatatttggttacttattaataatgtctgaagttgaaacaaatcgtcacaaggataaattaattaacgatggactcctttacattttcgacaaatttaatgttgatattagtttgaaattctggcgatgcgaacgaagggacgaatgtcgagggcgaattcacaccgacatga

SEQ ID NO: 23724 - DNA, 927 bp, Heterodera glycines
  unsure (1)..(927): unsure at all n locations
cggacccggggatctctagagtcattgttccaacggctttcactcaatgcattcgtttgtttgttttgcctcccttttcaatgcttttcaccggcggcgtgcgaaagggcggcacaaacggcggaaagtgcgttcgccgccactctccgcgcagcggcggctcattacgcccgcttccgtcgcattcactccccggatcaaaggagcaaaacgcggcttcgcttttctcctccatcgatcgcaaagattgacaaaaagctcatttaaacaacggcaaaagtgcccatttggcgttccttttattctgttttacttgttgaaatggacaaaattacacatttgccctcggctgtgtgagtccctccccaattccccccctttcgcacccatttcaatttgcatttctctcctcttctgccgctctctccatgttaaccggttacaaaggtgacggatgccctcgggggttggtggggtgtcccccgcggggattgttttgtccgtgctcactgcattttgcgctggtcagacattgccccaggggttctgtctgtctcccccacccctctcctctctcccgcgcattgtctctctctactctttgtctcttgtatctcctcgccaccacactctctcctcaccgtccattcactcactgtgcataatttgcctcattcgccgccgcacattcaatttgaaatttgagtggtcacacccatcacaacaataatctttcgccccgggcacagtcatcgatcgtcgcatttgacaagaaagcatcgcgggcattcattcatttccgcagattcgccctttaatacaaaacactctcccacagaaaggcaccaccccctgtcattgctaatttctgtagcttcatcactttcaatgtctttccccaggggttaactttncaccccccccccc

SEQ ID NO: 23725 - DNA, 1938 bp, Heterodera glycines
cacatattctgaaacagaggtttcaaatcataatttaacacacactaattgatcggacccaatcataattattttatcttttctctccctcctctctctctctccctctccatttccctctctctcgactttctctctatctctactctcttctctctctcctctccttctctcccacccctctctctcccctcccattttctctccccgcgtcaattaatttttgccaaatttgattgatgtggccttttgcccacaacaattcgtcgttcattcattttcattttaggtttatttattcattgttacagtactttttgaattggacgcgcgatgtttggagcagaagaaaatgggggaaattggaaatatttgaggagacagaaaaaaagagaaaagaaaattggagggagacagacaaaaggcgggggatttggggaagaaattgaaaaaaggcaaaaaaggaagaggaaggaatattgtaaattaatggaaaatgaattaatgaaatggaaataattaaataatagccatagataattaaaatggagagagagagagaggggtagagaaagatagaagacagaaggggtaaaggagagagggaaagatagaagagagacagatagaagaagaaaaagcgagagagagagagagaggagagagacaagaaagataaatcgaagtcttttgtgttcaaaaaaacataaactgagagaagcaaattagtaagatcaggggattaaagagccaatttctgatcattcaacaccgccggtgataaaaaatgctaatgaacggactgattaactcgggaagaacagctcagtgataggttaagcttaagcattaaactgaccattcattttcatccatggaaatgtctgaactgtcgtcgaactctgctgatgatgtctttgctggtggctgtgatcaacaccggcggatgagaaatgggcggacgaagacgaagaagaagagggacaatggacagcggaggaaggggggaggacgagggaagaggaggaggagggcacggcaccgtagaaactaaacggaggggggagtggtcgaagaatggcacgaagacgaacaaaacgcgagagcacagaaagaaatgccgaattgggatttgaatgagggaagaagggccaaaagggaaggaatcagcggatgattgatggtcggatttaaatgatcaattgattaccaccagctttcaaaatggtaaataccctcctcaattgcttttcctcggcttctcgcccgcccccccccccaattaaatgttttaattttacccaacggccgccgctgctgccgctgtgtttgcctctgcccaatgagcggccaacatgttcttcatgtactcgcaaggaaccgcaggcgcgcaaagcgccggcgacggaaagccggcggaacccatcgccgaagcgacgcccccctcggcggacatcgctccgtcgaagaacgccttgggggcgaactccttgaagaaatcggagtattgttgtgccaatgttttccaaaatgaataccttagctgtgaattctttttgcacgtcgccgcatggccaaacggacgaagcgccgccgaagagagccattgggccgacggagacggcgccggaagcggacgaaacggcgcaaagggcggccgaggaacccatagcagagcccacggcattgttgtacatgacgaaaaagcaatgggagaggtggaaagtgccgatcgaaactgctgaaaaaggcatcaaaaagattgaagaagcaaatagtgaagtcggacgaaagccagccattgcattttgactttttaaaattaaaattttcaaatttgctgcttgcataaatatgtgtgttgaatgggctaaagatgtgctgctctctctctctcacggtctttctctctctattgggataaatttgggggatttg

SEQ ID NO: 23726 - DNA, 1960 bp, Heterodera glycines
  unsure (1)..(1960): unsure at all n locations
aaatagtttatttntattatttttgcattcatttaccatgcnaatanatgcggttgattaacgcaatgtctttgaatgatggcttttccctctgcccagttgtacgcatgtaaaaacggttgagggtgaccatgccctttaaactgaactgggaggatggatatatgtaaattaccaaaaataaaacaaaatgtgaaattaaaaattgttttcaatttataaatattttccattacccattttttcttagtcgggtacgataatgcatgactgaggcaaagtcataagcaaatccaaaatttttggtcctatttttcggctcgaaatttgttttccagtcctttaatagaaaagcatttttgttatcttaaaataattacgtcgtcatcttttgtgtcggttacaaatttgatgaacttgcgcgcatcgtcacgttggtgttcatggtggaaaccaattgcatgcaagagctcatgcacaacggtcccaggctatcaaaaaacaaaatattagccaattattatcgtccgtcccatcggcaaaattgcggtttcgtatatatcaattacaaaactttcaaaaattcctttaccatttttgagaaattaattattaatagggcggggaattatatggacataaaatcgcaaaaatatggaccaaaaatcgcgaaatatcgacataaaatgctaaaaatatggacataaattttccaaaattgagtgtataattctaaaaatttcttcaaattcgctaaatgtaaagtaaacctattaaaaatagctaaatatggtatcaaaataccattttagaagaaaaaaatatgatacagctaaaatttgctcatttttaagcgaaaaaccaacccaaataccaaaatttccattttttgcttatttttaacataaattaaccaatttttaggaaaatttaaatttaatcaatattttctacaaaattttgctaaaaaatgtctttttcggaaaaattttccgattttgggtggtcaaatccgaatttatctgatggggggccgttctaatagagatttttttgaaaaatgccaaaatatagacttaatgccaaaatatggaaatatggacataaatcgcgaaatatggaaaaatatggatatggaactccatcctagaagcttcaaaccaagctaaaaacatgtttttcgtgcatttcaggccccccatagtccagaaaaaaatatggatttccatataattcccctccctaattattagtgtgaattaggaatctctcgcttgtgtttatttctacatacatttcgttgccccagggacagtttttgccatcctcctttcttcccgacttttgaccaagtgtccccatcgtcaaccacagtgatcccatcggttggattgtttctcagatcggtggtaaattttacgcatgtgtgcttactgaaataaagtaacagtcaaaaaaagcgtaggagcttcaaaaaaggcaaaggtcattttttatcattatttttatgtcaatttattgaattttgcattaaatttgctaacagagcgaatagacaattttaatatagggttgccagatctgaggatttatcctcattttgtggctttttgataggtcaatgaggatttttttggaaaatgaggatttgaggatttttgtggctttttgagaaattttgaggatttttgaggcttttggggaaaatcctcagaatcttttaaattttgataaattggcataatgtttggcaatttaaagaattttttaatgaaaatatactaaaaatatggtcaaaattcttaatttttcccccggcggcgcctatcggcaccgccggaccgtaaaaatccttactatcggcaccgccggaccgtaaaaatccttactatcggcgccgccggccccccttgcgccccaaaagttttttggaaaaagcgccgcaaaaaaatcagcttcg

SEQ ID NO: 23727 - DNA, 641 bp, Heterodera glycines
aaaacaaaagtttgaaagaattttccgtaaatttgtcaccattgtatgaaaattacaaaaaaaaatttttttaaatcgctaaaaatttgtcaatttttcttggaatattccgaaaattaaaaaaaaattacaaagattctccgggtgcaattcggttccctcccggttttcatttttttttctttataaaaatttgccactcaattttcagtcgtccaaaattctgtgcccaatcagtggggaggaggtgcgcttgaaggaactgttgcccgtcaaattctcgcccatcgatccgcgcatggaatttgccaaattggtcgcgcagcccaaccgctacaaatgtccgatcacgcacgacgtgctgaccaacacgtctcgctgtgtgtacctgaagacgtcgtaagttgatgtcgtgacacaatcatacatgtaaagagggtgggatcaatgggataaaaaaaatactcggaaaatcacattttttggccagccatgtacaccccagaacatggccgctgaaacttgccacaaaaaaatttttttttaatatctatatccggcaatgtttcgaccggggaaaataaataaattagaaaattctggaaatttttttcaaattttcggtgggaaatgaccggggg

SEQ ID NO: 23728 - DNA, 806 bp, Heterodera glycines
aaaaatagttgaaaaatggaatagtcccttttttaaccctaccggaaaattgagagtcaaatttggcaatcatacccgaaaaaaatcgagctaagtccaaatcaaggtggatatatggggcgttggcatattccatattcgatttgtcatatttaaaaatagtgaagaatagatagtaattattttgcctaacagaaaattgagagtcaaatttagacatcgtagccgaaaaaatcgagctaagtccaatcatgtggatatatggggcgttggcatattccatattcgatttgtcatattaaaattagttgaaaaatagatagtaatttttttggctaacagaaaattgagagtcaaatttagacatcgtagccgaaaaaatcgagctaagtctaatcatgttcatatatgggtcgttggcatattcctttttagatttgtcatattaaaaatagttgaaaaatagatagtaatttttttggctaacagaaaattgagagtcaaatttagacatcgtagccgaaaaaatcgagctaagtctaatcatgtggatatatgggtcgttggcatattccattttagatttgtcatattaaaaatagttgaaaaatagatagtaatttttttggctaacagaaaattgagagtcaaatttagacatcgtagccgaaaaaatcgagctaagtctaatcatgtggatatatgggtcgtttgcatattccatggtagatttatcgtataaaaatagttgaaaaattgattaaagagaatttgaggcaaacagaaaattgagagtcaaatttaga

SEQ ID NO: 23729 - DNA, 1907 bp, Heterodera glycines
aaaaaaaaattttaaaattattttttttttttaaattcatacttattttaaataattttattttgtttttatcaattttgtttttgttgtttttttaatcacttcaaaagtttgttggcttcattttatgtatttacaaagtttacactaaatatttggcctcggaagtgataacaacagttttattttcgcaatttctctctatcaaacctaatgaattaatttttgtaaaattttttatttaattatttaattaataatacatttttaatgtgaatttaatttctcactcgaaatttatttatgaaattggcgggaattactatgttttattgcatttttttattcttctcttttgtgtatgtttaataaaaaaaatcgatgtacttttttcaaccgagaattctcattaaaaattgcttttcttcaaactctcgaaattaattttaatgcattaagacacaaaaatattattaaaaattacagcaattaatagaacttttcatgacaaaaaaatattttaatttgttcacacatttttaataaaatttaatttatattattaatacaaattttcattaatttttcaatttatttgccttaaaataacttttaaaaactaacaattatcttttttcaattttaaaccatataatttcgcattttccataaataaaacaataattagtttcataaacgctttttgatcatgccgaatccaattcagaaaagaatacataattttcgccgcaccaattatttcttctcatgaccttccaccatttatataatcataattagattttttattcctccccgccactaattgctatcacatttttggatatatttgtattatgatgcactgccaaaaaccggtatgtcacgcgaaatgaattttaatatgaaaagattttaattaatttaaattttttcataattttgcattcttttttttgtagctttaattatttttattaatattttaattaaaaaaataacaaatataaaacatatttattcatgcattaaaattttatataattgctaaatgaatttatacaattaaatacctaaatttattctaacattaaattaaaatgattatattatttttaaataaattcacaatttaaaatatattaaatttacaatatatatttttttaattttacgaacgaattttattataaaaattgcttctttcttccaaaatattaaatttgaaccaaattttaataagaaattattaaaatgatttacttacttttcaaataaaatataaaaacccgcgatttatttatacttttttaaatttattttttaattttaatctgaaaattgcttttatataacaagaaaacaattcaaaatattttaaattatatgctttcattaattaataaattaatatttttataaaaataaaattatgaaatttctaaaataaaaataaataaacaaacaatttaaaaacatattgacccattaaattttgcgtctaacgcaccacacattttcctcctacatcctccgcctcattgcctctaccacaattgtggaacctgaactacactaccaggtcctccctcacaacctcattaggaaaacggccaaatgttctcgcgacaaggaaattgaactcgcaccgttgtggactaaattgaaacggtcatccaaaattgtcactttttcgttttagggcccaacttttggatttggcactcaatttcttttacaagttaaagtaatttttccccgcattttaactggatttgcagcgacgttttgatggacagtctcccattctttaaccatgctcaactcggcctcaaattggagctggattcagccccgttctgatggccgtggacgacaaacatttcaacagcaaatccgcgctgaca

SEQ ID NO: 23730 - DNA, 1802 bp, Heterodera glycines
  unsure (1)..(1802): unsure at all n locations
aaaaatatagaaataaactaaaaacagttgaaattactnnttacatgttaaaaatttaaaaatttagcctattaaatatttttaaaaaatttattatatttttttttgaaaaaattccgacttccgagttccgacttcngacatttntggggtcggaattccgacttccgaaaatttttagtgcctcggaactccatccctgatacaagtgtgatttgccagtcaaattatgtgctaatattttgtttgcccctccccattttttgataaaaaatttgtttcagaatcgtcatttgagtcaattgactaaaattgttggcatgcgaaaaactgttcaaagtcgttggtcgtcagaaagcctttctcatccgtgtccaattcccatcaaaataacgcaaattgaattaaacattttttcatcgtataattttgggaaatatttgacttgacacacattattgccttgttctgctgatctaagaagtgtagtgctaattaaatctttttttttggtcaatcaacgttcgatacaattcatttattgggcgaatttttcgccgatgcgagattaatttaatcctaatgaattttctaaatgctttgaaaatattagttaattttgttccattagcatggagtgggaaacagcgaccaaacaatttccgaaaatttttggacaattatttttgaatcagggaaagggaagcaaacttcgaaattgacaattaatcgtgctgatgcatttattaaactgccatccttaaaaattgaaaaatatttttaaaaatttcgagattactttcaaatatttttcagaacaatgaaaaattccaacgaaattctcagagaaattgggaaaagcttctttttttcaaaaagacacagaaagcctttgcttttacgagtaaagtaccagactttccaaaactctttaaataattttttcatgaatagtaaaaaaaactgaaatatccttccagtgttagcggtgcaaattaataggccaaaagaataggggtttatcaaaagcactgaggtagaattttctgtgccacattttactctatatttgatttattttcatttcatttttattacggtattcattttgtaattgaccaaattttgtttgtttgttttctttttggaaccatgtaagagcactaatgtgcctgccgtcttccctatatttcttacactgagatttaatttttttttaatttctaaacttgaaacagagcaagtctcttggtattttgtagggttcgagccccgtgggcgggggtggcttttcgcgggggcgggggtttgatttgaattagctcaaaaaatctcacaaaaaaataatttttatggatgatgtgtttggctccacacattcctttagtcgatgtttcgcctcgattcaattaatttttgcataaattgcacagtttttgtctaaaaaataccgataggcgccggcgggcgaatttgaaatttatactctattttctaacagatattcaccaaaaaaatattttccgataaatttttttgcttcggtatttttattcaaaaaaaactagttatcatgggagggggggggggtccatcggtgcttataggcgccgccgggaaaattttttgtgtatttttaatgcgatttgttaagttttttcaaaaaattgttcaaattttgcgattttgagcaaatttttcaagaaaattaaggatttttaaggtacggcagtgccgataggcgccgccaggaaatctttggaaatttcggtgcaatttattaacagaaattgntataaaaa

SEQ ID NO: 23731 - DNA, 1711 bp, Heterodera glycines
tcgggttttccaattcgaaaagtggtcgtgtcccctgaccatttccattctggtactcttcgcgtcgttcgtcacattttgcacgtttatgccgttcatctgtggcacaacctatcccttttgattccgaaatgtttgtcaggcacattcatcatcattatttctctttattgggcactccgtttccgatttgcatataaaatgaaatcatatttcttaagctaatattcaattttaacattgtaattgataatgcgtaacaacagaactcatttttcctctccaaatgcccttttaattatgactatatcatgtgtctccaccgaggaaggtaagcctaaaaatcgactatccaaataatggaatgttgtcaccttgaaggagtgatctgatcattgtggtacaattgacttctttgatcagcacaaaaagtacactgaggtaaattttttcagattttttgtgctctataaaaaaggttacctgtcttcaatttttgaacttctatttttacagcaaattttggacaattttcgggaattttttgtgtggttcttaatatttatggtgagggtatacttggtaaaaatttcagctcgattggtccatgggaagtaggtttagcaaaaaaattcttgaacttataattttgttacagactgtataagcttcaaaccaagctaaaaacatgtttttcgtgtgtttcaggcccccctcagtccagaaatataaatgggaaaataaatattaaaagtttaaaatttagtgtataacctaataatttgcaatagacaaacgcatataaccataaaaaaaccagaaaagaatgtaaatatggggtgtccttattttaaatgcacattgtaattaataaagaaaaatttatgagtaaaaatcgacaaatatataaagcaatatgtaaagcgagtcaatagggagggaaatgaacaaaaatgaagagaatggaccggaaaaataatatgaaaagaggtaggcttaagaagagacgttttctatggtcgaaaaatactgcatttaaatcttagccgaaaaccgcgcactttgtttttcatttcttcgagttgctctgcagctgttgctgcagctgagaggtctggcgcatgattgtgccaattgcgctggtgatttcggcattcgaagatgaatcgcttacggtgacgccgctggattttccgttgatcagattgtatgtgtaggagtactggtttatcattgcgatgatttgcgcggtagtcggcacttggtcagcactgacacaatcaccggaaatgccattggcaccgtttccgtcgacggtttggttcagctgttggccgaactgattctgactgagttgcaatgccacatcgtccagctccggtttctaaattataattgcacttaattacaattataaattgaaaatatttataatgggctcaaattgcccttttttgttcctcccttcgcctatttccatgaattttcggcaaaagtgccgatggtactttttgacagatattttttatcataaaaatgtttgcgcttattcaatttcttgatttcaccgtgcatgatgaagaaccatcgtttgcctgttcaccaccactatttccagtgtcgccgttctttctgcagctggtgccgttgttttgcaccaactgatcgtatccataccataacaatacgctgatcgcatgcacacatgccg

SEQ ID NO: 23732 - DNA, 1681 bp, Heterodera glycines
caagggtaattacagtaatcgttgcatagttcgtcgagagttacggtcaagggtaattacagtaatcgttgcatagttcgtcgagagttacggtcaagggtaattacagtaatcattggcatcgaggagttatggcaatggaagcaataaaaaacatttgtatttgggtggacgttttttgacaggaaaaattgcgttcaactaatcctttgaatttggggatcattaggaaaactaaaataatttctctcaatttcagcattttcatcataatttagttaattattttgggaattttcacttagatttttcttcaacattttggaatttatgaaggtatttctaaattttcattttttttaattttaaaaatttatttttttttaaattaaaattcgttggattttctttcaggtgatgtttctgtcagcacaatcggttgctgaactgttctcaatcagaaattggctcaggttcgaaagggcacggcattggtcacaattttcccgtcattttttcaaaattcaatttaattattttttcagatttttggtcgtccgccaacgcattccccatttgatcttgggcatccaatttgcgtgggttgtcgaggaaaaaaagaaaaagcaaaaatcatcggccaatgccatttcgccaaaaaagcgatgccggacgatttgcaacaaaatgttgactgtttttggcatcaaaaaattgggcaaaaaatgaataattaattattactataattaaatagatgatgaaattagggtttttccattaacaaacaattacttttttttcaaaaccatgaaatttggaaaaaagtcatgaaaaacggtggttgaatgaatcaaatgcttcttctcaattaaaataataattattaaatttatttttatcttttttgctggatcttccgcgctctcttcggcttttttcccccaatttaaaattgcccttttgttggttaaattttaatttgttccattatttcgcatcgatcaatgagtggtggattatttagttttaacaattttaagggcattttttggccttaaacgtcggattgtttagggtgttttagtggggtttttgggcaattctgttttgaattttcttaaattcaataccccactttatcaagaactaattaatagggatggaattgtgtccgtccgaatgaaagaaattattaaaaaaggattaaaatcaacattttttaattaattcttcatttttgtttatttatttaaccgattaaatacaaaggtcagtgagcggtggcagcggtagaaaaaagagagagaaattgggacaatcaacgaaacaattgatcatccatcatcaatcatcattatcaataataccaattaatttggggggtcgtcaaaagtcaaatttcgtcttaattggtcagtcggcacagtgccatagatcaacaccatcacattactcattcgttcattaattaggcgtgttaattggtcatccattagccgagcaacttccgcatttggtcctcctgcgagcggatgacgccgtcgttgcgctccgtcttcttttgaatgcggtccaacatcagattttggtcctgcacctcgtcgcccagcgcgacgccaaacgttctcagtcggcccaatgggcactcatcagatctgagtggtggaaaaagtcgttt

SEQ ID NO: 23733 - DNA, 1734 bp, Heterodera glycines
gtcttttttctaatggtcttaggtagagacttatggtcttgtcgagtgtgcgctggtttttagtgcaatactaattagcattcaacgaaaaaataacttttgtgtattttgtccggccgggtttaccgtttaaaagattgaattgcccaattttgttcacttgtcgtagttttgaaaaacgactttatcagcataaaaagttatacaggctgaatttgtcagaatttttggctacaaaatattgaaaaaagtaagaaattattactgcataacacatgaccatgactgtaccgcgtgaatctcattttttgtcattttaaagcctctgttatcggaataagtagcacattttaattaatgatttttcgcacaactcaaatttaaatacatgagaaataattacagaagttaacgaaatcttttttaatgaataaaataaaataaaatcttaacaagcatgggtatacaaaataagtttcagaaagctttacatgcttaatcacaataaaataaaataaaaataataatcaaataaattaaaattaaacaaaataaaatttactgaaaaattctaaacatatacttaaagtgaaatattctgataatattgttaaccaaataataagcattattttttattattcttttataaataagtcagtttgaattaaaattttaattcaataaatggttgttttaattttttacaaataacagaaaaccctaattaaaatacatagaaaaaattcataccgcaacattcgctctactctgtttaaaacaaatataaaagttcaataaatattaaaggaaaccatacattgaattatataagatagaataatatatcaaattcaaaacaattgtaaaaaaaacaaaaattatttacaaaacattttgggccgactagcaagggtcaacgtggccctatcgcgaacaagacacgggctcaaggtgttttgcaccaaaggtgcttattaaataaaatatcatatgcctaaagtaaatgcagaaaacaaaatataaataaattagttcatttaggtagcagaataaataattgttaaacctaaacaggcatggcattcaaggaaagaataaggaagattcataattaaaataaataaaaaattattagtcatttgcattgttcaaaagtaaattttaaagttaacaaagaaacaaaataactgagaattaaagtactttggaacgttaataattaaatttattaaacaaggaaaatgcttttttattagtaaataaattaatatttacaaaatattttgggcagactcagcacgagcaacagttgcattaagtaatgctcggtttaaatcacatgacagtcaaaaagaccaatgaagaactcatatttttataataaaataacataaaaaatacttattcttttgtattgtacagtcaactttaatacaaacgcattaaaaaatttaaaatatatttaataaatagaagaaaaccctaattaaaacacaaagaataaaaattcctgcccgaacattcgttctactcatttatgacccaaatgctaaatgcaagtaaaaaatattaaaaagagaatatatcctgagtatgcttaaatagaataacatatcaaatactcaaaacaataattgtattttgggaccacccacaacgagtaaatgttgtgctgtgaagagctacgaaatattaaacaaaataacgttagaaataaatgcagagaataaa

SEQ ID NO: 23734 - DNA, 832 bp, Heterodera glycines
ggctggcaggtctggtgttcattcgttttatttgtctctttctttgcctgctgtccacaatttttttgcttttgttttccctttatttgttaaaaaatgctaaaattccatttaaataattgtcagactttgagtgatttaatgggtgtgaattcttttggacgacggatcaaaagaaatgttggatttacttttagtcaattggaattaggacaatttggggcaattagtgcaaaatgaattgatgaaatacttgcggagagaacatttttcagatcggctcaattgatgggaggaggtcaatgggaagaaaattgggaagggaggcactcaaaactcaaaatgaggggcaaatgaatgagtttgacatggaactttcagagaagggggtaactgacacatagaacgaatgaatgaatgacattgggcaaatcgggcacaaaaaagcaaaagattcgaccctcaaatcgcggttgttgggtcgaggtcaagcagcccaaggcacgccttgagatcatggaatgtttgtttgggtggcaatgggagtgactgaccgtgccaaaaccaaccgcaaaccctccaatttgaagggggtgtgaaggaagggagggaatggacgaatgaatgatggcacactgaaatggagaggggggaggggtggggggtaatgcgagaggcaaagggagagggagaaatgaagccgggggatgaagcagccaaaagagtcaatggaagaaaggcacacttctaatttgttcaagccgttgcttgtgaacagagtgggtggcacagaaaagtgccattggtaattctccccctccctctcgcccac

SEQ ID NO: 23735 - DNA, 1924 bp, Heterodera glycines
agccctagtgactagatcaatgttggatttttattcattattattaaataatttaggcgggacaaatcagtacccgtcccaacataaacctttgggttgtttttattgaaatttgtgccctatttcacacacttttctaagaattttgtatccaattaatcctaatcaatgtgcagggaatttgtgttgttggcgatgttcgcttgcctcacctcatctccttccaacaaattttcttctcataaaaaacggcgtcactttttgtggtgttttacagaaaaaaggacaacagagaaagagacggatgttcttaatttccttttgaatagatttattagtttattttagagctgagcgcgaccgggactggtactgaaaaaaacgtacaaatgagtaccaagtcccggttttgaccgggactgggatttgtcccggttttttctcggtttacccagccaaaaagtcccgggttttcaacccgaaaagttccggtaccgttcagctctatgacttttacaatattgaataaagcatatgttcgggtggtgacacttttccatttaattatttatttattttgtctatcctttccgtagtaagacagacactttatcgattgcccaccaaattgtgaccgttttccctccctcattcattaattaattgcattttggatgctcactttcgtattgcttttctgcgcctcctcggataaaaaatattttttgtcttcaataaataaaatatttaacagattttgttgtattcctataaatttcaatatttgtgaaaatatcaatatatgttatattaactaattattgctaatgtacaactcctttaagttcgataaattgttgaatcaaaaattgatttaataaaatatttattatgtgtttttcaaagcaaataaaaaacaaattctaccataataggagtttttaaagaaaatttttataatgtttatttatttctcacctaatgctaaatcaaattaaaacaaattatacaaattgaatatgtatgttttggcaaaaataaaacccattaaatatttaatagaattatcaataggaattatattaaaataaaaataacttaagtatcaataatataaatgactaataaacaaaatagtattaagaaaatcatttcttttttgagccaaaaaagtaaaatatataaactcgaaaataaatttttttttttaaacaaactcatatagtaaataaattcaccagattataaccttgttaaaagtgaatagaatttaattagatataaaaacaataaagaaaatatcgagtcatggaatgattataaaaaaatatatactagatacttttttgactttgaagtcacattcgttatggaatatatgtccttggatgattgatgcgtgagataaatttagaaaagaatgcaaagtgttttatttttgaattaggtaatttcgcaaaaacaggaggagtcattaattgacaaaaattgccacataaaataacaaaatttaaaaacaaagcaaagaaaaaggggatttattttcggcaatgcaatttattttgtgccaacttttcttatttattttaaaaataaaaaagcgttaaaatcaaaataaaatagttcaaagaaaagcaaaagtcaataatataaaattcaattgatttaaatatactacatctcattctctcaataaaaattcttaaaaattaatggaagatatccctcattatttagggacaaatcgcaattcaacgagattatgctaaattcattaatataaaacaataacaagtaaaaattataatgattcattataaaaaaaaactccagagattttttaaatcaaatccatataaaaataacgaagaaattattcttataagtaaaagctatttacataataaatatatgaaacatgcaa

SEQ ID NO: 23736 - DNA, 1863 bp, Heterodera glycines
ttttaaaattattcaaaagtaaggatgtaggtaaattaattgttacaaaaaataataaattttaatgagaaaaataaattttatttatttatttgtgaatttcaaataaaaattattattattgttgcttaataattaaataatcaaggaaaatttcgttaattgctttctttcttgggcacccttccatgccttccatggaattttttaaattaattttataataattcattatttatttataattttttatttgtgaatttcaaataaaatttattattattgtttgagaaaataacaatttgataaatatttttaattaattagaaaaattccattaattgttttctttattgggcacccttcccacactcatttcctttcataattgattgtttgtttagccctttttatgggtattggaattaatttgacctgatagaaaaatttgatgagaaaattcacaataaataaatttaattatttattaataaaaagattcaaaataaataattattaattgtttgctagtttaaaataaaatatttattattatttttagaataaaatttatagtaaatttaaaaagaaaattatttgttattatttaaataataataaaataataataataaattaattaaacatttttataataatttaactaataaatattatttaattataaccctcgttcctttttcctttaaaatcaaaaattgggaaaattccgttaattgatttgtttattaggccttattgcagcactcttccccttcttcattgatttgtttattttgttcatcttaaggggtcctgtaattaatttggtttagttaaaataattatgcaaaaaaataaataaataaaaaaataaaatattgggctcataaattaaatttagataaaaaaaacattcaaagccaaagagttagaaaaaataaatttgcatcaaagtataaaatttcattgaaattttaattgtttgaaatttaaaaaaatatttgttattattttaataataattaactaattaattaattagaacattttttaaaatttataaataaatattatttaattatacggtcccccatttctttttcgctttaagtcaaaaattgggaaattccgttaattgatttgtttatttgaccccccttcccttcccgccacccgaactcgccatttcccttatccctcgctgcaacccttcctcgccactctcgctgccgagcaatttctcgccatttttctcgttgcaatgtactctcgccacactctcgcccccctgccaatcgctgctgcctactctcgcccccactgccactcgctgttgcctgctctcgcccccctttccctgctggtgacgtcaaattttccctttatgagagcaaattaatgtttatcatcaattgccaatgtggccgagtggttagtgcgtcagtctggccgcccccctggggttcggatccgcttggtgcggggaatttttggagaattttaaatgaatttaaattcaacgtctttgacctttaagacgtttaaaataatttaaaattaaataaatttaattaaaataatttgcataaagtcgcgcagtcaaaaaagtcgcgcacccccctgcaataggtttgggtttgcaagaaaaagtcgcgcaataggtttgggtttcaaaaaaagtcgcgcaataggttttggcttcagtactgaaaagtctggcgctcaaatggcccgcgctcacttggcggcgctcaaatggctggcgctcagttggccatgcacccctcctataggtattgatttcatcgctagggtatggggggctacagtaatccggacaaaaagtgatgggtaactact

SEQ ID NO: 23737 - DNA, 1556 bp, Heterodera glycines
gtttccttatgtgctgaaaaagactaatccatcaaaaaaactgtgcggcagagcgtttaaaccagttgttgaaccggttgaaatcacgaaaaattgccccgtaaatcggccaaaatctgtttaaaaaataaattttgcatcatttgaaagttcttgacaagccaagtctaaaaatcagggtataaagtcgaacggacgcattctgaccactgggacaactgagtcccagtgaaaataaaaacttcagatgatggatgaacaaaaataacttaacaagtaaattttacaaaaatcacgcgcggtttggcgctttttttttaaaccattttttccggtttttaaccgattccaaaatctctcagatagcgccgcttcaatttctttctctgatttttaaacaagtttatcatgggctttgaaattataccaagttgtccaggttttatcttttaaaagcctataatcgttaaatttttccccttttttcgagttttgaaccgttccaaaagccggtttaaatgctttgccgcgcagtttttcttgacggtttatgtcgttttagcccataagaaaatctataaacgtgtttttcattaccaatttttgtcggtgatttataatttttcttgaaataccaagatggaaaaataataaactttttttttcaaatttcccctgtggcactaattaattattttttcttacaggtccttgaaattaagtgtaagaaaaaattttgcccatgaaactgaaatccgtaattagggatgtggacaaaggtccataatcaatgatttataatttaaaaagatttaattttttgaaaaaaacagctcaattaccagcataatgaaaaaggctgggggggggcaaccgaaaattaaggccctctaaaacctaaagacaaacttatcttttttttagcttttaacagtattttttgtggcgctcgcttttttcaagaacttttagtgtcggcggtgcccacaaaagtgcctcctgttatttgttcatattattagctaatttcagaaaattgaaataaaaccatccgtaaaaattgaaaatcaaaacttagtttattttattttttgtcatttttgctttttttcaaaatcttcgtaagatatttacggtttttaattcttttgatggatatttttcgataaaatattcaaaaataatgatccaaaaaagtgaaatcttactgatttaatgtttttctttaaacaaaaacgtgattcaattttttaaaaaattctcaaattctcttaatattttaagtgcgggtttccctttgcatctgaaaatttaggcatacaattagcctttttaaattaaattaaattcaaaatttcacaattttgccaaacagcatttcaatataaagagacggatgaatgggaattgccattttcaaattctcttttaataataatcaatttaacttttaaagattagtcataggcgttttattttcctgtcattcttctaataaatgagcaacaagtgagtgctactcattaatggtcagtttatttgaaatgagtcaatga

SEQ ID NO: 23738 - DNA, 1493 bp, Heterodera glycines
  unsure (1)..(1493): unsure at all n locations
gcaataacttttttcggcgtgcaatttcataaattttgataaaaaaaatagctgccgagaaaaactgcactgacaaatttgtggggtttttgataattttattttttatgaattttctatcctcgtgcgcccatcctccgtttaaattcagttttttttttacaaaatctcatggtttggttaccaagtgtactgattttagagggtaccaatttgaaaaatcaaatgtcctgaattttgaggtctccgataaaaatgcaaaaaggctagggccaacgtttgcactttttcatccggtgacgcataaaattcccaatttttcttaaaaaagagaaaccaaaatctcaattgtcattttttgcgtaaatatgtaaacaaatttctctcaaattttgaaaaattttccggcggagccatcggcactgccggaccccctgtttctcaaaaaatgaattttggcgcaggataaaaatatcttcttacaaagaaatcaatttaatagctttcaacattctctattctatactcttaattattccattgtgaaattgaatgtgccttcgcgaaagtgtgctcatcaaaaatattgaaaaagtgatggcttgcttaattgaatttgcaaaacaattaattttctgaattattcatttgatatttgataaaatgttactcctattttattattcaaaatgcattgaattctttctcttttttgtttggctttgcttatccatccaattttatttattaaaaaaatgaatttttactgttttacataaatttgcgcattttcattttttagctttgttttgcatattttcaaatgtttcgttcgccatctgagccaagcccgttctcgtcaactcggtgcccccacgatactcaggcgcgctgtggacgtccgtactgtccatttgcacaccaagccgacgacactgtcgacgtcgttgaaggtgaaggaatgccgaagttcggcgggagggagtcgatgtaaatattggtaatccttcggaattggtgtcatgacaaaaaaatctaaaaattttcttacaaaatcactttccatggtaaaaagctgcgctgttttctcgggttctttatcagagtgcatttttttttaccctagaaaaaaaattaacgaaaatttattctcagaagtggcaaaaactcaaaaattgtacgaatgagaaatttgtacccgaaatgtgatttttgcattttcgaatttgttcaaattcggtgtccgggattgttttttgcaagaaaatcccagggacccttttccatgctcttttaaagcaaaaaaatatgttagaaaatgtgcgcctccagcatcggtattatctgacattgaagccagcctcanaacaacaacaacagaaaacccaatgggattccccctcnaaaagccgttgttaaaaaaaaattatattgaaatttttttacgaaataaatttttttttgtaaaattgaaaaaaatgtcaaaaaatttc

SEQ ID NO: 23739 - DNA, 924 bp, Heterodera glycines
aaaggcgccatgagaatgagaggctccaaaaagtaactgatacaacgttgaaccccacagtcgaactccaattctcctccatgaattagaccaggccgaaaactgagttccgtacctgtcaaatggatggcatagccaaaactattaagacaaaaatcaaaggactgaccgtttttactaagtttgagctcagttccattcgtcaatcttttgatcatggaaagaaaaatgcgctcaaattcttaagaaatcaaaggattatcggggcaacttgtactcaacttttattaaaataactgtttttttaaaaagatttaaaataaatttagtcctagaaaaatgaaaaattctcaattttttaaaaattctttttttactaggtcccattaattagccaccttcagactttcaaaaataaaaaattctaacttttttttcacgagatatcggtttttccgactctgaaacccgaaaagagaagtttattttgaaaaagtttgatttttttttgaaaatctgatagataattaacaagtaacaaaaaaaattccttttggtttaaaaaagggtacttgtgggttatctgcgtccagattttcaaaatttttttttcatgaataaacttgttttaggggttttcgaggtcggaaaaacagattctggcatctgttttgacccaattcgaaccccaaacccgaaaaaagttttaaataaaatttttatttcgaattatcatgacaacgaattttccaaataaatttgttacccttcagtccaggattgtcgtcgtaagaccgaatctttgtaattgtgattgtcctaccagttagtagtgaaaaaacaatgtgctgtctcaaaaaattgcatccttccaattgtaattcattgtgtacgcccattgcggtgacttaacataggaaaata

SEQ ID NO: 23740 - DNA, 2002 bp, Heterodera glycines
taaataagtttaaatcgcgcgattaaacattctcaattatcaaattagcatggttattatctcttttttttatctgctggttacaattagcccaaacgttcgatgattctttctgcaataaatttggcaccgagtttgggcattggctgttgacgaatgaatgcgaaaatgaaaatagtaatggaaatggacacaatgttgaattcgagaaaatcgttgcccttttccaataaatttttcaacaattcgacaacatatgaagctacgtaaactgagacgatgaacatcaccaggtcaaacagtgacaaatcaccgccattttgtcgtttccgacgacgacggcttcgggacggacatttgatggcacgtaattgttgaggaacggcgccaaatttggaggaatgccacaattggatgaacagctgcaccatgtcgcttggcattggcaccgcgtgcgatgtcaacaaagctttttgcatggcttctttgtctggaccggcacccattttgccacccatttgcgcaaaatgtcgaacattttgacaatttgtcgcaatgttgggtgttcgtctgcccgtgccaaaatgtcggcaattgtgccacactttccatctacagtaattttggcttcaatttctctcttcttaaaaaattccaccagttttttgccatgtttttgcagtgccttttcaactttcttcacaaattgttctgaaatgccattgtccaaaagttggccctttttcaatgcttcacaatatttatcaacttccaaatatatttcaaccgaatcatcgccattatttttaacaattttatcatgcttttcatcattttgcattccgccaaaagcaatggcgcaattaaggaacttcgaaaataattggcaatattaaataaaaattaatgtacaatatattttttaaaacaattattaacaatttatcttttacagaaactcacccaagttgttttgcttgttcatcatcgaatttttcattaaactattagaaaactaaaataaaaaattttatgaataaaattttaccgtttatttttaagagcagattttcaaaatcctcaatatttacttcattttgaccacttctgatgactagggctggtaaaaatatggatataaaatcgcgaaatatggccataaaatatggaccaaaaatcgcaaaatatggacataaaattgcgaaaatctcaaaatatggacataaatggcaaaaacgtcaaaatatggacataaatttttcaaaattgagtgtaaaatttcttcaaatttattagttgaaattgcatatgagatatatttccaaattttttgactcggtaaggcgctttgacaaagacggctttcgttttggcaattaccgtatatgctctaattatagcccatgggggattatttttcaacctcctcagaatacaggggataattggagactgcggtattaatagagactgggctataattagagcatatacggtagtcggtcaacattcggaaattggtctcgaattttttcggcaattctgtgcaatattttagaagaaaaaaaacatgaaagttaaatttattaatttttttagcgcaaaatcaaccacaaaagcgaaattttcgcttttttgcttatttttgacataaatttattaatttttaagaaaatttaaatttattcaatattctcgagaaattttggcgaaaaaatgattttttgaaaaattttcggtttttgggctcaaaaaggctaatttagctgatgggggccgttctaatagaggtttttttgaaaaatgccaaaatatggacataaaatatggaccaaaatgccaaaatatggaaaaatatggaaatatggacataaatcgcgaaatatggaaaaatatggaaaatatggatatagaaatccatcctagaagctcaaaccaagctaaaaacatgtttttcgtgccgtttcaggcctccccagcccagaaaaaaaaatggatttcc

SEQ ID NO: 23741 - DNA, 1531 bp, Heterodera glycines
ccccgattctgatcagtcggagggaatggcacaactcacaacgctttccacattgtgtcgggggaacggcgcaacttcccgtgggaactgttaatgtgttcaatggtgcacagaaggatctgaacagtttgaaagatacgccgatgggagttgtccttcgatattccattcccttttctctgtccttctccaccattaattatgcctaattaacctaattacctgctttgaagttgccgtttttcccgcgacactgtccaacctgaaaatgctttgtccgtcttttctttcaattggtccgcttttctcttctcacataaacgcgtcactgagttggcccacaactgcgtctcgcatttccaatgctcggctcgtctcgacaaaaagctgttaattggacatcgttatctgtcattaattggaatggctttcccaccgaaattacgtcccaaatgtgctccaattttctcatgtcgagtttgcccatgtcttaaataaacgttttaagcggcgtttgcttgcactgcttgccgacctggtcgaaggtgtcgcgaattcactcgctgactttggttggggaaacacccgatggcactaagcaaagggtttgggcgaggcgacgctgccaccacgggacggaggccgtgctccaaaagtgcccttagggcggggcaaaagcgttttcggacggacgaaagaacggcttcttgaacgccgtccaaaatgcactgagatgagaaagacatcagcaaagcgggcaaagggccaccaaacaaacactgttcagttcgtccacactgagcgccgccctttcgggacggtccaccgccaaaatttgattcttcctcagcacggtgaccaactcatcgacagccaactccaaatgtgcgcgttggtcactgagcaaaggaccatttagcagttgatgatttttattagacagttaattagtctaatcacccgtaatggttgcccaacggcgtgttcttcagctcgtttcgctcaaagttcttcttcgtgccgctttgtgctgctgccactgtcccattttggcctccaaatgtcaaccattggccaaaccatccgccgattgtctgcgattcatttgccatattaaacacggaattagatgtatcagttttggcaggagcatttagcggtccctttgagggtgagcaatgagcagagccaacgggaaagagtgccgttgccgccacttccccctgcagaaacttaacgtactgctcgaggtcgattatttgggtgcgcagttggtccaccagttggtcctgcaattggccaggtgtctctcgttggcacggcactctcttgccttttccctcagggggttcagtgccttctccaagttctgctccagtcgctgtctgaactgctccatgtccttgtcctcctggcaatggtccagcagttccttcggcagtcgcattttctcccgcagtttgtccagcaacaacatttgtcggcttcgcaattccctcaatggcaattcgccgggcccaagttgtccgtt

SEQ ID NO: 23742 - DNA, 1838 bp, Heterodera glycines
atttgtcgcttctaatttgtctgttcaaattcatcctttgggatccaattggtgccgagaagatgcacttttttccggcaattgccaatttgtatttcgtcggcgtttacagtcgcaatgttgtgccacatattttgattgttgaacgcattttggcaactgtgtttgtccgctcatatgagcattggcggggctacctgttcacaatcatttgggctccgatcgctgtaagaaatttttgtattttcaaatattaacggagttaaaatttaccaaatttttaccccccccatttttatgtaggaataaaagaaactaatcctttcttggaaaaatatttttctgtcatcaaattatattataaaatatgtaaacttcttaaatggcaaaattttctcgcattttttttttataaatttgagttgggaatccattagtctgaaacccaaatattttttagtggattttttttgtaaattttattaatcttttaacaaattccttaacaacataaattttaataaaagaaaattcctcacaacattttcaatttaaatcgtatttaaaatatatttaaatgttttagttgaccgtttgcatttacattgccttcactacatctcctcatagtgtccgaccgcttgccaatttaattacaacagctgttgaagtgttgacaggaagtgtggaattggccattttcatgaaactttgcgcttataacttaaaaatttatcaaaaaatgatgcaaaatgaagggcaacacagcctatcattacgctaccaggcaattttgaatttttcaaatttaatttaaattaaaatagaaattaaataaataagttttattttaaaaggtaaatgagaattgatttttttaaagcattttctttgttttcggtgtgcttttttaaacagagttcccaacttttattttttcaaaagcaaaaaaagctccgatctaagatttgccccccaaaaaaggttttgataattctcttcgggaacgacctttttttttgctcttttgtatcaataatttttgcttctctttttcaaaaattttaagcaacaaacatcctaaaaatttttgaagcaggtacttaagttttagaaaaaaacaaaataaaaatttattttcgatcggaattcaattttggaaatttataatgtactctaaattattttcatttaaaatggaaaatggcaattaacgaaattgacctttcccgttttagctttctgagaacattcgcattggcaagcaactaatccctccattatcgctcaatttatgcgccataattacctctgcaattagtataacgtggagctatttcggcctaccattttactatcacttattcattttgttggccaatttgagctcggctatcggctttctcattgaattgctcattatcacgtaaaatttttgtgctcgaacattttctaaaatgagcaaaaatgggatgagatttttagtcacgaaaaaaccctaaaaatagatgcctaatgaggcccaaaatatacataaaatatgcaaatacaaatttttaaacaattttctcaaaagacaattctcttgaatcaaaatctgtttttgaaatgagtaaaaaataaaaatttaaagaatttttgattaatagattttcttaaaattttcaaaaatcaggactataaaatagttaaatttctgaattttccaaatatgtgattggctgcgaggtgggacttaaacaactagaaaaataatattttaaatttttaatttgcgaaaattgaaaccaaactcatttcataaataaataaacaattattaaaaaaataaataaatt

SEQ ID NO: 23743 - DNA, 475 bp, Heterodera glycines
ttttttcctttgactctaattttcatcactaatttttcactcagaccctcattcttaccagtgcttgtttttcccggttcccggttgccctaccgggaccgggacctgagcttttcaaaacccgggaaccgggacctcggatgaccgggaattcccggcccggtcccggtcccgtggcactctagtctttactattctcagaagagtagtagaaaaaagacggcttcacaatgattcatgaatccaggaagcaaaacaaaaactaatttctcgcaacagaagccctaataaacaattaacattttgagcattacggttgtgagacgtggatcggctcttgtatacaagggaaaatcccatttttttctttttgcaaagtttttgcacggaacccgtcagttgggcccccacgtttgggccccagcatgtttttttgctataacttttttctttgtcatccaaatccaacattgtt

SEQ ID NO: 23744 - DNA, 1193 bp, Heterodera glycines
aattatgtaatcaataactactaattaacacctttttatgcataattattgcctttttatatgattgaattctctccagttccaatgactcacgccacgacccaccccaccaccatccgaatgagaaaactgccattcctccgcatgccattgaacgtcgtctgccagtgacatgataacaccggtaatcaaagcatactaaataaacattcttcgcccttttccccctccgcaattttcctgcctaaaatgtgtgccaaatcagacaaactcccgccgtcttccgctgcttcgtccttctcatcgcctgcgtatggtcggcctccgtccgccttcaccgccgcttcactgaaccgcgcggggtcgccctattcaatgggcggtggttctgagtacggcggcagacggaagggcgtcagttggtcggacgtcgtggaggagccgaagccgacgactcggacccggtccgactcgcccccgccggcgtcattcattcgccattcgatgccggtgccaaatttcatgccgaaatgattttcaagagtcttcgcaatttgacatataggcattgggcaaagacagtccttcgggatatggaacggacgaaggacggcactaccgaaacggcgcatcggacgatggcactttggacgggggacatgacggacggcaaaactatgacagataccgtcattcttcagtagggaacgagtgaaccaaagcggggagtaacggcttgctttctcatttcagcagaatccgttcgatcgtgccgatggttgggtttcgtccaacccgtggaccggatcattggaccatcggggcggccgaagccgtgacaaagagcgacaaggccctgggagttttttcaagcccgacctgcccacttattcggcattgggacggagtccggacaatttcaacccattccaaacgcatttgcatcgggaggaagccaaagggttgaggaaaagtcaggagagagaggaactgatcaaattccattcttacggcgatcacaaagtgtcgggcattgaaatgaaaccgaagggatggacaggaggcgaagtgagaagaaaggagtgaccacatgagaaaaaggcttaattaattacaccccccaagattgtgacggaccgggagatcatgaaaagtcgattaaccacgccgctttactattcaccgatcgcgac

SEQ ID NO: 23745 - DNA, 1851 bp, Heterodera glycines
  unsure (1)..(1851): unsure at all n locations
tacaagccaacattagacaaacattttacaattactcgcaaaacattntgtgccaaacattttatcttacaatttacaatccaacatttgacaaacattttacaattactgcaaaacattttatcttacaatttacaatacaacatttgacaaacattttacaattactgcaaaacatttgtgccaaacattttatcttacaatttacaagccaacattagacaaacattttacaattactgcaaaacatttgtgccaaacattttatcttacaatttacaatccaacatttgacaaacattttacaattactgcaaaacatttgtgccaaacattttatcttacaatttacaatccaacatttgacaaacattttacaattactgcaaaacatttgtgccaaacattttatcttacaatttacaatccaacatttgacaaacattttacaattactgcaaaacatttgtgccaaacattttatattacaatttacaatccaacatttgacaaacattttacaattactgcaaaacattttatcttacaatttacaagccaacattagacaaacattttacaattactgcaaaacatttgtgccaaacattttatcttacaatttacaaacatttgaacaaactttttacacttactgcaaaacaatttgctatctattaaacattgactcaaacatttacctattataagaatttactcatatttttaattgaattcattcaaatatttgaaaaattaaatttgattttacataactgcaaaatttttcaattttatttttataaaaatttaaaatcccagtcccaaaattttaaatgttagaattttttttaaatttctaatttattttcattactctccataagttgggccacgttcatgcgatgtggccgaactagacggggacaaattggagagcatatgcaatgaacatgaggacggggaagagtgcggtgccaacgtagcaattgaggaagaacacgagggcatttccaatgaaataatgccattgccatactcggccgagaattgcttgggaaacttaaaataaactcttgaatttagaattaaaactttaaattaaggaaaattggcattcaaaatttttttaaaaaactaattttttcgaaaattgactaaaaaattcgcagcaagttagaaaaatttaccgaaaatctttggcattccggtgccaaaaactgtccggatagtgccgtatttcccaatattcaagaagagcaacagttccgattggtactactgtatttaccatctttttggcactcgtgccgtcgttgttgcttcgctcggactcagttggcggcaatggggtgacagatgccgacaaaggttcttcatgtggggccaacggtgcaccgccagcagcagagtccggcgatggcacagtatccggcgggaatgttccaccgtatgcaccacgggccgactttggactgcgctccagcgtggaacaagcggaaaagtcttcgacggttggcagccggatcagccccaactcggcacatggtgaacagagttcgtcatttcggtgccgccagtgtttgtcgggtgttactgtagctgaaagatatggtaggaaaatatactgtatcataattataacttagctaaaactatgctataacttaatcggtttaccattttcgcagcagccgatgttttctgggagcacacatccgttggcacaattatggacccattttctgtaaaattcaccaattatcatttgattcaaattttggcgcaaaaaacaagcacctttgacgatccgtagcaatcggagcattgtcataggtaagcgccggtttg

SEQ ID NO: 23746 - DNA, 955 bp, Heterodera glycines
  unsure (1)..(955): unsure at all n locations
cttgtcaaggaatacagtactactttgtctatttgtggaacatagaaaaagggaaatattactcttttcgtctaaccctccctccctttttgtgcactatttcgttttcaaaattggaccacatttttttaccccgaccaaccctaaaaagtctttcaaatattttttataccaatgcaccaaaatttaaaagttcggagggattatccataattgacattgatctcatttatggtaatttgttttgacagtgattatttttataatttattttcattttattgcttgttttctttattcacttgctctgtttcgctataattttgacagttacagagtaagtggtccccgcccttctgtgacttatttttcttgcttaataaataaataaataaaagatttttctcattttccgacgcggttcccttataaattgacaggtttaagtcaaaattttttagtcaacttttcctcccattttcctattagccaaacacaaaaaaaaaacagtgcgaacgccactaaatgaggatggaaaagggatatgccggcacttttttttactcattttttaaacccatcactttgctataaaagtcacaaaaatccaaacaaattaaatgtattcaactgaaagaagcaacaaataaatgtgaagagcaattcctattcataatgatcgatcattcattttttaatttcgccataattcgttcactttttcttccgctgctgggcccgggattcattaaatcatccattgggtccgcttctgctggtggagacaatggcctaaaattaggacaatttaaatttgaatattaaagcaaaagctgttgctatcacaaactcacccaatgcaatccgtgccaccattaagaataatgaagactnntgtcaaattgtccgtcttttcatccttccaatgaatcgtccccccaatttgacatcgctt

SEQ ID NO: 23747 - DNA, 1862 bp, Heterodera glycines
  unsure (1)..(1862): unsure at all n locations
caaatcaaccaaataanttcgaatcaaatgattttaccggctgtgagaaatcagccaagcaattctgatcagaccaagcaactgagtgtaaacgatgattccaatatgcttatgcgagtaaatccagctaataatttgccagaagtgatagcttcagtaaccaattctcagcagcttactgaccagaataatcagccgttgacggaaaatccaactgatcagtctgtaagatcaaatcaaaacaatcagcatgaaattcaagaaatattacatttaccaatgaaaaatcaacaaaacaataaaagagcagcagcaccaaattcacgacaagaatttggatttgatctggagaaagtgccaaaagcaaaaaagggtaaaggtttggcagaatggttgggtcatagcatagatcaaaagcagaaaattgctgtcgaaaacgcgtctgaacagccaactattactgatcatattaatttatcgtcacagacaacccaattaaacaatttgaataatccaacaaccaatcaaagtgtggttgatttatctgacaaaactttaagtacgaggcaaaccaatgaagtcggtccgttaaactcaatggacaattctgatcatcaaatgatgggaaacgctgttgttcagcaagtcgcatcagatcagtcatgccactcgacccagactgacaaattgtctgatcaaataacctttacaaaccaatttgacccgaacaatttggaaaataaattcaattagtccaatttcatcaattttcaattatcagggcaaaatcagacaaataatgataatcactctgaacaatctcaaccagttacacaacaaattaaagatgcacaaacacaaatattgccaaagcctgacggattgttaggctggctttatcgcaatatggacaactcagaaaatcatgacaattcgtttgaccaatcaaattgtcctagccagaaaaatcaaactaattattccgctgatacgtcaacagatttattaatgttaccaaatacagtaaatcattatattcattcaaatccaatgatgactttaagccaacaaaattactataatcaggaaaacccatcgacgtcaaccaatcaatcaacttatcctgatcacgcaaacacaatggctttgaacaatcaatcgatttatgctgatcaggcaaacacatatgcattgaacaatcactcaactttttctgatcaaacaaactcactggcattgaacaatcaatcaaattatcctgatcaggcaaactcattggcaatgaacaatcagtcaaattatcctgatcaggcaaactcattggcattgaacaatcaatcaaattatcctgatcaggcaaacacattggcattgaactattctgatcaggcaaacccattggcattgggtaatcaatctacttatcctgatcgctcactttttatggcgaaccaaaacaatgaagttaacggtcttattccaacaattgattctgatcaaactgatcaaactattttgcaatcaaataaaggctccacggacaacaactgcagcaaaatgtgcaagttcagcagggaaatgttccgacaatgctaagcatgacaacgccagtgcctgaacaaccattcgatgggacgcattcaatggtttctcaatatcgaatatttttgtacccattctttttggggtttttgttttttatttaattattaaaaaaacataaaaaacaagaaataaattcagaaccttaacatcaaatcaaataactgtggccaaaatcggccatttgaagaacccagcacatcatcatcatcagttgacaatctgaatggttcaggaaatgaattgggttggtaaagagt

SEQ ID NO: 23748 - DNA, 2080 bp, Heterodera glycines
  unsure (1)..(2080): unsure at all n locations
attctgaaaattgtttatttatttcaagacaataatnttgtaaaaaacacctgttgttcttcagcagacacaatcccattgatcattttgatatttgcaaatttaaaataaatatataaatattttttttaatttagaaaatgatgcaagcaagacttagcgatgctcgagattcactctcagtctcgagtcacggatttctcagtttcggtctcgattttcgatacccaagacttttttacaccccaaccaatttgtgaattgtattaaatctttttgggtttaactactcctttttcattttttttaattaaataattcgaaatttttcgtttggcgtttcaaacatgaaatctagagcccggacgggaccgggatcccgccgggattttgccggactcccggtcccggcttttttggacaaaccaccgggaccgggagtcccggaaaaacgggagtcccgggatcccgtctcggtccattttccaagtcccggtcccggccattagggccgaaaaaacgggactaaattatacacccctaagaatggtatattcgtggattaaaaggcaaaaatttatacaattttattttttaaacattttgacaaacttttatgtaataaaaaggaaattttgtttttttaaataatattttgtggattggtggttagtgcttcaaaactagctgtattttttgttatgagttcgatacccgttgaagttttcttttaaatttatttttttttctgataatagacaaaaataccagggatggactttcgcgtttcgctttctcatttttttttttagccgtagttttattacatggcggacaacgacgaagagcatgagaggctcgccgaacaggggcgcgagtggaaagctgcgcgccgggcggagagcattgccaacttgtttggcggtgcgccgcccccggcccaggatgaggaagacgaggacgaagaagtggaggacgaaggggtggaggacgagcagcgccctcgccgtggtgagttacggaatttttttaaatactgattatctaataaattcagcgcgaagcgcagggcgacgcgggggtgatgaggacgaagaggaagatgaagggggtcgggggcggcctcggcgtcgtggtagttactttttttcatgctttttaaaattaatgctcgccgaacaggggcgcgagtggaaagctgcgcgccgggcgcagagcattggcaacttgtttgccggtgcgccgcccccgcccccggcccaggaagaggaggagggggtggaagaagaggtggaggaggaagaggtggaggaggaggaggacaatcgtcctcgccgaggtaagttactgaattttttaaaatactgattatttaataaatttagcccgaagcgcggggcgacgcgagggcgatggtgacgatgaggaaggagaagggggccgggggcggcgccggcgtggtagttactttttttcatgctttttaaaattaatgaattaagttcgctctgcctgaacagccaacgaattggagagaaaagtcgaatgatgaatattttcgattacaaacaaaccactttatattattgtttgtctcatctgaatgcatttcatttccgtggtttcctttaattgtggacatatatttttaatgaatcagcgcagccgaaaagtcgtatttaaatttctttgttgatgtattttatgtttcaattaggccgtgccttagtcgagtagaaatggtttcgaactgatgaagtcggcacttgtctgatttcgttgggtttcgcaatggttaattggtgctgcttcaaattttggttttgctttcgacttttgcttgcttccatcgcgcacttcaattggtagaaaaattcctcaatttttgataagacgaccaattgatgagttttttaggtttgccgccatttacgtcaattgcattttctttacattggtttgttatgttaatgacttgtcttattttgtttctttttcagtggaaatcatatgacattttgtggttttggactcatttggctctttgtgtttgttttcctgcgcttcgaccgaacaataa

SEQ ID NO: 23749 - DNA, 1869 bp, Heterodera glycines
  unsure (1)..(1869): unsure at all n locations
aagtgagccattatgcgtattaaacgaaatctcttgcgcaagtcgttataattttattttcgactttatcttaacaaatgaataacagatattgttgttggacaggttttaaaagattgaagatgttcaaaaacagttaaacaatcatctttacaaagttgtttatcaatatttttagctctataattcaattttttaactgattcataatcataggttcttttcttttttttcttgcttcattaattgttaaatcaaatactgataatggtaaaactttatacgaatctttaaaaactatatatatttttttattaattattaatgaatctttaataaaaagtttaattcaaaagaaccctgattgaggtgtttttaaaaattttatattatctaattcaaagttttttattaaataacaaaatataaactctcaatcgaagtttaaattgtgaaaatatatagttattgattctttatttctttttaccaacaaaataacactgtttaaaaaggattgaatattttaattccgactttttcgaagcaaaacgtttttatctccccactttcatccaaattttatgttaaatagtaatttgtcctcgaaggaagcatcacagaaacaagggttcgacagacgtttaccgcactcccaacagccctaaaaaatatatatttttaattcctcctctcatattaccttatatttgtttatttttattcttttattttagccttaatagtgaaattttttttttcgccattttcaattccttcttgaattaattcttgaatagttgttatatcattggtgttcccacaaagataactccgatatttaatgtaatttgtcgccatttacacctgttgctaaaaaaagttttatttaaattatcactaaaatattttattttgtgacaaaaccagaaaaaaatacccaattttcttaaattttattttcaaattcattgttattaaattccgttgtaaaaaatctgttaaaacaatcgatgatcattaaaacaacacaaattattattaagcttaaaaaaattgcaagaataataaacccaaaaaaattatctcgtgctttatcatgccaatattcataatcttgacacatctaaactctaaatgtataattattaattataaaatagaaatatttaacagtagaaacaacattaaaaataaagtttataaatttattgttctgtttattcaccaataaccatatggaataatctcccaatccgttcctattattccttttttaaacgggcttatattcttttcgtaattctcgtgttaaaatcatgctgtctcgtgacgggccaaatttttcatatttgaaaaattttatcatgtccttccttattgtaatctaaaatcatattcttgaaatcatcatggccgaattcattattttgttgaaggtaatgcctaaaaatatcaaaaacattattgtataaataattttaaattacccctaattttggttttatgccatatttgaccgtctgagttattttatatttaattgaatattgcttgcttcctccttaaacaaattctaatatgttatttcccgaattttcatgtgacatttctctgaattcatttaattgtaatataaaaataaacagtttggttttaccctaaatagtttcaaaaagtaataggatttttgccaataggatgtctataaacaacactatctaaaataataaatggtaaaataacaaaattaggtttaccggtatcccaatacagtaattgattgtccttattttgatctattgaagcaanttatataaataaattcgtgcttgacttgtagtcctaaaccaattttactcaaccata

SEQ ID NO: 23750 - DNA, 956 bp, Heterodera glycines
attgtattttcctccttttctctctgttctactcattctctcgcttcttctctttccttctctctctctttttctatctctctcctttcctctctctctctttctctcctcacttccctcttttcctcattttctctctcattgtctcccttttctctatctcctttcttctgttctctcctcgttcatctccacactttctttctctctcgtttcctcttctctctcctcatttttcctctctcaccttgacataaacaaatgaaagaaattcctttttgagtctcaatcaatggagccacaattttctacaaaacattttgtgcaccatgttgaacagcttggaaaacgattgttcacagtgacttacgatctcaaaattccacttccaagctcaagttttgcgccaggcgatctttttggccatcttctcgcccaaaataaatttccgctcccgttttataagggtcagttcaactaactaaactaactagtggcaaatatgttaagtgttagctggttttgaggtggctacctattctaaaaaataaaaaaagggttgatttttttaaagcttgctaaattttttttggggggggggggtagaatttttttttctgaaaaacaacaattgtatcaccaaatctcattgacaaaaaatccccataacatgcttgtacataattgcatttgcatttcagctcctcttaaaagcattaaatattttcagaggtcagagtcaaatttgaaaaatttgtacgcgatgaaacacgcaaatttgacgccaaattggtgaccctgcgcattgaaaatgctttaaaaactggcgaaaatttggacaactcttcgcttggcgcaggcgcaaacagcagtgccgacgatgttgtgaccacaaattgcgatgttagtcaccacggaaatgtgcatcatcttttttcccccatttcacttaaaat

SEQ ID NO: 23751 - DNA, 891 bp, Heterodera glycines
  unsure (1)..(891): unsure at all n locations
ctacggttgaaccatacaaatggtcgttatgaaatatacattgtaggtaagaataggtattctcagagaatgggtatgcatattttctacatcattagacatgtgggtgtcattcaaatgacgttattatctacgctggagccgatacaaatcgtcggttagaaatttccacagtaggtaagtataggtcttctccggtaatgagtatgcccattatcagcatcattacccatgggtgtgtcagaacggggggggggtagttagttgcccgcgcacccggtaaaatgtaaaaattttctgtaaaacgggtaattttttttaattacttaatttttcttaactaatttgaccccaaatttcctaaattttacccggcggtgcctaacagcaccgccggacccgaactttcttatatttttgcctaaatttagtttcaaaatggcaaaatttggcaaaatgtaaaatttctcgtttttttcccggaaccaaaaatttaggaaaattacacttgacaaactatttttgggctggaagagcaaaaataaaaagctctttgggtgcgcacctcccgaaaattttctggttacgggcctgtacagtattccctaattgattaccatacaaataaattaaaattttcttcaatttttgttgatgtaatattctacaaagagaagttcaactttagaatttacaacctaataattattaccagcctgttataatttttttgaatcatataatggcacttttaaaattaaaaaaaaaaaaactaaaaaaccatttttttcacattttatagtgaaaaagatgatgattaaaaaaacgaaaatttatccatttaattaaaagatattgtccattttttattcaanatttttgcctttttta

SEQ ID NO: 23752 - DNA, 1749 bp, Heterodera glycines
tgattagaagaggtacaacagtcattagaagaggtactcttttgttagaagaggtacaaaagtgattagaagaggtacaactgtgattagaagaggtacaaaagtgattagaagaggtacaactgtgattagaagaggtataacagtcattagaagaggtacaaaattgttagaagaggtacaaaagtgattagaagaggtacaactgtgattagaagaggtacaaaagtgattagaagaggtacaactgtgattagaagaggtacaacagtcattagaagaggtacaaaattgttagaagaggtacaaaagtgattagaagaggtacaactgtgattagaagaggtacaaaagtgattagaagaggtacaactgtgattagaagaggtacaacagtcattagaagaggtacaaaattgttaaaagaggtacaaaagtgattagaagaggtacaactgtgattagaagaggtacaacagtgattaaaagaggaagaacagtgattaaaagaggtacaatagtgattaaaagaggaagaacagtgattagaagaggtacaaaagtgatgagaagaggtacaacagtgattagaagaggtacaactgtgattagaagaggtacaacagtcattagaagaggtacaacagtgattagaagaggtacaaaagtgattagaagaggtacaactgtgattagaagaggtacaaaagtgattagaagaggtacaactgtgattagaagaggtacaacagtcattagaagaggtacaaaattgttagaagaggtacaacagtgatcagaagaggtgcaaactgtgattagaagaggaacaattttcaatagacgtaaaagttgagtaaatcaataacgcacaccatctcaaacataagaatgtaataaacagatggcatataaaaaaatacaaattatggacaataaaattaattaatttgaaacaaaaaatttattcatcaaaaataatttaatttaaatttaaaattatttattaatttttaataaaacaaaaaggttcaaattaattaaaagcattgaaaatgacgaaaaaaataaataatgaaaagtttttataaaaatttaattcaaataaaaaaatgtaatttattattaataaaataaaaaatattttaaatgaataaaacaacgaaaacacgaaaaaaatggtagttattaattaaaaacaacgttggaaattattaattgaataattatttaatttgaaattaaattattttttttacaaattcaaaaaaaaataatgaaattctttaatttaaaaaaaaataaatttaaataatttaaaagaaatcttcaaattaattaaaaacagtcaaaataacccaaaaatgcacagaaaaatattgttacaccgtccggattcgaactttgcccccccccacaaaatgatgcctcagaatccccaatcacacagggattctgaggcactaacgatgtcaaaagtaaaatctgatcacgtattcgtgatcagcgtcataaaatagccctaatgacatgtttttcgtagatttttggttaaaaatttttttcactttaaaaccatggtgctccccccctttggccccgaatccaaaaatcacttttatttttatatcttttttaaaaaatgtgaataaaaatgtaaattaaatttatattatagagaaaaaattgcggatttttgtagttttttacttttacagtatgacttttcaaaccgagttatgaattttt

SEQ ID NO: 23753 - DNA, 884 bp, Heterodera glycines
cgcgttgatatttggcgttggcagaatgccaaaagtagagggggaaccagagaaaaagagactcaaaagcagagggaaccagagaaaaagagactcaaaagcagagggaaccagagaaaaagagactcaaaagcagagggaaccagagaaaaagagactcaaaagcagagggaaccagagaaaaagagactcaaaagcagagggaaccagagaaaaagagactgaagataacgcaaatagaaacatgatttgaagaataattaaatagtaaaatcagacaaatgaaaaaaggctagaaatagggggaaaagaagtgaagagaagaggagagaatggataacagagagagaataaaatgagaaaaatgtaacgcgaaaagataaaaagaaaaaaattacaattaagaattaaagaaagaaaatatataatatttaaagcagagaaaaataatgcttaagaaaaaaagacaatgcatcaaaggaggaaaggaaagaaaaaaaatagtgcgagaaaagagcgagatgaaaagagaaataggtaggtatcggaccggctcagttcggccccagcccagttttcgatctatcttttttctttgtcaacaaaatccaacaatcttggtatcattcgaaagatctttacatactctattagccttacaaaaagctaaaaaattttcaagcctggaaaaaatttatgaagaaaaaactttaaaaaattgattttttcagttttcatgttatatctttttggatatttgtctaattgccaagcaatagcttagaaaaagcttctaaacaccttaagctttcgaatgataccaagattgttggattttgttgacaaagaaaaaagttatagtcaaaaaattggctgggccgaac

SEQ ID NO: 23754 - DNA, 1720 bp, Heterodera glycines
gcctagctcgaaaaattttgaaaattttcgaaatttttaaatttcagaaaatcgagctcaccgagctctacaataagtctgctggccaccctgcgctcaggtcaaagcctaatgagttattcaacggggactgaactgggcaaagttggtactgaaaagttgccaatttctgcagcccttccaagtataggtagaggcctggaattttttttgaaaattagaaaacacttcaacttaaaatcctaccagcaagcattttttgatcagtgttttagaaaaaaagttacgggccatcaaacgcaagcaaaagtgagaaattagccgccgggactcagttggccaccgaagagaaaaacccgtatttttcccagatgcgcctcaaaaagttgtaagacccttccactactttcagggcgctcccgacagccgttcgactcaaattagtttttaagacgagtccccctttttctctatggtaatataaactagcgggtgcgtgaaccgtcggctatttagctgggaaaaagcgcttcgcgcttcttgagcttcgctacctaggctgtgaagcgattcaaattgatcgaagatgttagtgagaaattttaagaggtacaaaagtgattagaaaaggcacaacagtgattagaagacggactcttctttgcactcgacataacaatgtccaggacctttgaatgggtgtactttaggctactttaattaaattaattatttttcgacgggcgtttcgcgcccgttttttaaatttggttggggccagacaggcgtttcgcgcccctttttatgtatggagatgtttaggccgcttcgcggcgcctcgaacggacgcttcgtgcccgtttctaaattttgttgggctcttaaggccgcttcgcggcctcagacgggcgcttcgcgcccgttattaaattttgttgagggatttatgattaaaagaggtacaacagtaaatagaagaggtacaacagtaaatagaagaggtacaacagtgattagagaggtacaacagtgatgagaagaggtacaacagtaaatagaagaggtacaacagtgatgagaagaggtacaacagtaaatagaagaggtacaacagtgattaaaagaggtacaaaagtgattaaaagaggtacaaaagtgattaaaagaggtacaacagtaaatagaagaggtacaacagtaaatagaagaggtacaacagtaaatagaagaggtacaacagcgattagaagaggttcaacagtgattaaaagaggttcaacagtgattaaaagaggtacaacagtaaatagaagaggtacaagagcgattagaagaggtataacagtgattaaaagaggtacatcagtaaatagaagcggtcaaaagtgattagaagaggtacaacagtgatgagaagaggtacaacagtaaatagaagaggtacaacagtgattaaaagaggtacaaaagtaaatagaagaggtacaacagcgattagaagaggttcaacagtgattaaaagaggtacaacagtaaatagaagaggtacaacagagattagaagaggtacaacagtgattagaagaggtacaacagtgattagaataggtacaaccgtgattaaaataggtataacagtgatcagaagaggtacaacggtgattagaagaggtacaaagtcattagaagaggtacaactgtaattagtaaattcattaaa

SEQ ID NO: 23755 - DNA, 884 bp, Heterodera glycines
attcccccgtttttggcccttttcatcaccggctactcctgcccgtggtgcctattttgcctttgctttagccattgcccggccattttgtcgccgcttgggtcctcgttcgtttccgttgcctttggccagcattccactgactcaggcccctgtgtcccttttggtcccccccttttttcctgtgtttaccacagtttgattaagagtctggtgctcttccgactgaggtctaaccgggcccttttttcgggctaaacttgtaaaacaaacgggactaagtactgtaaaggggcaaaaccgtcactccttttttactcaactttttcgctttatctttctttctctcaactatgtcggccataatccggcagcaactccgcgctcttttgaccgccatttcttctgactcattacagggggccgattccgatttattgccaaacgaccccacttctctggagtccattagccttaccgccgagaagctctcgcggaaactaagcaaggcccaagccctcctgaaagattggacgattatcctttcctcgtcgagtaaagaagtcagagagcaggaaaatgctttgtttgactctttttcggtgggtgggcttactccgggtgaaatcctctccgacggggatgaagttctgaccaaattggaaataaaaatagatgggatccgggccatgacatccagggtcccaccctcccaatctccggcccctcccacccaaattcggccccaaattaatttgccatcactccagttaccggactttgatggaaatgagactaattggccctctttttgggcggctttcgctcacaccattcacgataatatgtcgcttaccggctctcaaaagctcacttatctggtc

SEQ ID NO: 23756 - DNA, 1973 bp, Heterodera glycines
agaatgaatgaatgaacgaatgaatggaaagggtgttccttaagcaaaatgcaaatgggaaatgaacaaatggacgaatccaaaagtgcttaagtatgagataagagaggaaaggcaaaaaatggtaaaaaatcggggagaggagctccctggcacagaaatgcaaaaacaaattgtgaatgggcgaaatgtgacggtccaaagttcggccgacgaatacaaaggaaaaatgggaaatcggagaaaatggggaaaggagatgttggacgatgatttgaaaaacaaaggccaagtggaagagcgacggccaaaggggacgataaatgcagatgtgagaaaaggagaaaaagagggcaaaatgttaaatagacaaaaaggaaatgaattacggtagccaaaatatgagaaaagtgtgaaatgaaatgcataaaatatgagaaaaacgacaacaacgacagcgtgctgatttgacggctcgtcatcgacgaggacgctgcttcgccgccgccccctcccgtccgttcggtcattttctccgtcattggatgctcttcgccgatgatgaacactgctcgtcctcctgctgtgcgtcgcgtccttttttcttcgactgcttctcctctgccctcctcctcctctgctgctgctgttctccctgtcctctctccttctgctcctctgccctcctcctcctctgctgctgctgttctccctgtcctctctccttctgctcctctgccctcctctactgctgctgtcgcccctgccctctctccccctgcttctctgccctcctcttctgctgctgttctgcctcccctctctccccctgctgctttccctccgctctctcccatccctccgctctctgctcctcctgctttccctcccccctctcccccctccgctctctcctcctcctgctgctgctgcttcccgagcctcctctcccgttgctgctcctccaaaccctgctgctgatgctgctgctgctgcttctctgtgcttgccccgagctggaccatctgctgctgctttaaaacatggggagggggtgacattttaaattacaatttgtaggaagtgatatttctcaccgaaaacataatactctaccaaggggtagagtatgcctacacaagtcccgccctccccatcccaatttgccggggtctggtggccgcgtcttcatctgtaggcgtgttggatgcaccaatacaagaattggacgctgttgtgcgtttttgaaaatgaaatggggaacagatgaaattattaaagagcccggggctcataagaaaaaaaaacattttgtaatttgttttaaataaatgttttggcaatttgtcaatttgggggtgtgtaggcgaaatgtcagtttgatggaatgtctgtaagcataggatgaaaagccccactctcatctttcacatctgcccccatgctcatctgccacccctccccccaattaaatcaattaattaaacattttacgaacaattaattaattagtaccaatttgtcatcactaattacccccccccccccacccccatctgtcggcaggttcaaagggctgcacccctcccataggcttgggtttggccaattagcacccctaattacaccacctgtcacttataattagcgtcaacctccaacggtcccgggggggttactactaacgcttgaaattcaatgatacatttatttaccaaagacatagaaatggatttttgagctacaaaatattagaagattttttaataatgtgcaaagaaagtttgtctatttttgtttcctgattttcagacattttccatttccatttctggcactatgcaaggtggacagaagtgatcatcgatgatcggcttccgtgccgaaatgatgaacgattgctttatattcgtccacctggatgagtgattaaattaaatgaatttaattattttatttatttttagtgacgt

SEQ ID NO: 23757 - DNA, 1088 bp, Heterodera glycines
  unsure (1)..(1088): unsure at all n locations
cctatcatgctcgagagcattgtatgtgtataaaattatcaaaaaagagatagcatttttgggataacctctaaatataaaaatcctctgtgaaataaaatggcgattgtgcacagccctccgtctcatacgcaagcgcttttgtgaggtataaaatttctcaaaaaaagagatagccatttttctgggatagagtataaatttaaaaattccctcaaaaataaaaggtctattgcgcaccgccctccctatcatgctcgagagcatttgtatgtgtataaaatttatcaaaaaaagagatagccatttttctgggatagagtataaatttaaaaattccctcaaaaataaaaggtctattgcgcaccgccctccctatcatgctcgagagcatttgtatgtgtataaaatttatcaaaaaaagagatagccatttttctgggataacctctaaatataaaaatcctctgtgaaataaaatggcgattgtgcacagccctccgtctcatacgcaagcgcttttgtgaggtataaaatttctcaaaaaaagagatagccatttttctgggatagagtataaatttaaaaattccctcaaaaataaaaggtctattgcgcaccgccctccctatcatgctcgagagcatttgtatgtgtataaaatttatcaaaaaaagagatagccatttttctgggataacctctaaatataaaaatcctctgtgaaataaaatggcgattgtgcacagccctccgtctcatacgcaagcgcttttgtgaggtataaaatttctcaaaaaaagagatagccatttttctgggatagagtataaatttaaaaattccctcaaaaataaaaggtaaattgcgcaccgccctccctatcatgctcgagagcatttgtatgtgtataaaatttatcanaaaaagagatagccatttttctgggataacctctaaatataaaaatcctctgtgaaaataaatggcgattgtgcacagccctccgtctcatacgcaagcgcttttgtgaggtataaaattctcaaaaaagaatagacattttctgggatgagtataaatttaaa

SEQ ID NO: 23758 - DNA, 1842 bp, Heterodera glycines
atggaaaattcttcggttgtaggaagtgctgtttcatttttcggcaaaatggactgaattttgttctgggcatccaacgaattggagtccttaccacagctcaaattttcggaaatcgggttttcaacaatttcggcccaacgcagtcccaacggatcacaaaatttaggcaactcgcctttccaatccatgaaccgctgttgtaaactcacagcaactttgtcaaaatccacacacaaacgctgtgaagtttcatagaaaagttgacctccgcggccttgtttgaattcgttgtcaattgactcacttatcataagataaatggtcatggctcggctgtacaggatatatgcatcctcttctttcccttcctgtattttcgtttttcctttccgttcgacttccatcaaaaagttgagccgcgtaaaattgtcgagccgtcgaagtgaataagtcaatcgattgtcaacgtttgcatgttttttgagcacctcataagattcgtacaccaatggatgcaaatttgtcgatgaagtccgcataattttgttttatcgacacgagataaaacaaaaatccaaatgtataaagcaacacgaactttttataaaagattttttggcgagcacaacacgagtgctttcgacgaatttgtaaaagtggacgaaataaggcggatgaagaaaaacccaacacgagggtattaaaatttgacgagcagttgacgaacccaacacgagggttttccaaattaggtagtcgctttttaaaatgagaactcattgaagaaaaataaagccgtccgccacctagctaacctttgttaccaggagcgccatgttggaaaagaagaatcaatttgtcgggggtttctttgccacacttctaaattttgcacaaatagtctatgaaatggccaaaacctgctttaaaaatccaataccaaacaaaataaattatgcgacaaataattaaaagacaatccaaaataaataaaattcgatcaacaacaaattaataaaaacacaaataaatcgacgaccaacaaaacgcctaaaattatcaccgacgacccttatcctttttatggtttgagaaatattatttataacttagctcaaagcaacataatttttaatcttgatacattcgatagccctaggtcttctctgttagtctacaaaatttcaaaaagtttcattaagtttcaaaaaagttatggctagaggaattcataaaccttgtttttcgaccgtctttggtcctaactttttttaaacttaatgaaactttttgaaattttgtagacggatatggaagacgtagggctatcgaatgctatcaataattaaaaattaggttgcttttgagctaagctataaataattatttaccaaatcatattgatggttttttaaataacgacatagcacccaagaaagtaggtaggcagaaaggtcgtcctcctcctcgtagtcgatgttgtcgtccagtgcttcgtatatgacattgattcgaatttataccttgatttttggtggtttaactcatcaagagctttcgaatgtgtcatttgaacggttttcctctgagatgaatggctctattccagttcacgcgtccaatcaatgtttacgcgtccacagaaaaaacatcagggctcagagacgataagaattcttttttaatggggctattagccagttctatgctttacttattttgaaggtttgaacaaaaatcccttaaaattccatttccatgccaaattccgatgctttgtcaagcaggacggtgttatgacaaaatggatcaaatttttaattttttatatcaatctat

SEQ ID NO: 23759 - DNA, 1125 bp, Heterodera glycines
ctgtcggattgtcctcactgtcggattgtccaatgtcggattgtccactgtccgattgtccgggatccacatcattgataactttttgtaaattaggcgaagtttttaaaaaaaacttcttaattaaaattttgattaattaaaaatgccttaaaggaagcaaaataagtcccaaactatgttttaaagaaaaaaattcattaaataaacaaaaaattgaccaaacaattcataaaattggcttgaaaaatgaaatttaaaaaaaagaattattttattaaattaaattcatgtagaatacacaaatattaatatcaaaattaatctaatgaactgctgaaaatgtggtagaaattgttaaaaagaaacttataaaccagcgcctcgttaaaaactgagtggtccaatggacaagtaaaattgaaaattatcaatcttattacaaatatttttgttttataacttatatttaaattctgtgtttaatacataattaaaatataacctaaatgcagatcaaaaatagcaaaatcctttagctgacaatatgtgaaaagtgaggatagattttgttcaacatttcttatctgctagtgtgctttttcgattgtgctaccaaaaattctttagtttggtcagcatataactcaaaaattgtggttttttagcgaaaaatataatgagctttgtttagctggaaaccgattcgagctctcatttagggatttgccggcatttcaattttcgataccaaacctttttgagctgtcgatgcctaattccgacaaaaattaattcactacatcaagaaaagggcataaaaactttctgaccgctgtaaacgagaattactaggattgttctatcaaaaggcaaaccacgataaatttgaacgagtaagttttttaaataattttatagttgaccaattttgcatcagtgcgtcgtgatgcgtgaagacctttggtaagagcggacgaaaaaatatgctctttaaaattggcattcaaaaaaaaatttctacaaattttcaaaaaaattttttagtttttgatagcatcgtgaaaaatcgaatttcttacccctacctaactcaaaatttctagcaatttttgggccaaaaat

SEQ ID NO: 23760 - DNA, 1040 bp, Heterodera glycines
caatcactgggactcaacccaccaacattccaatcactgggactcaatccaccaacattccaatctctgggactcaattctccggcattccaaacactgtgactcaaatctccggcattccaatctctgggattcaaatctgcggcattctaaacattgggactcaacccaccaactttcaatgacattccaatcactgaaactaaacccaccagcatttcaatctctgggactcaaatctccggcattacaaacactgggactcaacctcagcaaatttctttagcatttttaactttttgtgtgccttgggctgttgaacttttgcgccaaagatactcgctcggccgcttcgcggcctcgtactggggccttcggccccgccacaattttctgcccaatccaccatcatttaatcactgggactcaacccaccaacattccaatcaacgggactcaaccctccagcatttcaatcattgggactcaattctcttgcgtttcaattactgggactctattctctgcgtttcaatcaaaaggacaatccaccgcattcaatcactgggactcaacccaccaacattccaatcagtgggactcaacccaccaacattccaatcaacaggactcaaccctccagcattcaatcactgggactcaacccaccaacattccaatcaacaggactcaaccctccagaattcaatcactgggactcaacccaccaacattccaatcaacaggcctcaatccaccaacattccaatcaacgggactcaatcaaccaacattcaatcagtgggactcaacccaccaacattccaatcaacgggactcaatccaccatcatttaatcactgggactcaacccaccaacattccaatcaacaggactcaaccctccagcattccaatcaacgggactcaatccaccagcatttcaatcactgggactcaatccaccaacattccaatctctgggactcaattctccggcattccaacactgtgactcaaatctccggcattccatctct

SEQ ID NO: 23761 - DNA, 1801 bp, Heterodera glycines
tggcaaagttggtcggggatagtctgacttaaaatcctaccagcaagagctaagtcgatccacggtccaaagaaaaaatttcgtagaagaaaaactgccagcccgagtgacaaatcgcttctcgggactcagtcgtccgcgctgaatttttttctatagttttcccggattctcctcaaaaagttgtaagacccttccaccactttcagggcgctcccggccttcggccgggagattttgttttttgaaacgaaagtccttgtcaatataacgtatatactagcgggtgcgtgaaccgtcggctatttagctgggataaagcgcttcgcgctttgggagcttcgctacctagattagctatcgggttgtgaaaagatttggaatttttaaaaaattatcagcgatttttaggtcaattttctttaaaaaatttgctctaaatcacaaaatacttcattttttggtgaaaatctgtatcggtcaagggacaactccccgaaccctggtcatggacggtaaaaaagaaaaaaaagcgacaataaatctttttactaataattatgggaaaaaattggcgttctgtcacatttactttttatctttatttctctcacttttacgtactatctcttcattcttaataatgtaaagaacaacatttacttcgtgacgtttaacttttttcctacacgttaaatccactccaaattttgcatatcgatagagaaaaaaattacgaacataattggaaggtttttatgaataaaaagtgggttaactaaaaagttatggagtgattaaaatttttgcatttcttttcctctccttttggcgtactattttcatgtctctaacacatgaaaaaacaccaaattcgaaaattctaataattttggttataagggtacaaaatcactttggacatttagaatcaatagaaaaaagaataaatttagcattttggttagaaagagctgcctaggacttgagttataaggtgatgaacatttgaacctctcgacatcttttttctgagaaggacaaaattgctaagcattcacttagaaaaaagattctcttttccaaaatcttttttaaaataccaaattttgtccttttttgttgggaaataaacggtatattggcttgttcaaaaaaaaaaaacaaaaaagggtttttcccggggaaaggggcattacttttgttttttggggggggtgggggtttttttttttcccccaattttttttttgggaaattttttttccttttttttccccccccccgggggggggggcgattttttggtctccccccccccccccaaaaacattttaatttgtgtttttttttttctttaaaaaaaaaaagggaaaaaaaaaaaaaatggggggggtttatattgttttaaaaaaaacccccccaaaaattttttaaaaaaaatgtggggtttttttttaaaaaaaaaaataaaaaaaaaaaatttttttaaaaaaaaaaaaaaaaaggggggggggggggggggggggttttgtgggggggagaaaaaaaaacaaacaaaaaatatttttttttttccccacaaaaatttttttttttttttttttttttttttttttttttttttttttttttttttttttttacccccccccccccccccccacaaaaaaaaaaaaaaaaaaaaaaaaaaaaaaaaaaataaaaaaaaaaaaaaaaaaaaaaaaaaaataaaataaataaaaatataaaaaaaaaaaagaaaaaaaaaaaaaaaacaaaaaagaaagaaaaaaaaaaa

SEQ ID NO: 23762 - DNA, 647 bp, Heterodera glycines
attgagtaaaattaaatgaatcagaaaatgcaatttgggactctttggcacttttaaatgtttgctttttgtcactgtgccttcgccagcgatggctctgccgaagagtttgtcgaattctctaacagttttccctcttttgttggtccgaactgtgccgagaccagcaattggtaggccaatgtgccgacgatggctccgaaaaatgggcaaacgattggcacccaaaaccaaccgaaagaattgtaactgaacaacagacgaaaaaggcattttgaaattggacacaatttcaacactccctcacctgaatacttcccaaccgtacccagctaaaagtgtgaaaagtcgtgggccgaaatcccgcgccggattcgctgcattaccggcgttcagcccaaaagccatgttgatggcggtgagcataagtcccatcatcgccggttgggccacccgtgggatttgggcgtgtttgtcggtgatgatgccaatgatgaagcagagcatggctgtgcaacatgtcttcagtcgatgccctttttcttatctgatgagtgtttgtatctgcctaacctggtcaatgacggagcccaaaatgctcaaatgttcccccgggtaagtggcgaacacaacggccgtcgcctttg

SEQ ID NO: 23763 - DNA, 723 bp, Heterodera glycines
aaaagtcggtccgcaaatgtcggtccgcaaatgtcggtccgcaaatgtcggtccgcaaaagtcggtccgcaaatgtcggtccgcaaaagttggtccgcaaatgtcggtccgcaaaagtcggtccgcaaatgtcggtccgcaaatgtcggtccgcaaatgtcggtccgcaaatgtcggtccgcaaatgtcggtccgcaaaagtcggtccgcaaatgtcggtccgcaaatgtcggtccgcaaaagtcggtccgcaaatgtcggtccgcaaaagtcggtcgcaaatgtcggcccgcaaaagtcggtccgcaaatgtcggtccgcaaaagtcggtccgcaaatgtcggtccgcaaaagtcggtccgcaaatgtcggtccgcaaatgtcggtccgcaaatgtcggtccgcaaatgtcggtccgcaaaagtcggtccgcaaatgtcggtccgcaaaagttggtccgcaaatgtcggtccgcaaaagtcggtccgcaaatgtcggtccgcaaatgtcggtccgcaaaagtcggtccgcaaatgtcggtccgcaaatgtcggtccgcaaatgtcggtccgcaaaagtcggtccgcaaatgtcggtccgcaaatgtcggtccgcaaatgtcggtccgcaaaagtcggtccgcaaatgtcggtccgcaaaagttggtccgcaaatgtcggtccgcaaaagtcggtccgcaaatgtcggtccgcaaatgtcggc

SEQ ID NO: 23764 - DNA, 1626 bp, Heterodera glycines
tggaggggtcaattgactaaaaggaatttagaagaggaattttaaagaaatttgaacagaaactcaacgggaagctgttcactatcagcaagttgaacactcatctcggcatttttcaagtaattgagatggtactgattttcttaacgattttagaaataaaaagcaaaaacaaagggccttaaaattgccttggctattcgaattcgcaattggaacaccaataaacacatcgtccgtgtcaatttgtgtgaaagatttcacttaaaaggtaaaaaattggaaattagaaaaggattaaaaatggactgattttccgtccacccaccgacccgtttcccgtcgctcctttcgcagcgaaatgtgcgcgtccacttgcatagcacagaaagtgcacaggcgcagcattccgttacagcccaactcagtgccattcacctgccaagtgttgtactttaacagtttcacttcataaaatttgcaaaactcaatatttcatgatgtctgattgatagtctaattagctaattgtgaggacagagccaaccaatcattctttcattcattcactttcacctgacatcgggcgcaatttttgcaaaagagctgtccacagagtcggcagtgatggcgtcgacggaaagtgctaaacttttcattgcattcgtagcattcgttgccggcggagtcgggcatccttcaaaatgaatccaatgagaaagaaaagaaagcaaaagtggaaaaaaccaaccaaaatcgtctaaactcgctctttttatagtcgattagccgtttccgaaccaaactgatcggaccatcggacaaatcgttggaggatggccgggagagaccattttgatcagtttccgtgaggaaatcgggcacttccaagtcgaccgacggatgcgcttgatcagagtaaatttcgtcagtttttatgcttttcgacattttctcatagatagttgaggaagaagagtctaaaaaaagattggaatcctaataattttttacttaaatttccaccatttcgcgagaaagaagaagaatttgaaggtcggaacaaattggaaaacaaagagaaaattccgctgctatcgctcgttcgcgccccgaagcctttttcagcctccaaaggctcatcaaaaacgggaaaataaaccatggaagaggaggacatttcgaacaacaaaagaacagtgtcagtcgagaaaagacaacaagaccaatttgtacacaaagagctaaaaacgcattaattaagaaccttcgaatttcacacacaaaaaatatttaaattttatttcacattaaaatttttatcggaaaaaaaaggaaaagtttattaacgatttgtacgaggaatttgtaaatgaagattttttattcccagagaatttttgtggttttttagtgcccgttcttcggcttataattaatgtgagggtttttgattgcgtaccattgcattaatcacgattttaggagagggaagaaacatcgaaaaaatttaggatttttaatgacttgtcatttgcctgtctttgacaaacgccagctttattggcatgtgattcttgttaaagaaaatgtaagacaaaaaggagggggaaaacgggggaagag

SEQ ID NO: 23765 - DNA, 1530 bp, Heterodera glycines
aaaaaaaaaaataaaaaaaaaaaaaaaaaaaaaaaaaaaaaccgggccccccgtcacacaccaacaccaaaacacggtcccccccccccccccccccccgccccccccccccccccccccccctttttccccctttttctccccgctccccccgggggggggggggggggggggaaaaaaaagggggggggaggggaaaatttttttcccccaacggcggagggggtgccggggttcccccggacggccctctcgaggaatttttttcccggggggcccagctcgtgctgcccctcccttcccctcttgacatgaagtcgggcgatacgtttgccctccccccattttgttgtttcttttttcttccgtttgctgctgctttggccaattccgtgcatattttgggtgcattccttttttcgccccattccgtcgccgttcaaacgattttcccttggggcacaaaaaatggtaaattatgcgccaaaaattacgccaaattaaaaaattaataaaaatgctcctattttttttttgcaattgtgtaaaacaattttatcaattgcgacgaatttttcgttttctcccgctgtcctttcacctgcccccaaattccatcagcagttcactcaaacacaaatttttttcctatcatcagaaaacaaatcatttttcgttaggacaaaaaagggggaattttaattattacgcaaatcccccgggggactaatctctccgctgtgggaaatattgtattatgtttgtgtgcctgtcccccccccccccccccctacatttatcgtcattattattcatgcattattttccttaattgaagtgaatcagttatgtaaagtatgtatgtttctcatgttttcactattagctaccataatatttttgtgcgaaaaattaccgtaactttttttattgaatactgtacaatgggtgaaaggggacgactgaactcgggatcatcgtgttggtcgcagaattggctcgcaattgttcgaaaaaaactttttaatcagctagctaagcattaattaattaactctgagcaactgattgagagtccgtccgttctgtactgagttggtcctttggatctttttacgttttgccatgcctttttcttctttattttgtccgttccgttctgctgatcgggcccagcaaaaatcatacaaaaatcacagtgcacattcaacgcaaagggggggggggtgttcaaaagttaggccgccgccgtttcgtcccgtcatttgtctcaatgggacggaaaggggcgtcgggggaggggatgaatgctgctgatctgttggcccagctcaaccctcttgggtcagaagctctttcggatgcttcttcttctttacacgccaatcccccatggggaggacgatgctcttccccggatgcttcttacgcttcttcgtctcccctcggagaaaggatgcattttcccgggtgcttctgtctctcttttagcaatcgggtgggatgctttgtctccgcccgttgctctca

SEQ ID NO: 23766 - DNA, 1995 bp, Heterodera glycines
acatatatagaggaataccgaaaacagaagagcgtacactcggcaaagaaacttggaaaattctgaatcgaatcgtttggtagttgttagtttccagcatttctatatttgttattattttcatcttcttaaattttaataaatcaaaatataaaatcggtgatggctttaattccgataaattgtatacggacaacttttattagggaaaatcaaacaaataaataaagcattttaattcatcaaactggcagaatgccatgtgccactttttgagtcagcgaggacaaaagatggtgcagcaattggtcctcgcattcagtgatctgcagactgaccggacagatgcacgctttcttcccgtccaactccaattgaatcactctccgtctcttcccctcttttttgtcgctttcctccgctgctgcgtccttttccccttggttttcctcctctttcacttccacaagacttttgtcaccgcataattcgcacagtgtcccaaccaaaatcgattccaaattttgctcaatttgctgtgctttcgcaccgaaatccttcggaacatctggagtttttgaaaaataaaagcagaaaattggcacaaaaacttttatcgaggatagggttggtttgggcgtgaagaatggccgaaagtgtcgcatcggcaaatcttaaacggattaatttatgtttttatgcccaagaaatgaatgtggtaaaacagtaaaattcatttgttcattcaaagactcacaaatcattcacggggtttgacatccattcaacgatcacaatgtgttggacggaataaaaattgatagtaatttcgtcctgttaataaacaaaaaataaaattttgtgcgctttgttgtcctccttcctccacaaaccctgaacattttgaccacgtacgtcggtgttcctccgtttttgctttccttttgctgtttgtcacttgtcgacgcttcgtccgaatttgacacaatcgcatcggacgacagcagacgaaggttgtgcagcagcaaagggaaggaaccgtcatagaacacactttcacgttgggacagccgcgaattggccaagtcagtgtaagctgaacagaaaaagggatggatgagcatggccaaatagagcaacagatgagaatttagtcattgaaaagggactgactgaccgctgagttcattcggatgcaacaaatggtaattgaaatttcgccgcaccaaaatgccgctcacaatgctcccatcctccggcacattaattgccagttgtcctacaacttttgctgttttttggccacgaaaatataattggacggactccgtgttgcgcggattgtagaccttttgtgtttaatttaaaggagcaaaaataataataaacacctcaatttggaagtcggtgtcgtcctcgtattgtcgcagcacagctgccttcagccgattcatttcgttcatttcgccatggaccaaaattaaatttggtggccggagggcacggataaattcggaggtttgaatgtaatcggtgtgagcagagaaactaatataagccaccttggaatgataaaaacggaacaattagtcaattttcaatcatttgtttataaatgtcagtctgaggtcacctgaagacgcattggcaatctttggccattcagcgcaacaatttcctccggttcggacaaaatgtgctttaaaagagatagagcataaataagcaaacgaaggaatggcttattgtggattgaattacctttgccagtgttccttcaacacaatatccggcaattaaacacccgttctaatgtgaatttgtaaagaaattacatttgaaatgacaatgtattcaaattgttttctgcaccgtgtcccgacatttgcggtccagacatttgcggccccgacttttgcggcccgacatttgcgcctttgtccaaaatctggttcagaactaagttttttcaatcactgatcgcataaatagctt

SEQ ID NO: 23767 - DNA, 1464 bp, Heterodera glycines
tagagaccgactttttgaggtaaatgcctttttttctgcgcattagttccgatatattaagcataaataacgcattttccacttggtttaaggcttctacgttgacttttattatgcctttttttgcctttttcgggattttcgtgccttaaatgccttttttggcatttttcccttttggtgccttttttggcgtttttttccaaaaaattccataaaaaatgcaataaaatcgggaaaatacacccctaaggaaatgacttgaaaaattttcagaaaatacacccctaagaattaaaaaaattttctcaattgatcgccaaaatttcattttttttttcttgataaaaaattttaggtttaaaattttcttattcgaaaaacatttaataaccatttaaatgaccaaaattaagttagttaagttttacgtgttttgctccctaataatccttaataaaaacattttaaatgcctttttcaaaaatatattttataaaaaagaagaaaatgttttattattttttttatcttgttttctccttgtttgctttttctaatgatcattcaactggctcgtttactagatgcctttttcgcgattttcgtgcctttttcgcgatttttggtgcctttttagtcgctatctattaatgagaaaaacgacaaatgttacaaattaaaaaaacaaaacgccaaaaaaggcattttaaaaaagcaaagagactttaagacacattcacaacttcagtcaatgttttcttttatctccacgcgcgttgtgttgaagcggagcgtcgttctgtgtgcttttgcggcgccgccgacgccttccccttgggagcggtggacgaaagtcgcgagaatgggagcacccggcgacgctcgagagtacgacgactcccattttcctaaaattggagggggggggggggtgaaaacacaaggcttccatcgaaaatttttcaaaatcagaacatcaagtccaaaaaatcagattttgggcacaaaaatcagaatattttgaaaaattgcttttaatcttagactttattcgatcaaaaatgtatccaaatattatatttttcaccccccccccattatggatttaacaattttggggagtgaattagcaaattgtaaatttcagtgcattcgggaattaaaaaaacagatttttaacaatttttgcggcgctttcaaaaaattttggggaacgagggagggagtgggtccagcgatgccgacgtggccgggaaaaattttaaaaatttgagtgcaatttgttaacagatattgtcgaaaaattgtctaaattttgtgtttttaagccaatttttaagaaaataaaggttttttagggtcaggcggtgccgaaggcgccgccgaaaattttggctaattttttaacagatttttgtctaaaaaatcacctaattttgcgttaaactttaaaatttctag

SEQ ID NO: 23768 - DNA, 752 bp, Heterodera glycines
agattttgccaaattggacaatttaatggcactgtgctctccagtggcaattagcacgccaggtaatttgaaaaagttcaacaaaattcatcaaaaaattgcatttgagtgtaaaaggttccgattcccctgacttggccctgtgaaccgaccatttgagtacagaaaacagtcgccgtctgtgcccggccgcaaatggttccgttgtgttgtgcccattttgacaatgtccgcatgtgtaactgatcagtttgccattttttgaattttgttttgaaaaaagtcatcccactaaaagatagcttaaaaacacaggcccgtaaccaaagggggagggtgaattctattccaaagaaaaaccgaaagcttggtttttagcaatttcgtaaaatttctcaaaaaaatttcacgacgaaccatcggtaccaacaccaaattcccttatctcactcactttgtccaaaaatcataaaaagagtaaatgcttgtcagaaactgtagcaaatcgcagaaaaatcaaaaaaaaaaaaacacaaaagttcctggcccccgccgcttcttattgataagcgtttttctggttacgggcctaaaaggaaaaatttcggcgctacttgcaaagagggcctttttgaaattatcaaaaagcaaaaacaaaaggggggacccttttgtttgcaaaattttttaatatttaggcatgaaaaattattccctgaggatctttgagtccatgacctcgaaatagatgt

SEQ ID NO: 23769 - DNA, 881 bp, Heterodera glycines
acacgagaagttaaagttgcaccattgtgttgacttggctggcggtcagttgactcgcgagttgttccgtgtggaccgtcgctcgcttttgtctcggactgtcgtaaattcttaacttttccggttcgctttggtttctgcgcaccacatagcgagttcggaatcttcctctgttccgactcttcggttggccttctgacggagaggttggttgtatcgtttgcgtggttaccgggcttggaaccttgggcaccgcgacgattggctttggtggctcagcttttggagaagtcgttggccttggtggctgatacttctgcgccgtcgtcgtcgtttttggttttatcgctttttggatcggtgctgcctgttttggcgttggcaatttaaccggttgcagttgtgcctttcggctcggctgctccggttttgctgggccaactgttgggcgaggcgctgccggtttcggaacttccgtttttggagccgctgcgactgatttggggatgatggccttcgtttgattggcattttgcttcatcatttccaatctcatgttagtgtcggcgctgaattggtccaccggtagtagcgaccgtttttgagcgcctcccggtgactgtccttttttgggcactccgctgggaccatttgcattgttgatcatgttgaggaacatgccggcatctactgcgaatccctggtccgttgcaacaagtgtccggtcgcagtccttgattttttgcgcttttccgtcaaaggacagtgcgatttccttgtgcgtccacacgttctccgatgggtggaattggccatcccaggtgttcatgtgctcaaattggcactcggcatcagcgggcgttgaccaacccatcacagct

SEQ ID NO: 23770 - DNA, 813 bp, Heterodera glycines
  unsure (1)..(813): unsure at all n locations
aaatatttaagtttgtgagcggacaacgccattggacggaacaggagatgaaaaaattgcttgcttcaagccggaaggagcaattggaccaataggaatcaaattttttgcacgagtttagggcaactgaaacggtgaacgatggacgaaacgatcgcgatgaagccggcttatctgatgaatgatacagttttggatggagtcggtgatgacgacgaattgttcattttttgccccttttactctgaattgattttaattttttggaaaatgtgccaaataaattattaaaaaattctatttatccccctggcacataaatggagactggtagattatttttcaacctcctcagaaagggatatataattggagacgggcagattaatggagactggcatataaaaagagcaaatacggtaaataagcaatttgtttagtcggttttcgtttcttcattataaaatttaattattggcccagaaaacaaaaaagttaatttaataataaaaataaaaacaatgtaaacatttataatttaataatcgctgaacaatgtatttagttgcctaattagaaagaaaaatttcaaataaattcatttgcctaatttatagaattgaacaaagaaaaaaatacaaatgtatgaatgattgaatataccaaattagcacattaaaatgacttaaaaaaatgttatttttgatgtgatacgttatcacttataaattaaaaatagtaataatttaagtattttcttaataaattttattttagcttanatttaatttttanaaaaatgaaaatttatat

SEQ ID NO: 23771 - DNA, 2202 bp, Heterodera glycines
gacatttgcgcctttctggtgttcgtgctctgttttttacagttaccccatttaatttttgccgttttttgtcttcgtcgatatatacattattttgataaggcaactcagtcaaaacattctagtaaacggctgggattttgtcctctccaaaaattatttagaaaatgcgcgccgcaaaaagtgacgcagagaattaaattaaattttttgaaaaaaccacgaactcagagtaaagttatttcttcaataagaagcaagaaatattcgcataaattaattctaatctttcgtataacaatgctcacacttactttatttcattgacaaattggcaaaaaatagttacacgtttttgggttttatgaattactctgggagaaatacaaaagattaagagttaaaaaatcaactttcagggtattcaaaaaaacttctcccaatggaaaggtattccctatgttcatttgagccatatctattataattgcatatcatagattacaacttatcttggaaagcgcgattttttggatcgtggtgaaactgtcgacttaataggtaattgataagtcagttttttttttaatcgctattgtgttttagatggaatggttctaattgacgatgactatataaagtcaagcaaaaaagtgactgtccaactccttgcggcatttcgctatgggcgagaggatttggatgttttaggcttgactttccgcaaagatttaatctcgcaattatatcaggttaatcgcgtattttattacccacctccaattaaagcatttgactgtttaaggtttacccagcaacacaaaacgagtccctaaggccgatgacgcgactgcaggaaagactgaagaaaaaactcggtgaaaatgcctttcccttttggttcgaaatccctccgaattcggcgtcttctgtcactttgcaggttcagatttttctaaattttaaattataatttcctttttagccagcccaaggcgacacgggcaaaccttgcggagttgactatgaaattaaaacaatggtcggaggcgattcgacgcaagagaagcccaagaaacagtcagtttggaattcgaaaaaagtcagttaatcaactaaatttagcaactccgtccgtcttgccattcgaaaactcacttactgtcctcaattggagcgaatccaaccgatggttgacgtgaccaaaaattttatcatcagccccggtggccttcatctcgaagcgtcactcgacaaagaagtgatttgccacggaaactcctattttggctttaccttttttagatgtattaccacggcgaatcaattgcagtgaatgtgcacatccaaaataacagcaacaaaactgtgaagaaggcacgttcgtacttttgttttgacatgacaaaaaaaacattttacagataaaagttactgttcaacaaatggcagacatttgcattttcacaaccgctcggtatacttgcgatgtggataaaattgattcttggtaaatgaaatcaattatttattaaggggaagtagacatcaaattatttgagcatattcttaattggccagggttgtagtcaaaaaattttggaaaaaatgctaatgggatatattctcattttccggagcgttgcaataaaatggaatttattacttttattttcaaaattcattttgttgattctttttatcatttttgcatccgatttttattccagcgaaggttttcccgtcgggccgggttcaaccctgtcgaagatttactcattgtgcccacttcttttgaaaaacaaagacaaacgggggttggcattggacggccaattgaagcacgaagacaccaatttggcctcctccaccacttttgccgctttgagggtttgaattgaaattaaccctattggcctccaatttttattctcacaatcagcagtctgtccacgagaatctgggcataattgtgcaatacaaagtcaaaattcgccttctcatcgctggcgcattgggcggagaactgtcggccgaattgccattcactttgactcacccaaaaccaacggattcacctcatccaacggagaaaaaggcaaatgtcgccaattgccatgagcaacaaacaccgccaacgaatggggcacaacagagagaacagaaaggaaatttcgtggctgatgtcgatctcatccaatt

SEQ ID NO: 23772 - DNA, 993 bp, Heterodera glycines
aatttccaaagataaaaaatgcggtaaattaaatttttgggggctggggcgggatgcattaaaaggggctgatgggtcgactaagatttttcgattggatccgacggtaaaaagttgatcggaaatcaaattattaacggttcataaatttgactatttttttcttcaaaactacttttttgcggtgcaagaaatcggaaaattttcaaaaaatatacaatataataaaaaaatttctaaatattttaataggctaaattttttaattcttaaccaagtaaaaggtatttcacaaatgtttttagtatattcgcttgaaaaaattattcaattattttatcaaaatctttttttgtcatttttcattattttagaacatttttgggaaaaggagtgactatttacacgttttttacagcgcgatttttgcaaaaactttttgggaacttggaggagagtacgacggtgccgataggcgccgccgggaaatttttaaaaatttcagttcaatttattattagaaattgtacaaaacttacgtttttaaaaaaaaaatttaaaaatttacgacttttcatcaaaaatttcggaagtcggaattccgaccccaaaaatgtcggaaatcggaagtctttccgtgccatacctggtgcctatcgacatctgcgagaaattttatgaaatttaatgcgatttgttaacagattttgtctaaaattgaccaaatgacgcagtttttgactcaatttctacaggattattaagtaatccggcggtgccgataggcgccgccgggaaaatttcacaaattttgaatgaaatttgcgatgaaaaatgagttaactttaattaaatttatatttaatttatttaaaaatatttggcattctgtcttagaaaaattttcaaaaaaataataaaatcccgcataatcccgcacaaaaaatcaaatttgcggatcccgctgagggattggaactcaaaattctttgc

SEQ ID NO: 23773 - DNA, 2084 bp, Heterodera glycines
cgactttgcgacgcgatcggaaattaaataagccaacctttgagaaaggaaaaaataatcagtgtgtacaatttttatcattttatctatgaaaaaaaatcagaaaataactttaacgatgaaattttaatttatttacactttttaaaaatgatttttactttatttgagtttatttttatattttaatttatttttgacgtaatcttttacaaaattgtggtctttttttgtaagaatatatgttaacaaatcggggtcaaaaactgccggcatgaactttgcaaatgcagcacaaaaataatccagcgatgaaagaattgtcggttacagtaagacaatttcaaattaaatatttactctttattagatggtatatattttatttctcgagaatccaacccttatttgatcagaaagtcacaatgcctgatcaagatcgaatcgatatatcgatttgattttttggttttcaacggaaaagccgattggaccctttatccgcttgtccgatctctaattacctgatgatttatccggagactccatcgaagagtgataggcatcattctgctctgaactcgctgggtcatcgatcggaaaagtgaaattttcattgcccaaattggcacccttctccccaattttgcatttgcatccggtaaggttcaaaccagcaaaagcattagcgccacttaaatccgggcatttgtcactttccgaacattgccagcccatgtacacgtcatttggttctttaaaaaaaatattcgaaaaattttcaagaattttatgtccaaatttatacccttctgacaaccgtaggcaatgcaaaattccgttttcagcggaggacattccaagatttcaataatggcaccataattgctgtaatggcccactttgcattgcagcgctaaataatgcaataattaattgttttttttagtttataaatttatgaaaaattaaccggtggaatggaggccaaggcaaaaaacagcaaacaaagaaataaaaatgctcattttttcgactattatctaaatttaattgggttttttcaataatttgagaataattttcaaaaataaagtgtgaaaatggtgaaaataaaacgatttattgtacaagtgaataattttatcagcaaacagaatgtgtaatccaaacacttaacataccaaactgtttttggtgagaaatgattcattaaaaaataattcactgtttttaaattttggacatacgcgaccaatttaaaaaaaaaatttcgggattccaaaaaaaaaaaatacaacccttaaaaattgaacgaaaaaagaaaaatacacgccttaaaaaccgtaaaaaataattcactgtttttaaattttggacatatgcgaccaatttaaaaaaaaatttttgggattccaaaaaaagaaaaatacaacccttaaaaattgaacgaaaaaagaaaaatacacgccttaaaaaccgatttgagccgcccccaaagccaagggtctgactacgcccctgaaatatactgtatttcttttggaaatatgcagtcatttttgcttctcttgctgatgttttcttttcttttttttaaatctatgcttaactaaattagaaattattttcaacactaacaatattaaaagaattgaatcagtcattgaaacagtttaaaaaaagccaaccttgaaatcctatataataaagttgagtgtctgtatgtgtgtgtccagtgtttgaatttgtgtggcgttttgtttgttttttgcgttaaaaaatgatttgaaaagaaatgaaaagaaattgttttgaaaaagaagagaatataaagaaaagagacgaaaataaatagttaagatgaagaagaaggcaaaagaaatagcacagaaaaagaaggtaaaagatttctcctcctaggatgtagaggttagagggagggatggtgggaaatagtgcactgtatgactgtctgtctatgcgggcagcggcagatgggaggggcatacagtgaacagacgcgtgctgctgtgcagcagaaatgtgttggacgcgtgcgtgtgtgtgggagaaggagggag

SEQ ID NO: 23774 - DNA, 1103 bp, Heterodera glycines
tggcagcaaaatgttagggtaattaaaaagtgaaatagaagcagaataaatggagatggtaatagagagagtgtgtgcaaaatgaaaagggggagaggcgtagaaaaaacggcggaatatggcgggagcaaaaactcattttttaacgagaagaattcgaaaggatggggtcattatttctcagaaattatgtatgagaaaaagaccaacgaacgcagaaaaaatcgattttttatatacataaatagcccacaaaataaaactagttgagtgttgcaaaaaatggagggtggaaaagaaggggaaaaggggggggggagcgaagcgaacgccgtgggcatttggaggaacagtttttaatgtgcacgttcttttttaatggttgcacatatgtaatcgacccaacgttactactgtgtagtacataaatatatctacataggtatgtatttcattcaataattaatgggctgggaatttaagtcacgaaagtctcaaaaaagtcataaaaaacgccaaaaggagcatgcgaagacggagcaagtatttttaaccggtttaatcgcttctgatcaacttcccccacccctagatcgatttgtcttgttgagagctatcgattggtatcatatttgtcgggatccgtccacggaaaacatcgtataagtcaagagtgccaaaatggatggatttatacatatatttacggaaaagaaaatgtttgttttctgccggttgtgtactttaaaaatttgttgttaccctttgaatgggtgcggaagaataaaattgatttgttacgcctcacatcattttaatcataaaatggtaaaaaccaaatttttttggaaaacattaaaggttaattattaaataggtatgtatttagcaaaatatgtatgttttatttgttagcaaacagcagaaaaaagggaataaaaagcagagaccaatatgaattacataatttttatttatcttatgcacaaacaccggcggaaaaaaggaaaaaaagtcattgagagtgtcggaagtgattgatggcacaaagacacaaatggctgaatggcatacattgggccaaggagaaaatctgtcggggc

SEQ ID NO: 23775 - DNA, 2063 bp, Heterodera glycines
ttgttttcgtgtaaatttgaatagtgccaaaaatttatctaaaaaactggattaaccgtcggttaaaaggccctaaaatccacaaaaaatggtaccttatggaattccggacccgcaaaataggtatcccccattccccaacctcggcactcaaacaggcacaaatttttcagcattttccttaccggaaccccttcgtaatccgatggcggcacatagcgcaccttcttgagcatgacggcataagccgcgtcagcgtgccgcgcctctccccaatatttggaaccgtcattttttgtttttgatgttcaaatttgtctattttgtgacggcagaaattttgagattattgtttttgctgtcctccggcatcccgtttttaattgatctgtgaattgtaaatagcgatcaatacaaaacgtagaaagggcacgatcaatacaattggaaaagcatgcttgttcaatgtgttagtcaaattgaagggccgttgctggccatttttgggaaaatttgaaaagtggcgaaaaacagttcgccaaaatttttgaaaaatacacatctaataaaattacagcaagttttcgagttttttgatcagaaattcgaatgcctcacggcagcagggatatgtgtgttgccttcaaaaaataggcaatcgaaaacggtattccgacggctaacaataaaacatttgggcaaatttttaaaaaagaagctaataaaattttaaaaaaatcgccagaaccaagaagaatcatacggaaaacagaaagttttccggaaaaacacaagccaattcagaaattattttcctgataatacaaaccaaaacataaatagttgtccggaaaatcacaaaccaaatcaggaatttatttgcggaaaatttaaaaaaaaaacatttgagttttgtgtaaaacacaaataaaaatgttaaaaacaatctttggaaatataaatcagaaatgtgaattttgtttttgtttatacaaaaccaaaaacagcaaaatgtttccggaaaaactcacagcaaaaaagaaattttatccggaaagctcaaggcaaaacacaggattttatttagagcataaaacaaaatccaagaatagaaatgggtagtaagtttattttaaaaaaattatgagcccataattaatattaaatacgtaggggtttaaccagaataaaacttaatttatttgtttgacaataaatgaattgaaattatacagtgatcaatggaattttttgtttaaatttaaaaatatgtaagtaattttaatgccggcggtgccgtcaatatgcgaaaaatatgttttttattgcaaaaatggttgtttatgaatcaacttttaattaattacgaattgattgcaaaaatggggtgagctgtggaacattgggctcagtgtgaactgctcaaaaaagctgagaaagtttgccgccgtgggcctaattcaattcatttcagagggctattgataaagtaagtgtgcaagagtaatagagaagtgttgatggaattaatgacttttaaaaattcgtaaaagaacagtaaaaatttaatatttttttgtttaactttgtttgtctttttttgttaaattcttttttagaaattaaaaatgggtataaatttaattaaaatttataaattatgtatttatttagaaaatatggatgtacaaaaaagattaaaaatgcttgggttttaatcaaaccaaccaaatttgctcattaatattatcatgagttagttgggtaggtggaagttaaatgttttttttacagtaaataaattcaatttaattttgttaaatttaaatattaaaaaaaaaatttccttttgcattgtttgtttgacttaaaaatatgtaattttattaaaatacattaaattttgttgaacccgaaatcaatattatatggccaattggaagggggttctcagcgccgcgttttccattcgcattttgctgatgcaaaatggatttgtgatgcagcaacagagaagaaaagggtggtgaatcacaatgcaaaaggggcggggcgatgcagag

SEQ ID NO: 23776 - DNA, 2406 bp, Heterodera glycines
tttaaaactcggatgttttaaatttccttcccagttcagctaaaaaaggaggccacgggcgacccaaagcgacgccgcggggtgtggcagacaacgcttcggagtcgcggctgacggacgcattggacacggcgaatcggcacgcaaaagcagcggccaatgcaaagtatcaaactgttcaggtaaaatgggagcacaaaaaacatcaatgaaaaagggggtggcggaagtcagggatggacccaggattttggctcggtgagggcggcgtttccaaaaaaattatgacaagtggggcctggtaatgctgccaggcgccgccgtgggaaaaattcagaattttggcactattttttaacaatttgcagcaaaattacttttttttgtgtatttttgaaaatttagcaaattttcttggaaaattatgttagggaggtcggtcttggagctgggttcaaggtttttcattggttaagcctgccgctctgtccaaattaggccaaccataaatgcctgggttatggacagtaaaatccaggcggagaaagtaattgtctacaaaattgcatgagaatgtttacaggctcttcaactgcacaccaaactgatgaaggacgcggtggacagcgacgtgaagcaaaaagggggcgaaggaggcggcgattcggccaaatgggacgaagtgatggaaaagcgaaatgggaaaacaaaaaatggattttaaatggtgcccttttcaaggtgaaacgcgcaaaagcggaggcggaccgacgtgccaaattggacacggaaaaggaaggcacggcacgcgacgcaatcaaagaattggagaaagtcggtgttgaataatggggggggggggggttagttcatttgaaaaaatactcggcgaaaagtaaacaagacagcccctcccagcttaaatatacgaaatttattagaaaattgaaattttggtgaaactctttcaaaaatgtttcagaaaacgatatttgggttccgaaattaacagaatttttttttgaaggtattgtaatttttagaattttttatctagtatttttttgccaaaaatctaaaggacaacaatgtgaattttttctgaattcatggcgcatttattaatgctgattattttgctattttggattggaaaaaacttcaatttgtacccaacttttggcatgaaatttatgttcttgatttttttgcggcggtaaataacgcgtgcgaaaaatgaaatgcacccccaaaaatgggatttaatttttggaaaatggttgatgaacacactccacttgtttgcgacaaattttcaccacccttttcagctcattttgaccggctcacagaacagcgttggcgacgacgacggggaaatgcctctgttgctgaacgcccgcgagacggccaacaaattgtcgagtcgccttgacgagatgaacttgctgctgggccgagagcaggcgcagatgcgcattttcaccaactacaggcaaaatccaaaacgaatcaaaaaaattttgttttacaaatgcctatattttgaatatttcagcacctgggaaaacaggaattagtagctgttttctccaaaaaatttttttaccatttcgagaccaaatttcaaaaaaaaaaatatgagaaatgagggcttggaaatttttttggaaattttatggaaattttaatgtaatttgaaaagaatattgcttaaaacttattattattttttttaaacagacaataatacaaataaattcaagggacctcgtggagcagggcaggcagcaatgggcggaggagctcaactccattttcccgggcattgacttgcgcgccaaacagggccaactcagccacgaggagttggacgcgttcattgtccatggcacgttttttgtccctccttttacgactcatggcacaaaattattttgattttcttccctcattatcctatgaatttgactatttttagtaatttggctcaaaatgacaaaaaattggttatttttcagctaaaaacggctaaaaatttctaccttttctcctcggcgttgaaatttcgtttagactgaagagcaaaaaaaaattttatcttctggttcccccctcgcaatcagaaatgtttttctgatggtgggttgcaacaaacacactgccatgaatgaaaaaatatgggagagagttttgtgcgctgttaattgaagtcgctaattatagctaattggtcccttcattttcagcgaatatccgagttgaccagctcaagaggcaattggcggaacaccaagtcagtgttttgcaaaacaaacacacacacaaatttattcctttttaggccttggaggagcaacgagttttggaggcggtcgaagaacagcgaaagttggacgaaaggtc

SEQ ID NO: 23777 - DNA, 2292 bp, Heterodera glycines
cgaaaaagattttaaaaatgggctcaccgacacaattacctacctagtgtacattaaacttggccgtaaaggttggaaaacagtatcatcatatgttataataaagtccaaaaaataataataattagcagaaaacgctgacaatgagataatacaaccacgtaatgataatgggatatgaagggataaagcgtaagagaaaacatttgctaacaaaatgagaaacagaaaaaaaattaaaagatgattttatatttgtacataataaaagcgaagaaatcagtttaaattggaaaaatcaattcgagccccttaggcattgattgacgcgccatttgctcaattagcttttgttctcaaaatccaaattgtcgttcagagtgtcgaagctttcccagccttcgcctcatttgtcagccgactgctggtcaatgttgaagatgttccagccttttttggcctaaaaagccaaaaatatatgaaacacacaaaaaagaattaaaatgatggcatatgaaagcgaatgaaatttatccaaaattatctaaacataatgggaaaatcctaccggcgcagggaggggaaatgggcggagagacaatttggtgttcaaaacagagggcctttaagaaatagtcaaacatttttaaacaatttatattcgtctgcttggacatacggatgtgattgttgggttttgtccgttggatatccgttgtcgtccatcaaaatggcgtgccgtggcactcgagcagttccctggggaaaaacaatttcaaattttgatttaaaagttcaaaaaacagaggaaggcacctgcaacgcacgctgcgaggccaaaaaggactcagaacatttggggctgaccacgcccttgtcgatgagtgtgccagtcgggtatttcggtctgaaaacgcgggaccaacattttttttcattgaaatttgaatgtaatttttaaatccatgatttccatataatttttccattacccgtggctttatcgcattagctgattgatgttggatggtgtggatcggatgttccgcaatttgttgacgacagtcagtgtcagcttggctttgccaacggtgcgccaacaaatgcttgaccagcggcacttcgtaggccaaaagatgctgaaaataaaccatttgtttggggcttttcgaaaagcttttctttttggttatgggaaaaatattttaaaaatttcgaaaaattaaatttcgtttttaaaattccaatctaactgggcgaggaaaagagctgctccaacaataattacttggtaaagtccttcgccgcaagcgatgcggtagatgaccactgacgagctttaaataaatattttaaaataatttaaattatgtacatattttttattattaaacattatttaaactacatttaattcaaatttgccaagcgggcaatggcacacggtttggtcaatgaagtgcaatttttcgtcacgtggcttctaaattgttcttctcttctatttttgcggcacccccccccccccccccccaaaaataattaaaaaatgcgaaaaaaagccaaagccggccttctctaaatgtgtaaaaactcccgaaattatttaaatttgttatgtacatcaaaattttttcactctcaatattttcacaatttttgttaattttatgcatttttattaattaaaaataaacgttaaaatttatgaatagggatgggatttttaggggcgaaaaattccaatttagggacctaaataggtgcaaaaaattcgcgaaataggggcgaaaaagtttcaaatttaggggtgcaattttttaaattgctgttttctctatgtaaataagttaaaagctaaggcaaacaattttattcactgattgcagttagaaatgaagtaatttcgaaattttcggggtttaagggtcgattcttaggggtgcattttttgaaaatttttaggtcgattcttaggggtgcattttttgaaaatttttaggtcgattcttaggggtgtatttttcttttttattgcattcttcttaataatttccgaaaaatcgcgaaataagggcgaaaataaggacaaaacgccaaaataaggataaaaacttattttaggggcgaacactcaaaatagggatttttaggggcgaacatccaaaatagggattcctaggatcggataggggcgttaaaacgaaggtttttcgaacaaaaaatgtgtttttcgtgcatttctcgctgagttaaagccgcagaaaaaataagtaaaaacttaagaatccg

SEQ ID NO: 23778 - DNA, 1504 bp, Heterodera glycines
gagagtcagcaggggggcatcccgcgcaagcaggacatccaggtggagcattctgtcatccaaagcaccccttttgccctcagactgacattcgcatgaacaggggacggttccaattggtccgcaaacgcggccgttccgaagtgtggaatttgtttggccaagtggtcgacatgttgacgggccaacgactgccgtacgtcgcctgttacggtggggtgtcggacaatagtgatgtccgagagtctcggtctcgacttgagaaaagtcagtttctccaaatctcgagaactcggtctcgatcatcactatcgggcaggcgaacagagacactcacagacaatgggcaatttcagcgtgcaaagttttgtacacggacacgggcggtggaacggggaatatgacgcggcaccgctgctccatggggagtagctacaggtcggtgagaaggtgcggcgccggccataggctgtggaagttttcaaatgttaatttgctgtgaaggtcttcttcggacacgacggtgggcaacgagtcgatcgcctcttccgtcactcagtcgtcctcctctttcgagtcggtcggcggagtcgccggcacaggcaatggcattctcatgacaattccgcttcatcttttgctctttcttccagtagtaccgcatgggcccatctccccccaggacgacgcggccggtggaggccaatttggccacttccgtggcgaccagttttgccaccaaagtgtgccaaggacaccgaccgcaggcgcctcccgtgaggcatttgctcaatcaggcagcactggctttatgtcaggcggcacaacttcgagtatcttttgtcgcggttcaaaaccgctcagccggcttttgcttttcagacatatcaacgacaacttcggcttcgttcgactctccaggcaccgttcagcaataccaccaactccacctgaaccttggccctccccccatgctgatgatgagccgattcgccgccgccactgcctccggctccaccggtcagtcttttggccttccgtcgccgctaattgcgaaaagcttcccaactcagcccctcccattccgtcctgctctgccggtccttcgctgctcagtccgtttctgccccaccaccaacccccgccgactcagtcccagtctctgtccccgtccaccctcacctccccctcctcctcctccgtccccactcgcaccctttggcccgtcggcctcggctcgggccatcacttcactgcggcggacaaacagctgttcgttcaggcgatggttcagttttgtgcacaggacatgcacaactgtgaagtggtggaggtgaatgggcgaacattgccaagactcttttgcccttctcttcctttgcagggcgaaggcttcaaaaacttggtcgagactgtgctgttcatcggtcgccggtcgcacgagaacccatccgcgaacattttcgccaccatccgaaatttgatccccacagcccgacagtta

SEQ ID NO: 23779 - DNA, 948 bp, Heterodera glycines
ctcaagtgctacgtgagcgagccgggcgcgttggacagtgtgcgtttttttgttgtttgaatttggcattttgtttgttttgaattcttggcattttaggggtgcaaatttcggcaatttaagcatttttgtctaaaattattaaaaaatcagcacatttgcctaactttaagctaatgaggagtgtacattaaagaactgccactaaaattacggcattttatttttatcggaacaattttttgcattaagaaatggcatatttaaattttaaaatcacggttttggcatttttcagagtgccactgtggcaaaatttcggcaacgtatggccgaaggtcaagcgcccgcttcgcttacatctctttcttccgctccatcgtccgccaatgccgccgcgtcggcatcgtccgcttccgcttcatcctgctctgccaactcatcatccgcgcttttggcacgaatgccgtcgctgaaccgtcgtgccaccaccgcggtgatgcaacaggacgtacagcagcagaaactggggaatgatgttgttggcaacaccagcagcaggaaaaagaagtggggttgggaagccatttttttgtcggacaatttggcacattagggatgcgggaattgcttgtaaaaacgggttgttttggtccttaatccgggtcttgacgatctcggatcccgcgacaaaaatgagtttgaattcggatcaagggatgtcctacgtttccacccgtatcgtttctctccgaattttttttaaattgtaaacaaaaataatttctcccgaggttcgaacctgatttgaattcttgggtaaatcctacctaaaactgatccaacgtggaaatctcgcaaaatcccccacttgtttggcccctctgcttgatcagagatcgcccgatcagtttggtggagagtgcgctggcgggcgccggctcgcgt

SEQ ID NO: 23780 - DNA, 939 bp, Heterodera glycines
gtctcggtgccgaaacgggagggaaagaaacgacctctccccaacccaatagccttaattttttttagaaaattctaacaaaggaggggtcggcaagtgaccgccaatgccaccgccatttgagcattcaaaaaaagaagccaagacaaataatggcaatagaaaggacaaaaaaaggacaacagtaaaaggtcattctgttggggctacgcagctgatcaatggtcacaattctgtgcttatttgtttttgcctgaaaagattgtggaaaactttgattgaaaaattttgacaaaaatttctagaaatgctttttcttgcattttttaaataaattatatataatttatcgaaattattatttttgtttcggtgccgaaacgggagggaaagaaacgacgccgactcatgccaatagcctaaatttttttttagaaaattctaagtgtgatatatccacttttgctatgtcttttataatgggtataataatcaattttccactctatctacaatatttcatataaatgaaaatcctattaaaatctaatcgatgctttaactattttatataaatgaaaatcttaaaaaaatcggcgctttacgaattacaatttctaagaagcatggattttgtttatatgtgtaatataatgctattcataatgtagaatttataattataaattgatgacattgtataattaaagattatttttaaatgtttaaaataattttttcaaattaatattagagccggaattttgaaggtatccaaaaaatgaccaaatttggtatttttactttagggccaccgaaaaatgagtaaaaaaaggataaattagtcatgtttatcttccccctttttctgctaaatttctggatttgttcacaatggaaagccttggccatggctgcctgttactggatttcaattat

SEQ ID NO: 23781 - DNA, 1810 bp, Heterodera glycines
  unsure (1)..(1810): unsure at all n locations
aaattttaaaaaaatatttaattaggtttaaaaaatagttctcctataaattttataatatttaaacagataaaaaatatttttaaaaccaatttacaatcctttaatttgttaatagcagaaaataatgtacattgttataatttaatattttccgattaatattttgtgtaaattaaaaaaaatcagaaaaataaattagaatattttcaggcgaatctggtgctggaaaaacggagaacacaaagaaggtgattgcctattttgcatctgttggtgccagccaacaagaagctgccggtggcgacgattccaagccaaagaatacggtcacattggaggatcaaattgtaccgtaataaatttttaaaatgaaaaaaaaattgaattgccaaggttcaaaccaaccccgtgttggaggcttttggcaatgccaaaacggtgcgtaacaacaattcgtcacgtttcggcaaattcatcagaattcattttaaccgtgccggacgggtggcttcgtgtgacattgaacattgtatgtcatgcaaatttttgtttaaataattattttattttttttaaattaaaatatttattcaaataaacaattattgattttcattttaaatgtatttttatttatttatttattaacgaaaaaattatatttttatagaaagtacatcaattgatttccaataaaatattttttccaatttagtttcctgaatgatttatttcattatatttttgtttaatttatttatacaaaaataaataaataaatttaattataatttattttataaaaagtacatcaattgattttcgaataatatttttttccgtttagtttcctgttgataaaccaaaataagtatattttacttgaaaacatttaaaaggaactcagttttttttccattaattatatcatataaattttaaaataattataaaaaaaaatattattattaattatttgtcgtggccgaaacggacttctatttttttggttccatcaaatttcataatttcattttttttcgattattcgagaaaatctgagagtgaaaatttcgaaatgacaaaaattttgagtgaaaatttcgaaatgacaaaaattttgccgatcaccagaacagaccaattcagatttgctcgagaaatcgcgtgtgattcgccaagctcccggcgaacgttgctaccacattttctaccaaattttctccgaccacaagccggaactgcggaagaagcttaagctgaccaagaatttgaaggactattattttgttgctcaagctgaactgaccatcgacggaataaatgataaggtgcaaatttcaacaattttaaattatttatgaaaaataaaatttaaaatttttattattttatttgaagttaagcgaaaattttgattttgatacaattttagtgctataattagggaagtgcattttttaggcaatgccttaaattcctgcgcacttaaatgttgaaataagcatgaaaaataagtttcatttgctttgaagcttttaagatgatttttaacgcatattatggataaaaaaacattttttttgcttaatgccctagcaccaatctgttcgagggatttatgccttttaaggaacctaatttgtgaattattgtcaatttattattaattaaaaatggtaatcaagttgattaaacttaancaaaaaataaactaaaatatatagaaaaataattaccaattttaataaacaatttttcccggggaagagagttcaagctcaccgatgaagcatttgatgtgctg

SEQ ID NO: 23782 - DNA, 1720 bp, Heterodera glycines
  unsure (1)..(1720): unsure at all n locations
atggctcccgtgggatactactctcccagatatagggatagccaacgatgcantatggcgctgggcgagaaataaatttaaattacaaaaatcacaaaaaattaaatttctatgacagtattcatttttattgtctcctgtcgggtgttggtcgaaattgaaatgccgaacttgtctaattcattataactcgactcgagttacctatcaaaaaaatgttacaatttttagctttaattagcaatttgtttgttccttttaaggtgccaattagcgttcatttgttatatttatacacacggaaattcattatgattttggctaattttatcgcattatcaaaataaaattaggcgattgaaaacagaagaacttcccaccaattggttctattttagtaattcctgatacggtacgtacacaattattgacaagcatttttaacgattctcaaaatccccaaaaaacaattattcattctatcattaatgatcaatttggttaattccttttgtaccatgcaaataaatgcataatttatcatcattagggatcggattttgacttgaagcgaaaaaatcgccagcactttttctgtgtcaattcctctaaatcccctgctgttcctctataaacgtgtgctttaacatattttttgctcgcaagttaattcaagagtttcttaaatttaaataatttttaggtgttctaaaattcattgattgcccttgtcaaaatgatgatgctcaattttttgggcaatttcacaaatcgaaaaaaaaattcataaccctaattcatatggtgaacaaaacaatagaagcagatgaaaagctggagagcccatctgtgtgctgtgttcgattaacattaattggtatttgtgatgatgtgccatgaggggggatgccaaaatgtcaaacgtacattatttgatgaggcgaaatgttaaaatatattttacattaattaatggaccaatgattacacttttttaattttttgtttttaaactctccctccctccatatccattatcttatttgtaaatgatttcacacattttgtcatcagcaaattttttctcgttaaagaatttagttccctccttccgccctccggggctgtttcggcttttctcacgtcatatccatggaactcacaacattgtgacaaaaatcttccagaaaagccacacaaatatcgtgtgccggcattgccactctgcgccggagggtgcggcacgcaatccggcaaattccggcacattcaaaacaatatttaatgtgtctactcgtgctaatggccaaagtcaattttctaggaagcttatcttttctttcctaattatcatttaaaatattaataaatttagagacaaataatattaataggtggtttaaattagagtgcttgagtaccatagaaatactcaattttgattatttccccttgatacactgtagaaagcagtcatttttgccatgccaaattttgacccctttctctgtctcatcgtcggcgggtattcgccgacgaataaccattcaaaatgctattctgtacagaattagcgaattttgcgctctttctgataggcttactcattttttagagaaaaaatttccaaacctcctaggaccccgattgtcagtgttttgaggtgatcaggtcaccatgaaggagtagccggatcaagtagagcaaaagacttttttga

SEQ ID NO: 23783 - DNA, 1945 bp, Heterodera glycines
cgcccaccgccgcctcgtccaccaccgcggccattgccttttccaccaccgcgaccgccgccacgtcctcctccccgcttcgatcctgctccgtttcggccggttgcgcctccgccgccccgtccaacggtgcgtcgctcacatcccgcctgaccatttttcttcctgcgccacactcgcaaatggcaatagccgtcaaaagcagcaggaacacctataggccataaatgcttactatacattaacaaagagaaggaaaatgcaaaaatatcaattgacatttatctcgcccatctccgtgattttgcccagcgtgccgttgatgctgtccacgtcgagtgccattttgcgcaagttttgctgcacagtcgtttccaactccttgaaaaccatagcaaaattgatttttgaacatcaatttttgcctgcttcgagcgttccatggtgcgcaattgacgttccgtctcggacaactcgcgaccggtggcggcaatcagctgcttcaactgtttgacctgctccgccttgtcgccgatgctctcccgaattgtttccatttgaatgactttttcgctggcgttcgcccgtctgtctttgaactcgaccaactgagtgccaaaaagccaatttaatgtcagtcagtaatgccactttgcacctggttgctgagctgtacccggcgctttaatgttccgatgtgctccatggacaggtccaatttgtcgcccgcacgttccaacagtgtgttgtctttgccgacggtgccctcgtccccggcactgctggccaattctatcatgtccatgtgcagtgtgtttaggtccatcttgaaaagggaaacccgatttagacagggtcagtaaaacaaaaatccatatttaattttctttatcacaccccctttttgcatattttaatacaaaatgtataaacctgtttgacacaatgcgtttttgccgagtagacaatgaagaggacaaagtgaaaaaacataatcattctaatgctaaataaaaatttaattaattaaatgttaatatttttatatgccgaggaataaaccaatttaattgatttacaatccctcctctccctatggcacaagccacgtccccagcaagcgtccctccccaccgagtatcgacgcgaaaattcaaatttgaatttagcgccaaaaattgtaacaaaagtacaggggtcactactagcggaagagcgggattttgagaaatttgggggtttactggaatacaaaagccggcaccgagtccttgactttcaatagggaaccgggaattggaatcaacccgaaatttttacaaaaaaaaaaattaaattttaattgaattatttccaattgaaaatattatcaaattaaaattcgaatttaattatttttcaattttaagaaattttaatgataaaaataggaatttaacgaattttgtttattaattttgcacacaaattttttcgtctaattcaaaaggataaaaaagatttaaattaaaaaaatttaaattcgtgcatatttggccttttttgcatagctcaaagatttcagtgatatccgagacccaaattgtcccgaggtttgggaacaataacaaaaaacccaagaaaagctgtcctttacatttatttgaacaatgaaaaaataaatcaatgtttttttcctcagaaaagcaattatttgtccaaattgaaaaaaaaatatttttaaaacatttataaatgtcgatacaaatttaataatggttttatatgttttattaaataagttttttaattaaattcgtccataataagaattagaattcgacttggaaagcaatgttttattcagcgttcataattttgtcttaacttaagaaaattttttgctgaagaaaggattttgaatcatatgaaatttgagttgctctgaacagtttaattccagcgg

SEQ ID NO: 23784 - DNA, 1204 bp, Heterodera glycines
tctatttccaaaaattttgaaaaatttttctgaaaatgtcaccaatcgatagagctcaaaaaacgatgttttggaagtaaacttcgtttttccgagaaaaatctgtaaaaaataataaaattcgaaaacctcaaaagtgacgagggggcctagctcgaaaatttctgaaaattttagaaatttaaaaacaccattggatgcagcttttaaaactgttcaaaaagtttgctgacgacgaccagctcagcccaacccccagcgagttattcccgaaaatccaaaatccggttttttgcttttcaatttttagtcacgtgtaccgggaatacggtaggtcgtagagaaaaatgtttgctggccaacttgtagagcatacttcaacttaaaatcctcccagcaagcattttttgatcagaccaaagcccatcgtttcataggctcttaaaaaaacgaaaaagccatttcagcgccgctggcgctcagttggccaccggaccggaatgcccctatttttcccggatgcgccgtcaaaagttacccctgcctgcaaaatttcagctccccccgattagccgttcccgacatttttgtttttggaacgaaacgcactgttgttctatagtatataaactagcgagctgcacagagggggatgttgtgggcagtatactttggtatttaggaaggcgacgctgacatgagcgcttcgcgcaaaggacttcgttgctagtgcatgttcggcttcaaaattcaaaattttaataggcttatgttttttcaaaattttaaaggcgacatttgcagcttcgcggcctcagacgggcgcttttgcatccgtttcttaattttgttgggcttggacgggcgcttcgcacccgatttaaattttgttggggtcaaacgggcccttcgcgcccgttttttaatttgttgggaattttcggcagcttcgtggccttaggacgggcgcttcgcgcccgttttttaattttgtggtaatcattcggccgcttcgcggcctcaggacgggcgcttcacgcccgtttttaaattttgtgtgggatattcggccgcttcgcggcctcaggacgggcgcttcgcgcccgttttttaattttgtggtaatcattcggccgcttcgcggcctcaggacgggcgcttcacgcccgtttttaaattttgtgtgggatattcggccgcttcg

SEQ ID NO: 23785 - DNA, 1175 bp, Heterodera glycines
  unsure (1)..(1175): unsure at all n locations
agaatttgtccaaagataagctcctttttgagctccttaatccaagcaattttttacccacgaggcggggaattttaagtgacattgcttcgttatttgacccattggggctctgcagcccgtgcctggtaaagtccaaaattttctttcagtcccttttggactcaggcaccgggtgggacggaccgatcggaaaagagaatgaacaaaaatggacagagattagctcggaatggtctggtacctcactgacattttcacggctaaccccgggcagccaatggaaactccaactgcacattttttctgatgcgggtcccaattcgtacgctgccgccgtgtatttgcgagccgaacgcaatggtcagacggaaacttcactacttttttctaaatcccggttgcgaccaaaaaagtttaaaaatgatgggctaaccatcccccggttggaattattggggttgctaatagcggtccgggccaaaaattttattactgccaattttaaccgttcttttgagaaaattattttttgggtggactcacaaatagttttatcatgggtggcaacccctgctcctcagccggttttcattgccaatcggcaatccgaaatcaggcaagaaaaagaggccttttttcggtatgtgcggtcttctgacaacccggcagatttgggtacaagaggagcatcatgtggggaactaaatggactccgtctttggcatacgggacctgagtggattaaagattcggaaagggaatggactaatgaattccgagaaatcgtccttccggcggaagggaacgacttggaaaagggagagccttctgtcaccttagccattgccgagcagtcctcgggcccctttttaaaccccgcccgttttcacagttggtctaaacttctgatcactacaacatttgtcctgtgttttttgagcaaaattctggggaaatccgagaaattcaaaagggcggtaccctttgttcttaaattagaaggattagaaccatcggccctccccgcaaggagtgtggccaaaaactggatcttacaaagggagcaaattaaattgagcccccgnnggatggcatttnatatgngactgacggactgattcgtctccggacgcgcatggcttacgcaagcaagccggaaagtttaaaaatcc

SEQ ID NO: 23786 - DNA, 1309 bp, Heterodera glycines
catccgtcgattttcctcctccgcccttttatgctctttattttcagcggcaatgacctcctccatatgcgcaatgacctcatggttttctttgatgggctcgtccattttctttttgtgttcttcgactgtaaaaagtgttaaaaaataaaaaaaatttcaaaattaaatttgttcaaaaaacaataaaaacatttccaaattaaaaactttgaatcatttatttcatagaaaataacttaaaaattttgactgagcattaattttatgacggattctgtctctttctctacctcttcaagttgtcctttagtgcctcaatccgttcgataaggctgtctttttccttttctgcgctcttcaaattgcgttgtgtctcttccgcgcgttggcgctgttcctccagccaatatttggcaacttccaactggcgctccaaatgcattttttccgtgtttaaattctgaaagttttattgggaaaatattgaaattttattgtaaatcatttaaatgaattttaaacatttttttagattaatctaatttaatttacgttgacttaaaaacaattaacaattaaataataatttttaatttggtctaaaataaaacagtttctttattagattttataaatttattgactgtcaatataaaatttaaatcatctttccataattagcaagaattctggaacagaattatatgaaaatttcaaaaatatggaaaatattttaaagttttggttttgtagaccattaaaaattttcagtgtatttatttttgctataaaaatgtttgaagaaatttaagtaaattttatgtttttcctaaaaaatctaatatttaatggatgtaaaattaagctaattttttaatataattaaacattttccctattttcgccatttaaaaccctgattgatcactcaccatccattcaaattccaatgcgctttcgctcgtccacgtccattccaagtcctcttccagctttttgtgctcttccaatttcttgggaaaattatttacggtatgtaaaaaggccgaaatttcttggacgaacattatggtattaaaatattttgtgccatttattgggagcccagttttatgcaacgctacttcacagcggtaaacacccaggagattttcgttaaaaaatcttgaaaagcataaaatactgaatttttaaaatttttttgaaaattaaactaaaaaatctattaattaatcaggaaaaaattaattgaattgcgccaattttccagcttaaagatcacctttttctcggcttcctgtttttc

SEQ ID NO: 23787 - DNA, 1169 bp, Heterodera glycines
aaaataaaaaaaaattaaaatatttctaaaatggaaaaacattttagaatcaaccaagaaatgccgattcattaaaaattattttaaaagagaaaaaacatttaaaaataaaaataaattatttgaaatatttttaatttcaaattttttttagcatcaatcaagaaatacgatgaactcattaaatggaacagcatcatcgtcaaaccgaatgcagcgcgaacaaacaggtcaaacaaatggtgatgctgctgcagtacctcgtgggcatccggctgcacaacggaacgctgcaaactcgtcctcattggacgccgctgctaatggacgacaagcgcagcagcatgccaacagcgcagcacaaagacccgacagaacaaaccgaccgcaacgcggtgaccaaacacgtcaaacaagcgctgcaaggccaacaagaccaattgtgcaaactgtgcaagggcaacctgctgaacgagatcaacaacggctgcagcgaaacaatgaaggcaccacagaagatgaagagaatgcactgcaggcaaaccgcgcgcagcttacattatctgacattgcagtaagcatgggttacggacaaatcgtgatttgacagattttagcttcacatatgtagattgaaaatagagctgctggacatttttttgaaaaaagcctaggtctagattctacgttggatctggacctggcttttcaggacaaaaatccagacttgccatggtctctggatccagccaggtgtggacctggatttttttgaaattttttaagggctaacaaaggtttaaaaaaatcaaaaatctgaacccaggaaaaatccaggccaggatccaggtccagttcgagttttgttagaatgagatgaaatttttacaggcaaaagcagtaaaaaaaggcttccagtatgtaaacgtcataattttttgatcatttaaaatttcttctaaaaaataaagcatgaaaatttttgagacgaaattttcaattggaaaaataattgtaaaattttgccgaattgtgcttaagccataataaaagttagcaatattttatcaaaaattttaaatgctttaactattcaaaatatatatcataaaagaaaaattttctaggcaggaaggcaaggaaaaatgcacaagtttatgcacaaataa

SEQ ID NO: 23788 - DNA, 1576 bp, Heterodera glycines
acacattattgtgtcacacgagagtcacagaacacaccactaatgtttatcaaaagcatgacacacattagtgtctcacacgaaagtcacagaacaaaccactaatgttgtatcaaaagcatgacacacattagtgtctcacacgaaagtcacagaacaaaccactaatgttttatcaaaagcatgacacacattagtgtctcacacgaaagtcacagaacaaaccactaatgttttatcaaaagcatgacacacattagtgtctcacacgaaagtcacagaacaaaccactaatgttttatcaaaaacataagacacattattgtgtcacactaaaatcacagaacaaacactattgttttatcaaagacataagacacattattgtgtcacactaaagtcacagaacaaaccactaatgttttatcaaaagcatgacacacattagtgtctcacacgaaagtcacagaacaaaccactaatgttttatcaaaagcatgacacacattagtgtctcacacgaaagtcacagaacaaaccactaatgttttatcaaaagcatgacacacattagtgtctcacacgaaagtcacagaacaaaccactaatgttttatcaaaagcatgacacacattagtgtctcacacgaaagtcacagaacaaaccactaatgttttatcaaaaacataagacacattattgtgtcacactaaattcatagaacaaacacaaatgttttatcagatatttggctatttggcaaatttaccacaactcttcccaacccacttacaaaaggggccgccaaagttgaagtagtgaatttctcgaaagtgagcaaaaagttgagtggccgaccgacaggttcaacacttcagagatgaaatcacaaccaattgtaagccaacagcatttcttcaatatgatggttctcatttctaaattttacataataattaacataacaaagcaaaatataattcgaaacaaattaatcccaataaactttgatgaggcacttaaactcaatctgggcaagctgttgaatgatggccacggcagatttcaaacttgtgaatgaattcacaacgaatacaaaaccatgagcgatcataaaactttagttcttcatgtcatatctaaattttataaacataattttgcataaaaaccaaacaaaacaaacttcaactaaaatcacacatcaaaagtattgggtaagacatggatggccgaccggccgttgatgaaaaaaaaatgccgaagcggcagagagaaagtcaatatatcaaacctgtagaaaattcaaattaagtaaacaattcatttttggctaaatcataaaaaatagacaaagactaaagcacaataatagactaactataagcatagacataaaatactatgcaaatgcattaattaatcagaacaaataaaaaacaaaaccaaacatttccattttttaaatcattttttaacgcaaaacaaaacaaaaacattttcattttcaaatcattttttaacgcaaaataataacaaaacgccacgccaaattcaagcaaggcggatacataca

SEQ ID NO: 23789 - DNA, 2001 bp, Heterodera glycines
ggttgattctggtgtcaaaaaagtgaaaccgatgccctaattaatgcacaattaattagtctaatttacgcgtacaatcaatgaccatcctcatttgtcagtttctttggccataactttttttgttcctcggacaataccgacattcttggtatcaaacgaaagtgtgaagtctcaggaaaaaagttatcacgaacttatttcattgagataagaaaaagaaaaactagtgcatatttttgtctcccatttttgatttggtgcttaaagtctaaatgaaataaggttcattaattctggcttgagaatcaatcatgttatgaaatataaaaaatttccataatttttttattttttttgtttcccataataatttatttgtaatttgcctttccatacacattatgtcggcgtgtgttcaattttctttccgctttttgtgttgcaaatgttgttagcttctcgcagtaaaagcaatttagcataaaaataaataaaaatgccataaatagtttgaaaatcatttctaataataaaaaagaaaattttattgttttatcatttaacgtaattgaatttttgcttgcaaattctctctgtcgaaaaatgaattgggtcattatttcccgggaacaaaaaaaaacttttgcgccgcccttttattaaaaaaacacaatgacctctttaatgacccagtggtaatttattatccttcgctaatttgtaagaaagtgttgaaacaggggaaacaattggtattacttacaaagttccccttttttaatttattaaaataccaggagggacccttttggtttgcaagaattttttgtgataataaattgtgaaaattgttaaagagaacattcagggtcgctaattacaaacctgaatcaatttttgactaattactaattacaaacaggaactcgaacaaaaatgcaattttttgtatcgaaaaaaacatccggtacactttttatgactaagattaagaataataacattggttagtgatcaaaaagtcaattgcaccaccatgatcgtatcactcctccagggtgatccgaaaaccaaaaaatggattgaaatcgggaaaactttgaaaaaatattatttttcaatgtacttacaaccgctaacctcaccactacagcctcctaaatagataaaaataaaataaaatttgaattttaaaatttaaataggcacgacctccgccaccgccgccacaattaatgataattgggccgccccacctctcccgccaccggatctcaaatcctcattttgaaataataaattcaaaatttggatttgtaaaatgtatttttttcgccaaattttgaaatattaaaaaaattttttaattttttattggcattagttttgttatctaattacatttttctgtgttctcatttttgttaattgtccccgttaatttcccttccagttaattttttaatagagattagttaattatgttcgtctgttctgctggtgttttaattgctttttgctgttttttcaattttttgattttgctaatggaattgtgaattatttgttgggtactaatttaaaaaatataattttataatgttatttaaatgtaattcataaaatgaaaataaatatttaagcttaatataattttatatttcaataaaattaatatatgaaaaggaaaagtttatttaataacagaactaagaaaagataatgcaaataacgaaaattataatgggaaaataatcatttataatgaacaataacatcctccaaaattacatctacgaaactgaagcaaatttctttttccactttcttagcgtttcatagccaattttcaattgctttgcaattattccatcgctaactttggatttctttctttgattaaaatattgcttcaacttttttaatttctcctcatcagaatgtcttttgcatgcttaaggaataataattgataaaaatctaattgtttcccttact

SEQ ID NO: 23790 - DNA, 1871 bp, Heterodera glycines
aaaattaatttaatatatttaaatgtaaaaaagcaaaatcaataaataaaccttcttaagagaaagaaaataataatgggcagagaaaataatacacatcatttgccaacaattttatcgaattccccccccccttattttaaaattaatttctttctctaaatattattcacattttacattttttcagcaatttattttttctaatttttattaatgaaaattttttttgttttgttttccgtcgtttgtttgggtttttccgtttgtgttggtcaaccgcatttattgcaagtcaaattggagccaagcctttatgaagaccagcattattatcaggtgattttattgatatatatccattttttaaaataatttccattttttaaaataattaaaaactaaattaaattttgagtggtaataaatggtcaaagcattttaagcaaatctcaaaactttctgtgcacttaaaaagaagagataagcacaaatattagataaagtttgaagcttctatagtgacttttgtaatgcatattgtgcctatttcgccttttttggtcctttcaggtttccagaaaacaaaaaaactcaactaagaagcgacctaaatttaaaaaaataaataaataaacgcctaaaagcagggttcccagatcaaaaatttcaaaagcctcattttgtgtcaaaaagcctcattttataaagtttattaaaacacgcttaaaattttcaaatgatttatttttgattgtccatgatcaatttgagcattttttttttgttagaaataagcatttttgggattctaagcatgaaaaacgaagttgatttttttgcggcgcttttttcaaaaaacttttggggaacaaggtgggccggcggtgccgataggcgccgccgggaaaaatttgtgatttttaatacgatttgttaacagatttgtcgacaaatatggccaaaaacattatgccaatttatcaaaattaatcaaaatttaaaaaatctgacgaattttccccaaaaatatttaaaatttctcaaaaaaccacaaaagcctcaaagcctcattttgaaaatttagcctcattgacctatcaaaaaacacaaaatgaggctaaagcctcagatctgggaaccctgcctaaaagggatatttttcatgtacaaaattctctgatttttatttctttgaaataattaataaattctggatatatttcatctacatttgaaaaattgaaatatatgtcaaaaatagcaaaaattatttattttcaaaattattttatgtacccaaaaagaatttttagtcgatatcatcaaaaaactgagaacgctttttcttaagagcttagtttgcttattaataaataattttgctagaaatttaatttcattgttttcgtaatataatctcattacaaattgcttttgaaaataaaaaataaaatcatattcgttaattaattagtgatccaattaataaccactctaaaagatcactgcaacttgcatcacaaatggcaccgtgccatccctaacaaaaaccagcgatgaatttgagttgcagaacaatgcttacagcactgttcagctgaaactatttaacaattattgcatgtcgctcaaataccaaataagtgtcacaatggtacacagaaaagaccattttctgaagatttgggtaagcaaaattggaattgggtaatttaataccaaatttcgggatgaggatttgtttctgcattattcttatctcaatgcttatttttgctctaaattttcatccttaaactgtaaaatgtgtaaaattttgttatgtaagaaaaagcattaagtgaaccttttttgacacatttactata

SEQ ID NO: 23791 - DNA, 1048 bp, Heterodera glycines
caatagtaaaaatactcacccaaaacaccaccactactgccaccgcaacatccgagaagccagctgaacaaaatttagcagttaaagataatagtattgctgataaaggtgacgcgggtacgccggcatcaagtggattagaacagtccgatgatgctgctacatcaacgactcgagttgaagacggtggaaatttacctgaagcagccgcgttgacctccaataacccaaaaattgttgctaagcaatcaacggtagcgacagagagaaggaaggagaaaataattgaaaagctgatcgacgaacaagtggacagaatggttgatggaacacatgcacagcagaagatgctacaggaagaaggtaaagatagcgagaatcaacaccgcatttcaacatataaactcatcgaagaagtgcttcatggagagcatggacaattaatggcacaacaacgtcaatccaaaatggctgctgaatttgtttacaatgaaataactcagcgattcggcattcgaatgggcccaggagtaatgcacgttgatttgagcaaacagctgtcctatgtgttgggttttgatcacaaaacacgcatttacaaaaatcagtcggcaaaatatccacctgatctgtctggtggtgtccgtcagctgtacgtttacgcgcctaaactggtggaggactccatcataggtgaccgcatggcaccgctgctgcgagttgtcaacgtgtcaggaacaccggggttggacatgccagaggttatatataccaatgaaatttttcattctctccaaaataaacgcatttctgaaattaacattgaaattcagacagcatttggacgttacgtaaaatttggttggggaactaccgtaatcacattacattttagacaaaaactattctagaaaaaaaaaacagttatgacgcatgttgtttttaacccggacaatgtcaattggtccgcgtttcttgtgttacagcagcagcaggagggaagtggtgagctgcagtattttgtaggcagtaaatttcagcgtggtgg

SEQ ID NO: 23792 - DNA, 1353 bp, Heterodera glycines
acgagacgaaaagccgcttattagcgggtgatccgagtgcgtgcgttggcacttcttgaatttccccccccatcattctgattattttcgggagttgccaaaagttctccggactccaatcaacagcagaattgatcactgatcccaactagggttttaccgttagagtgcacaatgtgagaccgaccagaatgaacagaatccaaccgccgtaatgattggcggagtcgccgccttcggcaatgtttgacgggggacaaaagtcgccgaatccgatggtcacctgaaattgggggaaggggggggggaattacaattgatgattgggcaggtgggaaaagctaaaagtgaaccaaagtgatcagggtaaagtacagcgaatcgagcagattccacccatgctgaaggcgagtgaaaagcacagccattgagagcatgtaaaagagcagcagcgacaaaacgaacatctgaggacggaaacggtagcgaaaatacggtaatgggggggatacggtagaggaaggccttacgcggcgcaattttcattaaacccacgctcattggcacaaagagtttgggaatgacatcccagtgtgccaaagtgggctgcattccgggagtcttttctcgagccaaagcaactcgagcaccgtatacgaaaaactataacagtcagccccataaattacggcacttttgtgtacggccccggcactctcagaaactgctcgccctcctcgtgctgttccctccggcgtttttgcctctccattcgccgttctctttcctcgtcggtttgctccttcttgaacaccgtttcaaggccatcctccaaccattcgccactccacaaaattatgtcctgagaattgagttttttgtttccctataaaaattctgaaaattaataatttaatggcaccgcaaaaaatttggcgacgtcggcgatggtaattaaagtcaacggaatgccaaagagagcgtagaaaatgcagaagagacggccgaacggagagatgggaactgggaatgagagaatgttcagcagcagatcgccaaagacattcattccaatggcacttttatttttattttttttaatttacccaaatttccgtaaccaatcgaagtgagcaaagtcgtggtgaaaaatctgacggggaaaaataaaattaatgggaaaagcgcgaataaaacgcacaacgaagaatggaagttccatttggacttgtgctggtggtgatcagaagactgatggtggtgaaatttggcaaaagtttggagattaaatgcgcaacccaacccaatggccaagtggcggcgacccatcgacagacggaagtgccaaattct

SEQ ID NO: 23793 - DNA, 1614 bp, Heterodera glycines
  unsure (1)..(1614): unsure at all n locations
gggaccttttcngggtgaaaaaccgggaatttttggctgggaaaaccgggactagtctcggccctggtcaaaaccgggacataggtactcagttgtcccgttttttcagtaccaggtcccgttcccgctctactctaatttgaatcatcatccaatgaatttgtgtgcaaccaattgggcattttcattttacagttcatctacatacaattgtggtcagggttggacctttttgtcagaaatttggatcagaattgagaaagatgaattaatttaataattttattgactaaacttttttttttataaatcttggaaatttaagcaaaaaataaaaaaacgataataaaatgcatattgatgataatatattttatacatatatcaagcctaactaattactaattttcttttcaatttttaaattaactagaaaaataacaagttaaacccttaattaaatagaaaaaataattttctatttaattaagaaaaaaaaattatactttaattgaaactaaaaatccattttttacttttaattaaattgaaaataattttataccgacctcctcaaaaactttggaaatcgcaattccgacgtctcaaaaaaattcgacattcggaaatcggcatgccacatatctctgatatgggtggaacagattgtgatctcttaattccaacaaatacaatataatttgcttggaaggtttaaaaaagctaaataataattaaaattattgtttgagttaatgactattaattgctctccttatgctaattttcactaattactcttgagcaactttcttcagctgccccctgaattgaatttttgcaacacattgccaaactgttgcagcccaattatgccctcaattactgtcctcctgttaataatggtcatcaaattactgttgttgttgttgttgttgcacaatccccgcggcacgtggtgccaaaattttgagaaaagtcgcagcgtttgggtggagcaggggcttgtgaagggcaaaattttcaaaattgacggacgccaagtgcaaatttttcgtggcataccgtaagccgagggggggtcctaccctaccattttttaaagaaattttcccattcatgtgtgacagatacacggagcctccggttggaacaattctctctcaatatgaatatctttaaagttgattgagatatatgagaaagaaaataataaatatatataattaattaataagtataattacatatttgattgaatcgtttaaaatgaaatattttttatttttttgaaatttcacaaataaagcaaaaataaaattggaaaataattcatatattctatttttatttgttttttaagcattttttaaatagagaaataaatcttttattttattacataaaatgaattatctaaataaataattataataaattcacaaataataccaatatttattttaaaaaaatttttattttaaaatgaataaatatatatttgactgaattattttaaaatttaaaatttttttaaatgcctaaattttgccaaaaataaaaataaaaattatgaaaattaatttatttatctttaatttttgtaaaaacatt

SEQ ID NO: 23794 - DNA, 916 bp, Heterodera glycines
  unsure (1)..(916): unsure at all n locations
cttttgatggcttctgatcgatgtgccgtggcactcaccttctggcttggcaatggtgtgaatgtgcagcccagctactacaacagtggcaaagtgtcgcttggcctttcccagttgaaaacgttggcaccgaaagttaaaactgtgcgcattgaggtggagccgttcattcccatttcgttggccaagcaatggatcagtgaggcggccaaaaacggcttttccatcattgtcacttatcataaggcgacagtgttgggctccaacgatgcaagtaagcagaaaaaatgccaaaagcatggaaaatgtccaagaaaatgccgaaaatgatatcgcgggtcgaaaattggatttttcagaaatctcgacctcgcttttgaattgttcggtcatttattagcaagacaaaaacaaaacaaaaagttaaattaaaatttttttaatttagttagattattttttaaatttttaaaattaaaataaaataaaatgaatttttaataaatcatatataaatatttaacctaaaaatcttaaaaataaattattatattatttattattattttaagatgagttgcagcaagccgctaattggtggaagactaattataaatcattagcgcagtccggcaaatttgtgctcaatctgatgaacgagtggggtgaccacacgatcacatcaagtgcctacgcaatcgcggttaacaacgcgttgaaaattgtgcgacaagtgtacagcggaacggtgatcattgacgcgcccggttgagggcaagaagcgcagaccgtcaaaaatgccattttgggtgtgtagtttgaaaccggggatggaatttggtttagaacgggacaagatccatagaatacggaagctaatttaaaaaaataacccanattatggcttttaaaaatt

SEQ ID NO: 23795 - DNA, 1058 bp, Heterodera glycines
tttccatttgaatgcattggcgttttgtttataacgccaattattttttggcgttttatttccttttttacagtccatggtcgggaaccacaatcgaaatcacctggtccattttttttacttttaaatccgaagtcgaacttttcgtaaaattatgtcttttttgcctatatgaattcgccaaccaatttcaataattttcattcaactactaaatgtgttccgcttgaaaatggctctgatagagagaaggattcgaccagtaacaacaatcacaagagaaggaaggataatgttaaaagtgagttgatagacaacgccatcggaagtccgaaatcgaacaaacgggcatttttttctgctgattgtgcactgaacccaacggcattggctgaaatgatgccgagttcgagattaaggtttaaagaaattactaaatgactgcttacccctgataacttccttcaaaaaatgtttaaaatcagaaaaaggcatttgcaataatttcagcatgggaatggccggccgtttgcgtgacatcgtggcgattttccctcaaaatgatttggcttctcctggaaaactgctctttcgggaacaaatgacaaattcggaccaaagggtattttctgccaagggacaagcggatgttccggggatgaacgccaaggaaataagctttgtcgggcgggaagaggcggcgggcgaaggattcgagtacattttggcaattgtggacagacggacgggccgagcgtcggaaatcaaacgaaccgcactgatcaacttccaactgagcaaagaacgcggtgtgtccgataaagaaaagtgggtttttaataggttatgcttgcttttttaaaaattacgaaagattaggagcacaaaaaacgtggattattccgctgattttactttgtcactcgagaaaaaacaagaggacagaaagcgactgacgctcgattttggaagtgtaaaaaagaacaaaatgctcgacgcgcgaattcggcgaagtacgcaaatgtgggggattcgttttgctggtgatttgttttatt

SEQ ID NO: 23796 - DNA, 199 bp, Heterodera glycines
tggagggggaagagaatggagggggaagagaattctttgggacgagaatggagggggaagagaatggagggggacgagaatggagggggaagagaatggagggggaagagaatggagggggaagagaatggagggggaagagaatggagggggaagagaatggagggggaagagaatggagggggaagagaatggaggg

SEQ ID NO: 23797 - DNA, 2080 bp, Heterodera glycines
  unsure (1)..(2080): unsure at all n locations
cttgcagcgtggaacagcaagttgtccagtgtgcggaccacatcggaccgttgccttttgccaacgaccgttcaatggcacggctgtcgacaacaaagttgtaactgacaaaccaatggaagcgtttgtcggttggctggtcttccaactaccgttgaaatacgatacatatgcgtacagtcattatggtggacggtttgacatggtcatcacatttcgtgagctttttcgcagaggatttaatccggaaatgcttcgaaaggtaattattctttctttgccacaaatcttttactctctcttatcttttgtacatggttttctctgctttttattctcctctctttctctctgttagcactacactattcgtgtacatcatctcctcttcagtatatacactatttccattttccacgacttttccattttctctgctctcttgcttacagtaatttgtcattgctcacctcactatacagcgctccgccactcttttttatattaaaaaaatgaattattcacagggtaacaaaatgtacgagatgaagattggagcacagaagaagcggaacccaaacatcattttccgtgactccttcaacctgatgccatgtgcgctcggtcagctggtccccgcctacggcttggacgttgaggagaagccattcttcccgcacatggccaatcgtcccgacaactacggacgacagatcttcccgactcccgaggactacctggctcaggggatgatgccagagaaacgacgtcagttcgacaactggtacgaacaacatcggagtgaaccgtttttgctggacgaggctttggcgagctactgcacaaacgacgtggaaatattaatggcagcgttggtggcgtttcggagcgaattcttcagtattacgaggcgggaatgctacgtcgtcggagttgacgaccgagaaaatcatggtggtattgacgtcctaaagcagtgcatgaccatcgccagtgcctgcatgaaacatttccgcaccaatcaccttccggaaaatcacctggccattgtacctgagcgggggtacgacaacgcacaaaatcagtcactgctcgccctccgcttcttcaagtggtatgaggagaagcacaaccttaaactacagacagcacactcggctggcggagaaaagagggtggccaactactcccttgatgcgtgggttgaagcggagaagagagccatagaagtgaacggtaatttcaactccaaaattatttgaatgaaccgaaaaaattgaaggatgcgtttggcatggatgcagcaagtgttttccggaggacaacatgctgttgcccaatgggaagtcggccggtgaagtgcgggagcgggatggaaagcggctggaatttcttcggaagcaacttgggcgtgtggacgtctattgggagtgtgagattgagcgaatgctggcagaggatgaggagatgcggcgtgcttttgcaagctatgtggatgatggaccactggacatccgttccgctttcatgggcggacgcactggcccgctcaagctttttcataaagcgcaagaaggggagagaatttcatatttcgacttcacgtcactctaccccttcataaagtgattttgtcttaaatttttaattttttggcaaattaattgatttagttttaccacgagctacccgatcggtcaccccaaagtgcacgtgtcgaatgaagaagttgaatggaagtgtgcgaccgacaacccctttgacttgtcaattctcaaagtgtgggtggttcctccgcgccgctgtgatgtgccggtgttacccgtcaaagtcaacgaccgactttgtttcccgttatgcctcaaatgcgccaaagactacccganctggtggggttgacgacacctacaattgccgacactccgaccaacaacgcggctgggtcagcacgtgcacgtcactggagctgaacgctgcgctggacgaagggtaccgcgtcaccaaagtgtttcgtgtggtgcagtacgagaagagcgatgaccagttgttccgttcatacatctcccgagtcatggcgcac

SEQ ID NO: 23798 - DNA, 1516 bp, Heterodera glycines
tttttccaacattttgtttatgaaatttatgtcagttcaatatcttttttcttttaaataaaaaacaaaaaaaaaaaggaataacaagatttttgggtatggattaaaaacatgaaattttaatggaaaagcaactcatgaatctgtggtaaattttacagtaaatggaatgcgcccgttttgtcttcaaaaccgtgccacaaaacgcaattcacacacctgtttgccaacacgaattgtgccgacggacacacgcacgttcagtgccatgcgttgaccaccgccgtcgttggccgcgctgtccaccgtcggtgccgtcgttgtccaccaccaattgaacagcgaatggacgcgcaactcgcgcacctccaagtgcagtccgttggccagcaacagctcgccatggcgcaacgcgaaccagccgagcccgtaaatgtgcgcggcgcgcgcgtgtaacagtcgctgcaacaccgccgccacaagacgcccggaatatctgacaaagaggaggggatttggagggattttgccgggacttccggtccaggtcccgttttttcaacaaacgacgggatcccgtcccggtccattttctaagtcccgctccaggtccaggccatttgggccgggattaacgggactaaatttgaccagtaaaactgggtccacctcgtttgggcgccagcccagtttttggactataacttttttctttgtcaaccaaatctaacattgttggtatcattcgaaagccctaaggtgttctctattagcttgcaaaatttcgaaaaatctcgttaaggttcaaaaaagttatggccagaagaattcatacaatcagattttccaacttttttggctcgaacttttttttaaaacttaacgaaattttttgaaaatttgcaggctaatagagcatctgaagggttctcgaatgatatcaacactgttggatttggttgacaaaaaaaaagttatagccaaaaacttgggtccgtacgaaaacgaccccgacccgtgggtttttactagagaccgagatttccaaaagtgccggaccggaccggtctgatattttcagaagcaaccggtttccgggcccggcctctcaaaaaccggtcaaccggaaaaccggtgaaaccggattttcaaattgccgggcccggaaccggtttccggtttggtaaaaatttaaattttcacatgtatttcacccaaaattaccataaatcgtgccagatgtaaaatttcggctctatttcactttagtcgtcaataaatgacctcttcaataataaaatttcaaaaaaataaaaaaattttaaagaattttttgaaaaattttttgtaaagtgcattagtaccggaaaacctagtaagtaattctccataaaaagaaaaaaaatttctttcttagatatttgtggaaaattttttaagattttgaaatttctgtttggaaataaaaaaaatttgcgattttgagcaaatttttcaagaaaattacggattttta

SEQ ID NO: 23799 - DNA, 1514 bp, Heterodera glycines
  unsure (1)..(1514): unsure at all n locations
ttattcgcctggtactgaagtgtacancttttggggtaaaaaaaattagccaaggctacagccttgggcgcccaacgtagggcttaggttttgctggcaaagttgtcggggatagtctgacttaaaatcctaccagcaagagctaagcgatcccggtccaaagaaaaaatttcgtagaagaaaaactgccagcccgagtgacaaatcgcttctcgggactcagtcgtccgcgctgaatttttttctatagttttcccggattctcctcaaaaagttgtaagacccttccaccactttcagggcgctcccggccttcggccgggagattttgttttttgaaacgaaagtccttgtcaatataacgtatatactagcgggtgcgtgaaccgtcggctatttagaagggaaaaagcgcttcgcgctttgggagcttcgctacctaggctgtgaagcgattcaaattgatcgaattggttggagatttttttttgaatttttaaaaaactatcgggttgtgaaaagatttggaatttttaaaaattagcgatttttaggccgcttcgcgtcctcgaacgggcacttcgcgcccgtttctaatttttgttgtgcttttcggccgcttcgcgccgttttttaaattgtgctgagtcggacgggcgcttcgcgcccgttattaaattttgatggactcagacgggcgcttcgcgcccttttttgtggcctttttaggccgatttgcggcctcgaacgggcgcttcgcgcccgtttcagatttttgttgtgcttttcggccgcttcgcggccgttattaaattttgatcgactcagacgggcgcttcacgcccgtttctaatttttgttgttcttttcggccgcttcgcgccgttttttaaattgtgctgagtcggacgggcgcttcgcgcccgttattaaatttagatggactcagacgggcgcttcgcgcccttttttgtggcctttttaggccgatttgcggcctcgaacggccgcttcgcgccgttttttaaattttagaacagatacaaaagtgattagaagaggtacaaaagcgattagaagaggtacaaaagtgaagattagaagtggtacaaaaggattagaagaggttcaacagtgatcagaagaggtacaacagtgattagaagaggtacaacagtgattaaaagacgtcaaaagtgattaaaagaggtacaaaagtgaattaaaaaaggtgcaacagtgattagaagaggtgcaacagtgattagaagaggttcaacagtgattagaagaggtacaaaagtgatttaataaatttttaaaaataaaataaatttccttttattaattaaaaagagtgtttgaaaagtacaaggattgaatatttatttaaattgaaattaatattacaaattctaatttaaaaatacaggagttctttaataaaagtaaataaattattattttaatttaaaagatttttcacaaaaaaataatttaatttaaattaaaat

SEQ ID NO: 23800 - DNA, 2545 bp, Heterodera glycines
aacatcattagactcaaatatacataaaaatttgaattataaaacaatcggagctgatattaaaatgaaacgacactcttggctgacaaacggagaagtcaactcaaacagctgatggaaaataaaccacagaaagtgatcatagaaggaaaccagggctctacaataccaaacgttgctccatatatgggaattcataaaataccaaaaatagaaacagccgtagaacaagagaataagcgttcagctgaataatatgtggtgctttctgattctacgcaaccaaccgtgttttggcgtctgccacattgactcgctgcgctgcccacttttttattttagtttcagaacaatttatccttaaaataaaagcagtattttaaggtgttgaaaggtttactcacttttccacaatatcctcaatgctatcttcgaagaaattaattgcatcatcgctgtcttcagaaagttcttcttgcatttttgaatatttctccttcaactgatcaagttttgcagacctgagttatcgtcacgtgatttttttaacagatgcagtcctcttcattgatgcaacagttgtttagcactccaatagtctgataattttttgtgtctgtatgggacctatatttatgtataaataatgtataacaaccatccataggtacaccgattgaacggggatacatatatgtatatgggcggacaacaagatttccttaacgtgatttccctcaaaatttttaagattctctacatattaaccagtattttaaataaattggattttttctgtttaaaaaaaaattttattatgattccaatcaattattgctgagctcagcaatccattcagttttttctctggccactttggtgacatctgcaagcactcgtcattcaatcgtatggatgtcgtcagcatcttcaccaatagcacgctcgacttgattgtttttggttcgctttttaggcggctcgcttgaagatgcctcttcctcaactccatcatcgttgtttttgtcatccaaaaccttcaccgccaccggtttttccacagatatggatgaaataatccaatcaagcatcgccgtatcattattttccttaaaatatgcgtgttttagctgaaataatttttgcatggaacacaatggactagctaaggtgggataaacacctagcaaaaaaaaaacatgaacccaccttgatgttgactttgacgagcaagggttgatctatttttgactgcaaaatcgattccaacttattgggtgcgttctctgacaggttgtaaaaagcttccacgctggcaatgctcaaaaagttgatggctgcataggaaaatgctgttgtttcctgctcgcattcctcgtcatcacaatcttggagtacaacacggaggtacaaattgcggctgggctttttcgcacggtggacgcacgaaacacaaaagtcttcactgtcgagtttcttacgacatggaatacccttacttctcattgggcaggactaaattggaagcataatgatgtaagagttatattggcggggagatggaaagctgtggaggggaggagaatatgctgagtggagtgaagatgagatagtgtgatagagagaaaagagagacggagggggggggggggtaatgctcgtcgctcattatataaaaaaaatgctggcccatcgattgtgatgaccaccgaacgagtcgttggtcatctccccaaccccattttatttatatatattttgttgttcattttttttattgtaataatattttttttccaatttagcaaaaaaaaatgaatcaagccgtgtacaacagaattgtgtcactcccgtggaggcagctccaaatgttggcaaaaagtcgtggaatcgccgccaatcaaaaggtgggttttatttgaaaagggtgggaaaatcagtttttacactgctgacataaattttcatcgcctttggcaaaattaatcagccgaatttgatgatttagggggggggtaaattttgaaaaattgtggttgtgcgataggggctttgaaaatttgataaattttcaaaatttaaatttttgggggggggcttgagtttgctttgttttttaccaaaattaaacaaaacatttttttttgctttagaaacagattctcatcaaaaaattgactgcaaacttcagcggcacaaatcaacaacacaacaccaacacaaatggacaaaacgatgatggggacggcactgacaatgagcaaagtttcggcgacggcacaaatggacaaagcgatgatggggacggaactgacaatgagcaaaattttggcggcggcggcggcacaaatggacaaagcgatgatggggacggcactgacgatgagcaaagttttggcggcggcggcggtgacaacaatgttgaggaggagcaggaggggggcagcaacaacaacagtcaactgagtttacccgacgggtaataattaaaaaatatatttagaaatgaaaaaaattcttttgaaattaaattttaaattctttg

SEQ ID NO: 23801 - DNA, 2005 bp, Heterodera glycines
  unsure (1)..(2005): unsure at all n locations
tttggatttcatttttttaatctctntgttttatacaataaatttttcaaaataaaattgcatgcaatgtttaaatatatttttatttgaatttagtaaatatatatatatatatttattttatattattaacagggattctttttttatgtaagaaaaatcgcgaaatatgtaaataaaatatgtataaaaaatgctaaaatatgtatgaaatatgtacaaaaaccccaaaatatgtactaaaacatgtaaataaaaattttttaaaggttattttttggaaaaaaaattcttcgtaaaaagtgaaacagaggcataaaatgccataaacatgaccaaaataggcttagaatcaccttttaatatatcaacaattaatttttgatatatcattttttgaaaaaaaaattcgattttttagggatacattttcacaaaaaatttctgtaaattctcaaaaatcctcaaattatgtaaaaaaaaatgaaaatatgtacgaaaaagtccaaaatatgtataaaaatatgtacatatgtaataagtagaaaaatcccaaatatgtaaataaaagtcccaacttttgttcgcaaacacaaaaaaaaaagttttttttctactaattaggctatggagaatccaggaaaaaatatgtattcacataaaaaaagaatccctgattattaaacattctctgtaattctttttgttttattttgctaaataaaatggttaacgtgaagaagggcaccgtcattcgttgtgacccggcaatgcgacagttcctgaagcatttggacgagacacgggctctgggcaggccgttcatcgtcaaggtggttgagagatcgtttttcgtgaaatatttcattctccattttattaaaattttcccattttaatttttttttttttttttgaggcttaattgtattgtaggtgttcaatccagtttctttagccatcaattttttcttcataaaggcccacatttgtaccaagcaaaagctttgtctaaaaatttttttctttaattcaattctgagccattcttgaaaagctttcgttcggttgataccaagaaagctgtcattgaccaaataagaaaaaattggaggcctaaaagtcgaattttgaaaaagggtttgagtttttgtcattttttaatttatcccgttttgacaggaccttgacgagttttgtttgttcgtggagcgtgacattgtgccaatgttggagcagagaatggatgcccttatggatgctttaacacccgacactcaaacataaaacccacaatttttgtttctcatttcctcaaatgtttattgaaaaatttaattcgcaattctgttaattggctaagagttcattctgtgatgctattattatacaaaattttttaaaaaacaaaatttacacattttttcaaaacattttgttgatgaacgacgctaatggcaaattggaggcggcacagaaacaatttgaggcaattttggccagcttttctcccaccgccgatggcaatgaacaatcgcagcagcagaaggagcagtttttgcgatgggttcgccaacggttgcgccgtgaaaatgcgatgccagcaaaagacacactgcagcacagtgacaaacggcatccaacggatttgtcggtgcgcaagcaacttggacgtatcgcaaaacgcctgcgcgaattggtacacatgtcattgtgcctgtagcttccgcttttcccaaatatagttggctttatttgctaaatcattcatttgcatatgcttttatcagctaattagtcttcgatgttgaagaaattatgaaaaagcgtgtccgattatgtcgaggtcattgaaattgaagacacttccattttgacgaattaccgaaaacctgagtccgaattaaagcaaaaattcagttctagaaagttttttaaataatgtaattttcgaatttcaagaagtcaattataaacttgagtatttgaacacatacattttgat

SEQ ID NO: 23802 - DNA, 1241 bp, Heterodera glycines
  unsure (1)..(1241): unsure at all n locations
aacgactaaagacatgggtttttggaaaatttnttgacgaaataattttttcactcaaaaaccatgtgctcccccctttggacccgaagcacaaaatcacttttatttttatatctttttttaaagaagtgataaaaataccaaataaaatttatataatagagcaaaaaattgcggatttttgtagtattttacttttacagaatgacttttctgaaccgagttataaaattttatctgaaaatccgaatttttccagaaattctggaataactttttttcttttgaacattataaaaccaaataaatctcataaaattctccttatttttctttatttttaaagctttatttcattaaaattggccaacacaacacattgttatgaattttcaaatattagcccaaaatcccaagggtcaaaaaattgaaaaatattttcgaatttttaaaaaattctaaaatttccaaaacttaaaataaacattatattcgtattcagcacctcaaaataccccagaaaaaaaattttcacccccattttggcccacaaaaaaaaatttgaaaatttctagggggcctagctcgaaaaattttgaaattttccagacttatagtacaccattcgatagcatttaaaatgctctacaaaaatgttctaaggcaatttttggctaaaaccgatccctgacgagttataagcccgggactcaaatgtcccgctcaggccaaaaattttttctatttccgggaaaaaatcgaaattttttcaaaaatatcaccaatcgatagagctcgaaaaactatgttttggaagtggtctccgtttttatgggaaaattcgttaaaaaatcctaaaattcaaaaacccgaaaaccgttttttaggcctagctcgaaaaatattgaaaatttttgaaattttaaaatttggaaaaatcgagcttttcaagctctacaatagtcccgctggcgacccaccgctcagatcaaagcctaatgagttattcgcctggtactgaagtgggaaaaaaaaattaactgagtctccgtgtctgtacagngtccgggatttggtctgatcaaaaaataaaaaatactggattatagaggacacttctgcggagtgccctcacagcggggatttttttattcgggttttagaaaaaaagtaggggccttcaaacgcaagaaaagtgagaaatcggtcccagggactcagtcgtccgcgctgaatttttt

SEQ ID NO: 23803 - DNA, 1193 bp, Heterodera glycines
  unsure (1)..(1193): unsure at all n locations
catatatagtaaaagaaagtcattttancagcgtcaacgcgtgttaatgtttgaattttatattttttcaaaattaatgttgctatttcctcatatgtatgatacactgttctgtagcaaacatttgttattttctgtttgaagaattttttgtaaattattcaatgagtttttgtttttagaaattatgcttattaagtatagaaagttatttactagatcagatttaattataaatgaaattttacattttgttttttaaatttatttaaatacaataaaataaatttttggtttcataaattggttaaaaatggaagaaatgttcacacggtttttattattattattttataacatggctggctcaatcgactaagtgttcgttttattcaaaactttcttaaaacaattattataaacatatgtgtcaataaattatttgtaaaaaatcatagaggcagttgatttttcatacagaacaggagttgtgaaatttaaataaactcaaaatataattactaaaataaataattatattaaaattcgattttgacgaagaagaagctcatacgttcttatcgagatcacttataaaaaagacaaagaaaaaataaaattttagtaagaccataatattatttctatttttaaaaaaatataatgctcctcccccgcaattgacacgaaagttctccacccacgctcacgactaatatttaagtacactcatttttccatattgtctaacttgcacattacattaaaaataaataaacttcttttcttacttaataaaaatttataagaaaaaataattttatgatcttgatcatttgttggtaaaaatttatttgaaataatgaaaaacaccaacgttaatttttcgtgcgttttagaataaaattacagcgaaaaaaataaaagtttttcaagcagttttcaagccatatttgaaaaaagctaaaaagagtaaaattgaacgattcggatgttgtattttccattataggtgaaataagcggatgttaaacggttttttaatcagaaatttcttgacacaaatgcgaaaaaagggaacacctattccatatgagtgaataagaaaaatgataaaagactatcatataaattatagaaacaaaaataatatttagaaaattttatttaaaacgcatttaaaagatcgaaaa

SEQ ID NO: 23804 - DNA, 1552 bp, Heterodera glycines
  unsure (1)..(1552): unsure at all n locations
gtgtctgttcagagttcctttatccgcaaatctcagcccacaaaatttgcactttaattaaaaatataaaagaaattaatttttatttaaaaaacccatttttcaaaaaaaaaattaaataaaagggttggaaaaatgaggggaatatgaaagaatagaaagttccattttttacaatcaactctaaattcgttgttacccgaaaaattacataaattttttggggccgggcatttccaaaaatgaaaaacccaattttcaactcaccacgtggggacggtcgcccgtatgaatacgccgataacggtcaagattacagctatgagcaaatgccttgtcacaaaattcacattgttttttggggaaaaaaaaaatattgattcttttataatttataaaaatcgaattttaaaatttaatttaaaccccatattttaacccacccgaaatggcttctcgcccgtgtggatgagcatatgtctctttaagtttgagtgccagtcaaaactctttgtgcaattagtgcatgaaaagcgtcctttcgtcgccttctttttgttctccgtctcccgcttctcctcctcctcattgtcaaattcatcctcctcctctccctcttcttcttcctcttccatttcatccgttgggccttcaatttccctcaaaagtgcctccattccatcctcctctctctcttctcctcattcctttccccacaannttctctcgttcatcctcttcctcctccttttcttcttcttcctcctcttccccatcattggccaccaaaattggctcctcctctcgcgctcctatctctcctccgcctctgcaattttcttccattccctcctcatccgtccgcttttcctcctccacctctttctcatcgtcgctttttccattccttcgcccaaattttcccgtcaaaattttgtcggcatttcccttgatcagcaaaagcagaagacaaacggcaattccgcacacaaaaaatgccaatttttcatgggtcgctgcgctgacaaatgactgaaaaaaaatatttttttcattttgatcaatcgccaaattcagcgtttctcaggtgccaaaaaattatgtgagtatgagatgcctctggggccaaccgaagatccgccaaaaaaagcaatgctttctaaaatccacctgaatttcgtccgaattgacaattttttccgccgtattaatcgcctgaaaaaatttaaaaattctcatattttttgtcaaaaatttattattcaccagctgcttctgttgttcctccattttgtggtaaattctgtccattttctctgcaaaatttttcgcaaattcatcatcaattgagtgcctttcatttgttcgtagggcaaaaaacgactaaataataaataatatttttttaaatttttaaaatgcaaagaaaattaattttcaattgttgtttttaacggtgcatttgcccatttatcaaattaatgataaaaaatgtaaaaatattttcataaagatattttaaacgaaatctcaaaaaatggcaatgtagaac

SEQ ID NO: 23805 - DNA, 2259 bp, Heterodera glycines
atcaggatcaagagtcaaattattattaatggagaaaaaaaatctggttgatcctggccaaaattattcaggatcaggatttcccagatggactcggaccggatttagaattaaaaatcttctttttcaggactcctaattcatggtaatttttcaaaatataccctgatcaggatcaagagtcaaattattattaatgagaaaaaaaatctggttgatcctggccaaatttattcaggatcaggatttcccagatggactcggaccggatttagaattaaaaatcttctttttcaggactcctaattcatggtaatttttcaaaatataccctgatcaggatcaagagtcaaattattattaatgagaaaaaaaatctggttgatcttggccaaatttattcaggatcaggatttcccagatggactcggaccggatttagaattaaaaatcttctttttcaggactcctaattcatggtaatttttcaaaatataccctgatcaggatcaagagtcaaattattattaatgagaaaaaaaatctggttgatcctggccaaaattattcaggatcaggatttcccagatggactcggaccggatttagaattaaaaatcttctttttcaggactcctaattcatggtaatttttcaaaatataccctgatcaggatcaagagtcaaattattattaatgagaaaaaaaatctggttgatcctggccaaatttattcaggatcaggatttcccagatggactcggaccggatttagaattaaaaatcttctttttcaggactcctaattcatggtaatttttcaaattataccctgatcaggatcaagagtctggaaaatcctgacaggatctgctcctatccaggatctattaaaaagtataaatttcataataattcttcaacattttattttcatcatatttattcataaatcaatttaataaattattcatcattatatttatttattcacatttttagccatgtttcattcaggaccaatttccggctattagcctttatttcatttaaattgcggaagcgataaatgaattccggaggcatttaatcaattcgcctacagattttacattcacatgaaaataataattattttaatttgggattttgaaaaataaaagatgtcataataattagttatagattttcattaagctgacgaaagctttgccttataaaaaagcattgaaattttaattaggcgccataaatataattctaatgaattaactgctttctccaaataattacacctattattacaatgcttcaaatctttttgacaatttcatttctgttgataattggaagtgcaattagcaatggaactgacgaagtgaaaagaggtaaaatttataaatataaaatgtaaatttaatttaatttatttgcaaattaacccaggattttgtccaaatttatacaaaaccatgcttatttattggcaaaaaaatgcattgttttttcattcgattacaaaaaaataattaattaaaaaaagggaaaagatttctaaaagaaaaattttcacaacatttattgtttagtggaaataagtctacgggatttggtggatgatgccatcaattgggcccaccacattggcatggcatggcgagcggacaaaaaatttccgcggtgatttaaataaaaatttttataatttttttggcatttttttttgcagaagtgatacctgcgtttttgtgcctttcactttgtttccgtcacctttcccgcgcaaaatttacaacgaggcgctagaaattcaaaaagttaatttaattttaacaatttattcattaaagtagaaatttttttcaaattttaattgatacacaaaattttgcgctatttaaaaataggtatatttggaattttattaaaacccggcacccttttggaatgataaaaattttttttttataaaataattgtctagtaattaaaatttgttcttgagctttttggctatcttgcacctattttgactaattctgactttctaatcaagacttcaaaaaataaataaaaatagaaaatttgaattttcgatttttgttcgagttagttttcgggttatggattagaaattggtacaagcaaaagccacacattcgtgatcaaggaccctaaaaaccccctgaaaacaagttttcacgagttcttatcacatttgcaaaccacaagaatcccttccctatttatttttaata

SEQ ID NO: 23806 - DNA, 2046 bp, Heterodera glycines
aaatgccggcgggcaacaacggtttttcaactgaatcctaacgggatttttggggttttcaaaacccggattttttttataactttgtttaaagttattggatttgagttcatattggcaagttctaatgataataagggagataatgttgagaaaattttcaagttttttcattgagaattttttgaatcagagcgaaaatcccgactcagaacctaaatcccggttctgggctctagtatattatacccacaaaaaaaattttcttgttcattcagcacgaaagcaagtgtcatcgcacatccaagttttagcaaggaaaaaacaacgggaacaccactccaggatgaaggtggaaaaggagaatgaaatattttaataaaggctttgcgtaatcaatcctgttttatcccgcaccacaatataagccaaaagtcaagaaattacaaattattctttaacgaggattctagaaaatttcatgaaatttttttttgtaaaattaagctttttttgttgaaaaatttgttcaaaaaaattaaaattttttattctcgaaattagtttggattttttaaagaattaactaaaaaatattattttttaaaatttttctgcggacacggtaagcgggagggcgggaaacgagctgcttccggtttaatcaatcacacacaacatttatttaatgctagtcaaaaaaaataaataaaaatctataccgtaatttctcacatttaattttgattggataattttataaaataaataaattgtccgtcccctttcaaggctccccatcagcagcaagatggtcagccgacagactttggcatggctcagcaacaacaacaacaacatcagcagcaacagttggcaccccctccgtccacctctggctccatttcgccaaactccggtggaccgttgcaactcggtgctgctgacccaagctcagtggagtccaaccagtccaacaacgtgttccatcacacgaacatggccattggtagtaacggtaagtaaactagtgacaattcctggagggaggttacacttggcaccccctccacccaaggagtgtaaaatttcttaagaaaaattcgaaaaatttgtctagtggtacccctccccaagcccggaaagttttcgaaggcgtcgtcgtttgggaagagtgatgtatatctcttaaaaagcaactccaaatcccccgcatttgtgttgtaccttaataagaatgacggaattttcattccacttctgtccaaaccgaatcccgaattctgttccgaacccgaggcccggccgactcggtaaattttccgtgatattttttattccgaacttatcactccctatactgtataatctacagttataccgtattcttattcctttactactgtaacatacagtttgtaccgtattcagttttttacaaacccaatttcttaaagccaatgggattgccaacagcggtggtggtggccttctttcaccgccgtctcgttccggcgcaccgccggtggcggtcattgattgcggcattggcacctcatcatcatcctcattatcatcatcatcttcatcatcaatgacaacaacaacatttggtgcagtttctgcttctacagcgggggcaccaacaatgtcaacacatttgttgcttggaatggcaccagcgacaaacattaataacaacaacatcattaataataacaataacaacaatgttgcgccgactgttgcacataataggtgaggcatgaatgggctcaaattggtcactccatatttacacctcggacatttgtgccccggacattagcgccccaaacatttggcctcggacatttgtgccccggacattagcgccccaaacatttggcctcggacatttgtgccccggacatttgcgctccaacatttgcgcctatatccaatgtcgggttcaaccacaagttttttcaatccctggtagcctaaacagcattatatatagataagtgatagaaagtgattgtggtctgataattattctaatgt

SEQ ID NO: 23807 - DNA, 1689 bp, Heterodera glycines
  unsure (1)..(1689): unsure at all n locations
tgcctgttcgtccgtcaaatcgcacccaatcgaacaaagcgccgcaatgagccgacaaagcgattttccaaccagggaaaagcctttgcttcggtggtcagcaagggaaagacgctcatcagaaattgcagagagataactcggcacggaatttgagcactagaaacgcaagaaaagtggaaaatgtggcaaataaaagacaatcagagaaagagagaaaagggaaaagagagagaaaagggaaaagagacaatcagagaaagagagaaaagggaaaagagagagaaagggaaaagaggggcaccgtcgtgcgttccgttgagagcgaaaagaagcgcagaaacgccgaggaaagcgccatgtttgacgacggagtccgaagaacggagacgggcacagaaaacggggaaaatctgaagaaataacataaatgaaaagagggagggaaagaaagaaagatagccaaagtttggtaaaattgggtacgcccataggcgaggggaaaatccccggaataaaaaaaaaatataagaaatactgtaatttcttataaaagtttgttaattttcttttcgagttttgttaattaaattgattgaaaatgataggacactcactttttcataagcataatccaagtcaaaagaagcgatccgttgaatggcatccgccgccaatttgcgcaccatttcgtcccaatgaatgcttttcaattcgcacaaatggtccatcatcggacggatgtattcgccgaattgggcaaccgaaaaataaataaatccgctggaaaaaaaagaaaagccacctgaacagccaaatcggtgtagcagtgttttatgcgcgccacctccacaaaatcgaccaatgtcagaacggcgatgccatgcggaaaagaatcattgcggccgacattctcctaaatgggcaatgaaaagggctcaaaaggggggggggcacttggaaagcggcacttgccgcccttcgaacattcacttcgcggtcaaacagcgcaaccgaaagtaaaacaccggccaaagagggcaaatggtcacggagaagttgggcctggaaaaaatatcagagaaaatgtgccaaaaagagaaaaagtaacaatgaaaaaaagtgaggagaaatcggtgcgttatcagaaagattttagcggatggatgtcagcagcgacaaactcagtcggggaaagaagaacaattgtcatcatttaacgcaaataagacaaatcgcagggtgggggagaaccaacggaaatggaggagaaatgcactgagccacgggaagggtaggggaaagcgagaaaagaaacctcataagcgcgggcaaaggcccaacaaatgtaacaagcggcatcacgcacattgaccgcctgcataaagccaagttggaactgctcaaaagtgagggcacggggaaggaggtcgacaatgaccttagagaagtgagaaagtgccaaatggaaacaaagcaaaaacaaccattggaacttggcacggcaaaaggcacccccgacgacagagctcagccaatgccaaacacccgccgtgccacgcgttggcctcgtccgcggcagaatcactgaagcacttggtcaacaccgaagaaacaacttcagcacccatctgaaaagtgaaagaggganattgggggggattggatttgggtttggatttgatgccc

SEQ ID NO: 23808 - DNA, 1549 bp, Heterodera glycines
  unsure (1)..(1549): unsure at all n locations
aatggaaaagagaacagggaatgatgacgaaaaaaaatctttcaattaaagaaaaaaggataatgttaaagcaatttgatcaaatatatggcaaattaaaaacgaaattaaatgaaaaattggaaggaaaaaggacaaaatgccaaaaaataatagcaacacatttgggcattgatattagcaccatttataaatggaagaaacaattaaaagatggaaaattgattaaaaatcaaaataaagatgagcaaaaaagagaaattgttgaaaaatattttaaaataaaaattaaatttatgcaaaatggaaaacattcacgaaaagaatggaaagaatttagagcaaaaattaaacaaacattttgtgtggattatacgacaattgaaaaatgggccgagaaaattggcatcaatcaaaatatttcaaaaggtgaatttaaagattttaacgtatttttttaaatttacagagagaaaaatgttaacaattgctgaaaaaatggaagtgattaaacaatattatcaaatcaaaaaacaaaatccaaaattgaaagaagatgaaattgccaaaattttaaacattccaaaaaactcattacgcaaatacaaagctgaatttggcattaaaccaaaaaacaaattgttataattaggacgatcattattatccgaagaatatttggaaaatttcagacataaaaaatattcaattttttacaaatgtttttataaataattttttttcggtttatgaaattattaaccttttttcatcgcttataaaaaatatttgataaaaatcgttgattatgctaataacatttttaattggtctagttgaaaaaccaaattaatttttcatatttatttttattttgaaaaatgagtaaatatggcaaaaaaaaagtaaatttttagagaaaaattaattaattaaattcaataaggacaatttttaaaccaaatatttttatcaataaaaaataattaaattttgggaccaattttttagaaaatcttttcattcttaagggagtttttttcaattttattgaatttttgtctgatcattaataataattagaattacccaataatttgaatttcttagtgaattatttatcggtataaatttaaaaatatggaatttttatataaaaagaaataattgatgaaaagttggaaaattaaaaaattggcttgatttcataaataacaaaaacctttaaaagttaaattgggcttcaaaattcaatttaatatgaattttttatcattaatacacttcacgaggttaatattatttcagattttttagattttaagtgaaattttgtaaatttctttgggaattggttttcaaatgagaatgaagatattgaatttttaatttaaaattattagagtanatcaataagtagntaaagtnnttataattttttttaaacggcaaaataaaataacaaaaatgaaataaaattaatgccatgatttctccaacattttgaaataatcatcccgncttnttgtctgttaattatcagctgatt

SEQ ID NO: 23809 - DNA, 1850 bp, Heterodera glycines
  unsure (1)..(1850): unsure at all n locations
atttaaaacttttaaaaaaatgcttattatttaataaatttttgaaaaattcctttgtttacgttataactgtccattcaatgccaatgtttacaatggcgagcaacagcgtttggaacataaaagcaatttttgttggcacgtcgttcacaaccaatccnaaaaatgaataaaaatttgatgccataaatcaagagcacatttattgtgtagaaaacaaaagttggacgaagttgcttcagtgtgcgaatattttccgataactttaatgaataaaattaaattaaatattatatttaaaaattttttttgcttaatttttgtcttaaaatttaaatttaattttaaaaaaaaattcaatatttacagttataaaataatttattttgcaaaatatttaacataaaataatttaactatgatttataaaccaattaattaataatttaaaatgctttataccgatataaataataatttatcttaatttaatattgcgagaaaattgttttacttgaaaacgttctttcaatgtccaaattttgccgctgttatatcgtgttttatttctatggtaattatgacgtaataactaaatttaaaaaatgatttaatttttgaaatataaattattaccacgattgcagcaatttgcaaaacaaataatccgataattgagggtaatgtgaaacgattgtaatcatgcgcagaactgtcttgtgttattaggacaacaaatgagagagataactgaagaatatttaatttttaaatatttttatttataataaaaattaaaaattacagtaatggccagccaactgatgttagcccacactttgtcatactgttcatagtcgcggaagagtacggtagctagtgtacgttcagccagcagaacataagcaagaaagatgcgatatgtgttcgagaaaacgtaaagtgagccaagtatgttggcatacggtggtcttgtaaaaatgtccncagatggcacttggacaaccatcaccgagaaacggcacaattctgactgaaaaaaataataaaaatcttaaatgagaatttattttattaaattttaaatttggctaaataacacattaatgaaaaacttttattatataaaataattttaaaaatgctgataataaaaataaattatttttttatattaaataatttgtaaaaatgatatctcaaagagtttttaccttttcattaaatctttttgtaacttttcgttttttgagtgaacttttgcccatttggctatggtcgtattataggaaaatttaattatgtaatctatgatttttagaatgtcattaaataaattttgtttaaaacatttttaattaaatgataaaaaattctgagacattttttaatttttagaaagtttaacattattatataataaattattgcttggatttttttcttttcttataaaaaaattcaatttttatggtattgatacggaaaatttttcgataacttttattaattatatgcctaattaagttttaattaccataaaactgctgacactttgtgccaacaacacccatttcaaattggtgtgcaacagtccactgttgaacaccataatgcagttgaaaaccgtgatcagcatggacatcagatggacgactagctcgagaatggccaattccaatgagatgctcagcagccaggacggtgtgtccacaattgaagccgaaccataatggacgccatttgaaatattcatttgtaaaaaaaaattagctaaattaagataaataaaaataaatttttatgtatttaaattaaaattagaagcaatgatttgatgcaaattttaa

SEQ ID NO: 23810 - DNA, 1773 bp, Heterodera glycines
  unsure (1)..(1773): unsure at all n locations
gactgatcatccggacgagtagcgtgccggcatctgacggttgcgcactgggtagcggcgatcacgtggacttggcatcttggcatccgaccgagatgatcctgtcgatgatcgtcatcaccatttactggggctgttcctcgtcctcatgttcggtgtctgattcaggcctattccttaggtcctgatcaacaatttaaaaatttgcaggggcaatggcagattaaaagcctcattcaaaatgttcagagacttccaaattttccacatttcggcgttccctgagctggttcgcatgatacagattgattgatccgtccgggaattttacaccataaatcacgcctttgcaatcgcaaattaatcccgccctccaattatgggagaggcggtggcgcgcgtacaccctgtcttttatctgaaaagttcgttgtttcgtgccaaaacgtcgattgaagttccgttccattttcgcgtctctttccgagggttgcgaaagcggcggtttcagtaaatccagagtggttcgcggtttgcgaccaaggagcatttccgccggggatttgatgtttgggagcgaatcatttggtgtggtccgataagtgaccagaaacgtttcaatgacgtcctttcctgggactccctccccttttaatttgcgaaaggccctcttaaaggtgtccacaaatcgctccacttgtccgttagacattggattgtatggtgctgaaaataaatgcgaaatcccgtttgccgcagtaaatttagcaaaatcgttgctggcaaattgtgtgccgttatctgacaccaaaatttctggaattccgtgtcgagtaaaaagataacgcaatttatcgacagtggcggcagttgattttgttggcatttcaaagactccgggtactttgaaaatgcgtcgacaacgattaaaaattctttgccgtaaaaggggccgtcatagtcgacattgattcgttgccatggatgttctgcctttggccacgagtgcaaatctgtcttgacaggtgccttggcagcagcttggcacggctggcagttttggacaaattcttcaatttcagagtccaacttcggccaatagacatattgtcgggccaactgcttcatccgcttgatacctggatggcctttgtgcagcggatccatgattttcttctggcagacttttggtatcacaattctgtcgccatacattatgcaccctttaagaatagacaaatcgtcttttcttcggccgagcagttggacaatatccgtttcctgcttcagcaaaacattgttcggccgccataatcggaggcatctgccgcgacaacgatctccaatttagggtcgtaatgtgtcagcagcaaatcggatgccaaaatttctttcaattttgtgaatgccctttgacatttttcattccagtcccactcctcctttttgagcatgtcgtccagtggtgttctcaagaaacgcatcgtttttgacgaactcgttgatagtgatttatcatgccaatgaatgaacggagcgctgaaatgtccttgggcggtggcatctcagtgatcgcatgtattttacatggatcaggacggcggccatttttgtccacaatttgaccaagatactttatttgctctcggaaaaatgaacatttttcaattttcacccgaaacccatacgtttgggattcggtcaaacacttccttcaagtggttgtgaatgttcttctgaattnttgctgacgacaataatgtcatccaaata

SEQ ID NO: 23811 - DNA, 1962 bp, Heterodera glycines
cattcgaaaaccctaagtgtcctctattagcctgcaaccttttcaaaaaatttggctaagtttcaaaaaagttatggccacaaatgtgtgaaaacctggttgtttgtgtacttttagccataacttggctcaaacttgaccaaaattttatgttgaaaattttcatttgatggttttttatataacgccctttttgatggtttttctataacgattcagcaccatttttggagatggaaaaatttgtactaatttaaattgttaggttgggttactaaatcatgtttcgagaaggatttcataattttcagcccatttttgagatattctgttcacttcggacgagtggccatcgagaatatttaagatttttgtctgttccttttagacaacaatttagttcagagttcccaagtatgcttatttcagcattacgtgcttatttttcgatttgaaaatacaaaatttaaattactattttgatataatttttttatgaagcgaatacttgaattaattaattttgaaaaaaatattttttttcattttcttgagtttaaaatgcccaaaatttaatttgattcgaaatgacacgaccgcagataagcgcggatcgatgcacaatcattttccatttataattcacgtgtttcaagaaatttcgtacagtaaacgatgcacaattgagaattttaatttttaccggagaattatattgattcccaccggtgagcttatccgagaaaatgcctttctttttaccatttttataccaattaagtgctaatgagtgtgcctagcgaacaaaagaacgaaaatggagggagagagagagattcaaatgaaacaaatgatttatgtataaataataaaataatcttcatttccaatttgtcagtcttcgtcttcttttgcctcaccaccgcttccactgcttttcgttgtgccaaaaacggcagcaaatatctgttgtacattttgtctcaacagttacataagtatggttgtgctccacctgttgggctgtgagattcgccgctgcaaaaggaagaagcccagcggtaagcagttgctggagggcatttccggtggcggtttcgtcagagaaaggtgggacgagggaagaggatgaagaagaggaaggcccagaggaggaggcggaggagcagacggccaagcagcccgctgaactgtggcattatgtggagaaaaggggtggaggggggggggagggttaattgggaaaagtgcgaggggatggccaatacggtgcacaattcaattttgaaccccccacccccaaataagtgttattttactcagtcgatgttcgagcggctcactttccatcagtcggtccactccctcgccaccatctcccgaactggcgtcctctgcctcctcaaaatgggcgtttaagccttcttcccttgccacttcttctgttccctctctctcttccgttgcgtacacaaccccctggggcatttgataaagaattggcggatgtgtcgtttgtttgttgttggcgtcgtgctttttggcattcgtaaaagcatggaaagggggcggatgacgttgtttttgcgtttggtgaaaattatttgagggaaatttgtgcgtggcggaagaggagagacaaaagggcgaagacgacgagcgttgttggtagtgatgggcgtggggatgcgatgaaaggcgaggagaggcgggagaggaaatggcagaaaggggggaggtcggcggcagagggcggtgagccgaggggaggagggacgagagggggaaagagggggacagcaagtctaaatgagtggggggacactgctaattgatgttaattgggacgaatgaatttgattagttagcacacttggacaatgccaacactcactttgcaaaagcagtgggagcagtgccatcagttggctttggcttacgcccgtctgttgctgctgtgcc

SEQ ID NO: 23812 - DNA, 2118 bp, Heterodera glycines
taactgtaaacaagcaaattgtttttaattagtttcttatgatcattgattcactcacttggatcgacgggccccctctagcgtacttggaatttgtccgctatcatatgccgtaaccgttggtaatagacaatgccgaagaaaatttttacctggagatttgtcaatcaaagagcccattttccttccattctgaaccttcatttctcgtccatcgatccccgaatacatcgtttcattgccgtaataattgtatccggatttggccaggagtttcccgaagtgttcaatggccgtattttgctcacttaattttgaagggttttcaagtgattttttaaaaatcacttgaaaacaaagggcgatgcatcgtaagaagtgccgtgcattgctgcggcctttccggccatactttcgatcatcattccaatggtcatacgggagggaaaactgcagaccattcaaattagtgactcatttaaattcatattcaaaaagaacagcaattacccgtgagggttaaaaataatgtcggggaccattcccgactcggaaaagggcatcgactcggggggccaaaggaatgaattgatgcccttttggccatgacgtgaagcaaatttgtcgccgatgatcggattccgttggattcgccattggattaacacgtgctgatggcatggaaaagggacaaaatgttcaaaatgaaaataggcaaaaatcgctgcacggcgcgaatgaattaccacgtttttgtttttgtggtccgcctcctgcacaattcggaccaacccgcaataagcgggctcactgttcgtgaatttgtgctcgttgaattgtccgctgaccaaatctgaaaattgtcaaaagcattaaacaccccggggacactcaactgaaagtgccgtaatagcagtcgccctgctggtagagacggccttcaatgggcaggccgtccgcaccgatgccgtaattgcgttcgttcggcttccccaaaaagaccatttccgcatttttgctctgaccaaaaccaccggtggagcgatcaaccaaactgatccttgaagcaattttgtttataaaactcaaaaaattcatacctctgcactttaacgacagttccatgtgcaaagccacgctgatacgaagccttaaaacgggtttttgaggttgaacgggacaaaggcaatgcaataaaccagccttgttgatcaccattgcatcttccatgtcgtatcctgaccagacacattgtgtaaaacgccttacccattaacccttcccaactgaccagtgtacgaaataacggccacacacgcatttgtgcctagagggtattcgtccatttcgtatttgtcatgggcctccaatttgagtaaaggtttttgcgcagtttgcaatttgtacattttgttgtccgtacgcgtctgccaagcgtggactgggacctgacaataagcaaaaggggatgtttgtattgaatagcgcccttccacaatcacccccattgtctgttttcccatttgacattgatacacatttcgaggcgattggttgtgatcgggaaaaggaatcaaattgccagcgaatgagaacagagacgagggatgaagctaaaaattgttggacgctcatccaacccatgggcactttctaacttcttggtgcattgttacgcccggttctgcctcttcggggtcaattataatggaaaggtaaacttgttcaaaaattcctaaatgtaattaagttcaaaagggtaagtttaaatcagttaacctatttgctcgatttgatcaaataaaaggttcctaactggtctcatcaatcttccaaggccgctgtaaataaaaaacgcggcgaattgcatttgaatattctcagagtcgggtgaatgtctgataagcgtaagttccgtaaatgctggcacacgatcatcatgagaagcgactttcattgcgcgcaattgacgttcaataaacgcagcttttttgcgagggataaaaccaacaaaatcgccatctaacacaacagggtaaagcttaaaaaaaaatcaaacaatgtatttaatactaaagaaggttaatcacttcgatatgggtttgtattcccttttca

SEQ ID NO: 23813 - DNA, 950 bp, Heterodera glycines
  unsure (1)..(950): unsure at all n locations
atgttgtgccatagggaaatgccacaagaaacaagaagagatgatgaaaatgccaagaatgttgtgccataaaaaatgccaataaacaagaagagatgatgaaaatgccaagaatgttgtgccataaaaaatgccaataaacaagaagagatgatgaaaatgccaagaatgttgtgccatagggaaatgccacacgaaacaagaagagatgatgaaaatgccaagaatgttgtgccatagggaaatgccacaagaaacaagaagagatgatgaaaatgccaagaatgttgtgccatagggaaatgccacaagaaacaagaagagatgatgaaaatgccaagaatgttgtgccatagggaaatgccacaagaaacaagaagagatgatgaaaatgccaagaatgttgtgccataaaaaatgccaataaacaagaagagatgatgaaaatgccaagaatgttgtgccataaaaaatgccaataaacaagaagagatgatgaaaatgccaagaatgttgtgccataaaaaatgccacaagaaacaagaagagatgatgaattaccccttgcctaaccttaggcccatctgaataataaaaaactcaaattcgagacttggacatttcgtgggctggacattttgtgggtcagcgattttcacgtttacttttgttataaacctcttaataaaagacaaaatcaatgaataggaatgaatttagagtgatcaaattaaataaatttaatttttccaaattttttgtcttccgttttattctgaattgcacgtggggaggggaggaattgggggagttaaaaaaggtcttatgtaaagaaaatcttaaaataaattattaaagggctgactgagtaccgtcaataaactgaaaggttcttgttcatttttccaaccgattgtagcccaaaatttttcggnnatccgaaaattcca

SEQ ID NO: 23814 - DNA, 2151 bp, Heterodera glycines
ttagtttgaaaggaaaatattcatggatccagacaaggccatctcataccatgcaatcagaactcagcaggttgtttgtgccgtcaatttataaccaatcgtaatgtttagacacttccaaactttcattatgaatatcaagtatgtcgtacttttgaaagacgtccaataattgagcttcaagtggttgagtcgcacgatctaattatatgtttaacggatgtacatttgtcaattcatgatgctgtagaaccatttaagtttgtgatttacctttttttaatttggtcctctattttcaggctcttggatgtatgttctaagtacaaatcaatttccgcattttctcattttgtgacagaggtgagcaaagacgattatcaatagtttttgttttttcagagccaaactattcatattgcaatttccgcaagaaagcatttacacattttcaaatatttattgggtgaactttgtgaaattaacgactgtgcaccgattactcttcctgagaatgcccaagccgttgtgtggtatgtgttaaatacactttttttttgttagattttcgtaaattatcctctgtaatatcaattttctaaccttcgtgctccgcataatggttttcctggtcactacttactgttaatacttattggtaatttttaaccaattttaaggtgcggtgtcaacaatttaattctggcatttaaatgcgagttccaattctgggacatggaccatttcctccacagagatgatttgatcgacgaaaaagtaacaaccaatttatttttgtgagttcgtcatttagagcatgagtctcgcaaaaagtccgacaaaagtggaaaccattcggactgagtcaaacgaaattgctccactgattgtcgctatgtcggacctgcaaatagtggccattcgtcgagaaatcagcacagtcgaattttttgagcccaattctggaaagatgattactcattttaacaattgcaaattttcggaccaaatactttcattgagtaagttaaattaaattacattcattttttcaaaacaatagcataccaccatccctacttgatcggaatattaccaaaaaatctgcttgagattcgctctgttaatcctccgatgctaatccaaaagattcccctgctgagagtttcgatgatttgtccaggcggcaggttaccaaattgtaaataaaagcttaattaattctaaccttttttcagcggaattggtcagtgatgaatccttttgctaatgctctgtttattgttagtttacgccgcgagtgaatcccaaatatggaagctttgttccgaaagtcatcttcagaaaaacattcgttttttgattgaagagaaacaattcgaattggcagcacaactcgcggtactgaaacagacatcctcaaaggtatattaaatccgtgaattaaggcatcgccgactcaacggacggcaatcaatcgccaattggctgcaaaacactttttggaaagaaatttttcaaaatgttttgaaatacacaaccgtctaaatacaggtaaaagagtatttgctaattgctgcctaattacttcaagcatttagatgttttgttggtgcttaatctgttcccttttttgatccctgacaaatatgtcgctgtgatttctcggtacgctcaggccgaattgcaattatttgaagtttcctcagagaatataacggaagatgagagaaaacgtgcaactcaagcgcttattcagtttctcgtctcggtaaaaaaaactactcattccaattcagcctccccattcataaaatcgtttagcgaagggcggaatgcatcgccttggtcaatcaacattatttggattataacaatggaaatagcgaacgaattttaagcacaaacgaactaaaaaggcaggaagcttctttggagctgattgacacggtgcttctgaagtgttacataaaagtgagtccttttttcaagcaaagcatcagcttgactttgcaaaatgacacattgaggtaaacccgtccatggtcaaatcgttgctgcgttcgaagaattgctgctgtattgtgtcggaggcggaaaaggacctcaccagaacagaatgtttgaagaattgttgatactttacgagaa

SEQ ID NO: 23815 - DNA, 920 bp, Heterodera glycines
  unsure (1)..(920): unsure at all n locations
aaataagctttgaaagaagccaaaaaaggaatgaatcgtgtgaaaagcagagaaaaggctgaaggaaaaggtaattgaagtaccataatcgaaattgaactgaaaggatgatgcaattaaaaaaggaaagagtaaaatggtcaaaaaaaaaagtgaataaattttggaatagaaaaccttcgaaaaggtaaagcagcacactttgagaaagttaatgcaaagataaaatgaaaaagaagagtaacgtaagaagtaagcgaaaattttacttttgaaatgaatatgaaattaaaaccggagactgttataaagaaaggaaaagcgaaatttgccattaaagtgaaataacccgagatatgggtgtcaagagaaaatggcatgattgaatgaagcaaatgggagcgttgtcagatgttcaactgatcgacagcgaatgatcatgttcatcaatgtttgaccatcaatgagtgcccgaaggctgatcagaacgacggacccacgaagctgatcagaagtgatgaggcaaaagccaggaggctttttttcgaaggagggagaaatgctgtatccgcagcattcaaatttcatattttgtgcataatgtacattgccctactttctcccgacccaatcccgtcgtaaacttatccatctgttcatccaatcccaagccaatccttccctctcatttaccgtgccatttctatcccattcacctctgttgcatatgccatccatttctcttattccctttatgtttttgccgccatacccctcatcctatccaaagtccatcccctttgtgtcagtatataagtcctcccaatttccccctcgggggctgcgagatgtctgcggntgggtcagtctgtgccatttcttgcctttggcatcctttcccaataaccattgcactgacc

SEQ ID NO: 23816 - DNA, 1478 bp, Heterodera glycines
gggaaaatccttcagaatcttttaaattttgataaatcggcataatgttttacaatttatttaataattgggttttttaatagagtgtcgaaacgaaaatctcaccaaatttttcaaaaaattttgctaaatgtttataaaaaccagaaaaagaacaaatttttttctaaaaaatcacaaaattaataattttttaatgaaaatctgctaaaatatggtcaaatttctcaatttttcctcttttgtggacaaatctgttaacaaatagcattaaaaattgcaaaaatattcccgtccgccgccccccccccttgttccccaaagttttttggaaaaagcgccgcaaaaattcaacttcggtttttcatgcttagaatttcacaaaatcttatttctaaattgatcatggaaaatcaaaaatataaaatttgaacattttaaacgtgttttgaataaattttgtaaaaatgaggctttttgacccaaaatgaggcttttttgcctgccaaatgaggcttttgaaaattttaatctgggaaccctgattatgtgcgttattaaaaaaaaccatcaaaataaaaatttttgcttttaactttgctctaaaaagaccaaatttttatttcttgctatcattcgataaacacaccgtttcaaaaaacgagatgtgtgccaataaatagagagtgcagagaaaaaaacatctctcattttggcgtactatttatttatctctgttattagagaaaaacggaatttacttcgccacatataactttttttctactcatacaatttacaccaaattttgcataacgatagagaaaaattttctgcatcgaatcttctgtttatttttatcgcttaaatgttgttttaaaaagttattcaaaaaagaaattttcaaacgcttatatctttttcctaatcaatccaattgcttagcatttgcttagaaaaagcttctccccatcaagggctttcgaatgatgtcaagattgtacaatatggttggcaaaaacctttaaaaataattcccaaaattcgtaattttttaatattttggacaaaaataaataaaaatattcatgtagcacaacggactcgaacctccaccccttgtccctttaccatcttacaaaaaccacttcgccacacatgcaaatctttttggaactgggaggccaaaattgaaacggtgtgtaaaactaagtatttatgagcctgtaaaatttcaaaaaaaattcattaagtttgaaaaaagttatcgccaaaaatgttcgaaaaccatggttttttgagttcctcgaactataacttttttaaaacttaaggaaattttttgaaattttgcagactgatagagacacttagtgcatcgattgatatcaggaattaaaattttggttgctttggagcaaagttataaataattttttcgacaaaaattttcataatgatgcttatttaaataacgc

SEQ ID NO: 23817 - DNA, 1206 bp, Heterodera glycines
tctgcataaagtttgataaaaattcctttcggaattttcttaggtaaatcattaatataaataagaaacaaaataggtcctagaacagagccctgggggacgccagagcacattttgtattcagaagaaaacgaattttcaacacgaactaaaaaggagcgattggccaaaaaatcagaaatccaattaaggattttacctctaatgccaattttatgaaccttatataaaagtaagctatggggaataacatcaaaagctttacgaaaatcaatataaacacagtcaatattttttccattgtaaataccgtcaaaccaattttcaagagttaaaataagttgggtaacagtagaacgacctttaacaaacccaaattggtgtactgagattaggtcatgttttaaaaggaaactagtaattgccctgacaacaaatttttctaaaattttacacagtgaacatgtgagggcaattggtctatagttggtgggacaacttttatcccttttttaaagagaggaattattatagattttttccaaaaggtcggtaattttccggtatcaaatgagattctgaaaagttcggtaacataaggtgcaaaagaaaggaaacaatgccaccgccgacaaaggtacggccatgcaaatcctggacctttgcgatgttgaagcgcttcctattacacagtaccgaatgggaaaactgggcacccgcccacgtccgatgaagttggttcttccgacccgtgctcatgttcggaaatgtctcctcatggcgcgcaaagagaacctcgggtttttgttgagcagtgagcacagcttaatcacatcacttcgcttcttcagttttaaattcgaattactcccgctcccgcccgggactcccgcaaaatttctgcgggattttaacgggagcgggattttcacgggattcccgatcccggaaaaaaaattgaactcccgatcccgttcccggaaatttttttttaccggactctaatgaatataattgtctggataccgaataattttgtgcaaaaataccaatttatgatttattattttttttacacaaattctaaaaaactttagattttcgcatttatttttgtcattttttatacatccgatttatttacatgtacacatacatatatatgaatgaagatatttgcgaatttcctttataaaattcatttca

SEQ ID NO: 23818 - DNA, 1199 bp, Heterodera glycines
gggggttttaatgcgggaggaaaggcagcagaaatgggattggctccgtaggcattggaaccacgggcgaaaaatgcgctgctttgtgccgatgccgtggacagattggagattcgcgctaaataaagattagcaattccaaaaatcagtaatcaccgcaatttccatgccgtatacgtccgccttgggcggtgccgtttggccggacttgccaccgtattccgctttggtttgcttctgtagtgacgctccatagccgccgtatccgcccactgttgtgcccgaggtggaaaaggcgccacttggaatgggcgcgtgtggctccgttagcggcgcggcatgcactcgcggaaacggcacgtcggatataaagcgcccgaagagccatgcctgcttttgcggaaatgccgaacttactgggtctttatgcctccgattggactgaccccgccgcctttcggctctcttttgcttcgcgtgtgttccgtcctctccttcgactctccgtgccaattcgcttttacgtcttcgccaaaattgccaatttgggaccaaatatcgcgcagacgaacgtggcagaagtcggcctcgaattgcaattccgattgaagcgaaagggaagcggtgagcagcgaagggaccgcgacacaagcgcaaagcatggacaaagtggagaaggaaacgcagagaatggccaaacgacgggcatagcttaacagatttatggcaaaagtggccgaagggaattggaaaagcaaagcattgacaaagcaatgaacaggtcgagagtctcgacccgagaaaagtctcgggaaatcgtcggttctcgaactatacattaaaagacactcgaaaagtgaagttttcaaaaattcccggttaaagaaaccaacgaaaaggggaagaaattccgaaacaaaagattactaattattaattaattaattaattaattttttctttgtcaaaaagggcaaaaaagaatgaagaatacaaaacattatgtaattaaaaggcccactcgatttccttctgcttttcctccctttcgctgttcgatcggtcggccaatttgaaagagtcttcgcttttggctgctgcttttggcaggaaatgcatttccttacgtaagtaatgagtttaaatgtaattcccatgggtttcgattcaatttatacgcaattttcgcctaaatttgc

SEQ ID NO: 23819 - DNA, 1381 bp, Heterodera glycines
  unsure (1)..(1381): unsure at all n locations
aactcgcgaagggaactgcaacaanaatggnacggaaattgaggggtggtaatgaattttttttagttaaattgatntaatgaaaataatgggcatgctttatttgtacccgatgcgggacgggattccgggaattttgttgtacccgttagcagtcctaaactccgagatatttaggaaattgttggattggatcccgcgggatcggaaactttatctcgaaagatttgtgtcccaatccgggaggcgggtcacataaattgtgttttccgggctctacaaaagtttatatttcaaaaaaaattttaaatatattacaagcgctcgaacaataattaatttgtcaccattatttaaaaaacataccttttgaagacagttgacaatgaaattgaatagctgaaaagaaagaaaatgtattcactagtcaatttttattgaatttttcaaaaactcaggaccaaaagttgcaattgaattgaaaaagcaaatcttttaaaaattattggaaggatggaatttggacaatgggacaacttaagtctaaaacaacgcaaaaatccagtttattcggtgcgcaaaaaaataccaaaatactatagtataattgggggatgggttgaaagtaacagaaaatgtcaaaaaaaaaatacaaatgcccaacctaaaaaacccaaatttggcaaaattgcagcaacaaataagataaatttggacacaaataaacctgctctccgctgcccttcatgatcggataagggacaacgaaattattagtggcaattatcggctctttgtctttgccctgcagtgtcagcatgagaatgcgaaggtttttgccgctcagatcgatggcaacgtattttccggtctctgcaaaatggaatttaatttcaaaaattttttttacaatttctgaactatataaaagtaaaaaattgtgcgggagaaccgcccgggcggggaatttcgcggagtcccatttttggaggaatacgaagtacggaggcccagccaaaccgatgataagtaaaatgcgttccccgttcaaggtccatcttcaaactcatgttcccgactttttttaccgcaaaaacccgggcactaattagcatcgacaggcatttttggtaaaatccaacaaaatttggaaaaatagtgaaaatatatgccgcacccgttccatccggaagggctggaagataggaagggagcatcggaatggaagtgcgtccgttggtggtggccccctcctggaggccctgcctcaactccgtctcaatgtcctcgctgattttcaccgaaacgctccttggaaatgatgaacggctttagcatcccaagggccttcaaaagggaatttttcaatgagaaaacttat

SEQ ID NO: 23820 - DNA, 1226 bp, Heterodera glycines
gttttgacccaattcgaaccccaatcccggatttgaataaactcaaaatccatttttcaaaaaattcacattttatacacaaaatcgcttcacaatgtcacgaggatgacccgcacaaccaaaaaatgacacgacgacgactcgtataaccaaaaaatgccctgagtacagataaccgtaaaataccaaaaaaattgttagaacaaacattgaaagcttatttggggcaagaaaacactcgccgaacgaacaccaaacgcgttgacgccatcaagcaatgactgtcacgcgtggcagtccacagattttttcaatcacatatcggaagacttaattaaaatgtatgacttatttttaacaagtttctaccttcagaccaaagacaaatgcctaccttttgagttttcccaagtttgaaattggtgatgtcttgttcttctccagtcttcataacgttcattgttgttgtcgtttgctcacaatgatcagaattttttgcattttcgccgtcattgttgttcagaaatctgtgtttacaacatttatgaagaatttcaattttttcgacccattttgcttagaataatctattatgatatagaaagggaatgtgccgggcccgaataattaaataatgtccttcctgaatttagtgattccccaggattattgtgggtttttcccaattccccattccacttttaattgcccaattccctttaataaattatccgctccttattatttccatatcctcttcttttacttctccattatccaattagtttgatcgatttatttacttaaaattggaaaatggttgcgaattaaatgtgaaaaatggaattgaaattaaatgtgaaaagaaggaattgaaattgaatgtgaaattgatgaaaattaaaatgatctgaattccaaaagtatttgagtgaaaaatggccaaaagaaggatttctgatgagggacggtccgggatgggagtgggatggagaaaccaaaggagagttttgtccgggaaccgaggaaagggacttgggatctcgatgaaagggacggagaaggatttcttctccggagttttgctcgtaattgaccgggggagctaactgatcttccgtttccctacggggaaaaggatcagcgaaatgctgatccttaatccccgccttcttttgttactgtgtgtaagggggggggggggacaggggtactgtacgttacaa

SEQ ID NO: 23821 - DNA, 1629 bp, Heterodera glycines
  unsure (1)..(1629): unsure at all n locations
gtatcagtgtcatagaatgtaggcaatgtagatcatttctcttcacacanaaattgttcggtttattttcaatnttctaaaatgaaatattttatttttacaaaatttgcncaataattttggactatttttattcttttttaaatttatttattttttgtaaatttatttaaattcgaaattttttactttcatcatttcagcaaatttatcattgtcccgttcgatggtccatattttcgcttcagtgtctcggatagctttgattagtggcgcttcttcaggattagggaaaaaacgttcaaccatgccaggctgggcgagagcctaataatttattagtgctaagttacgaaatgttaaaagcccttttaatcagtattattggctaatacaaaatatggcataactatagtcaatcccaacacaaaaaaatggcacaacttatattactaatcgattcgtatcgtggatctaagtaagcatgaaaatagatatccatttgcggaaatgagtttaaatttaatattgaactggcttaaaatgaatttttattgtcatttgttgaattattttaagattttctgtttatttaaataattagacagaatgccaaagtcataaaatctcaaaaaaattgccttttgatgatcgaaatcagaacagcgaacggattagcattatttttcatgctttactcctcgagacgaattaattgataaatataatttgtttattttttttatggggggaggtgaccatactgtatcccaaaatagttttatggggatgacctgttggattttctttgaatatgcaagtactgcaataagcgatggtgctttctgaaaaaaaatattaaaataaaatattattgcgaaaatatctaattttttttacgattgctgtggaacgttcaatgatcagtcgagctttcatttgatatgtattttcgttgagcatagtttgctgattaaacacaacagcaacaacaatttgcttgtttaaccgtaatgaaaaatctttgatattaagcgttagcctaaaaattaattaattgttttttcataattacttaattttcatacattttggcacattggaataaacttaatacaaccgaattaattgcatatttatcatgcaatttcttctttatgatccacgattcatagtaatttggcctatttttggcgacaattatcagcacaattgctttagtatcagcaaatttttgcctcaaaattttttgtaaaataattaattaattgatttaataaagacttttaccaagcatagtacaatgcatcgacagtcaatgaaattgtgtcgctttctacatggtttgccatattcaaacccaaatttgaaaggacatttttatgaagctttgttgtaagatcagaaaaggcaaatcctgtggttgaagcaccattgatttcaaccttcattttaaaatattgtaaaaaataaaattatttaaaataataaaaattaatcacctgttttaattgataaagttttgtttcttcattttcatcactgttcttcttacaaaccatataatcctaaatggttttaatattcttgtacgccactaagantttatttctcaattcaaaatagtag

SEQ ID NO: 23822 - DNA, 322 bp, Heterodera glycines
caatcaaaagttacccctggcctgcaaaatttcagccccctccgggcaaaccgtaaggacttataatttttttaacgaaacccaactttattctatatatatataaactagcgtgtggcggcgcagtaattgcacggtgtagacagtatgctttgcacagtaattgctcggtgtagaccgtatacttttggtatatatgggcgggcgctgacatgagcgcttcgcgcaaaggacttcgttgctagtgcatgcgcggcttccataatcgatgcgtgtaccacaacatgcgtggctccccacccttccccccacgcttccccac

SEQ ID NO: 23823 - DNA, 2758 bp, Heterodera glycines
ccgacgacacttatgttaaagcagttccagttcatttgccatttttcttaaaaacataacgccaaataaaataaatttgaaaatagaaacgaaagacataagagaaaaagcgcgccgcgaccgcgatgcgttcgcggaggcgttggcttatttttttattagccatttcttaatttaaaatacattaacaaatgttttagcttatttcattaattttgatgtcaagcttgctatgagctttcaatggccttggcattttgattttcctccatttttcacgtaaaaagctaaaaaaaggtgtcacaataaatgaattcaaatttactgcttttaagcatccaaccaaacctttcaactcgtgacaaacaactaaaagcttggggacgacttgtgctcgattattgccaagcaaatcgtatttacaccactgatttggacgaaatttcaaagtcggatttattcaacaatcgtcgactgaatagtgagtaatttagcattttttaaaattaaagttagcatgcttaaggacatttggatctgtcagggattcgggcagtgttcgactttctcgaacttcaaagtctgtttggccttttgttcgtaataatttctgcccattcactcccttaagaacacgtcgagtggaaggataaggacaagacgcgctgcaacatttattggcgtagaccagaagagtggggccaattgctttacgagtgggcaaattcaattggattgttgaacactgtggtcacattgtacgagttgacccaaggcgaagacgtcgcgaaagaatgtgagttggcaaggcgacgaagaaaaaataaattggaatttggtttttcagctttttacggtttggacaaagacgtgctgttaaaagggctccaacatttggagaaccaaggcaaagctgtgctgattgacattgacggcgaaaagggcggtgtcaaatttctgtgaacaaagctttgtgttcaccgtttctatggccatggaaaagggttcgttccgtccacacttatacaatttcacaaaacaaccttccaggttcgaattttttgcgcaattccgacattgttgaggagggggacaccgtcgttgtttatgttaatgcggctgcacagtacagtgttgtggtgaagcgggggcacactttgcacatgaaatacggcgcactgcgccacgaatttttgatcggaaagcggtgttatctttaggatttacctaattccctgggttgaatctcccccccccccaattttcagttatggcaccgccgtgtccgcctcggccggttatgtgtacgtgttgaggatcaacccgagcatgtggacacggactttgcagaagagcacacagattttgtacacgccggacattggcaccattctgctgctgttggacgtgaagccgggcgcacggatttgtgagaccggcacaggtagaacggaggggggggggaaggcaactcggactgaaacacatggcattttaaggcagcggttctttgtctcacgccattgccaccgcagtggcaccggacggccatttgtattcatttgacatcgatgagaaacgtgccaaaactgttcataatgatctcaaagtaatgcttttaaagagggtggtcgaccaagtttatgaaactataaatttttcaaaaacaagaccaattggcaatgattttttgaaaaattacacttacctattaattttaaaatgaaaaatgagtaaatataacttttaaatttgttgactgaacccagcaaatttagtatcactcgaaagtttttaacagattattagtctactaatgattatgaggattacccaaactaaaaaatttaggtaaataaaaaatacaaaaattcttcccttttttgatcaaacaattgcttttttcgtaacttctctagcactattttcgaattattccaaactaaagctttagaattataccaagtttgttaagttggcttacaatgaaaaaaaaatagtatggctattaataagatggaattgtccgaacggagttgacttcccccactatttctctcttttcagctccacggtttgtcccaaaatgccactgtgctttgccgtgacgtgtcccagcatggctttgccgcaaccgattgtgcggagaaagagtggcgttgtgacggcgttttcctggacttgcccgccccgtggttggccattggccatgcccacaaagtgttgcttcaaaacgggcccgagcgccgtccgtctcggctggtcagcttttcgccatgcattgagcaggtgcagcgggtgtgtgccgagttggagcagcacggctttgtggacattgagacggttgaggtggtgccacgaaaactgaaggtgatgaaaacgcgcgaagggtgtgcatttgacaatgaaaatgcagacgaatccgaaaaacatttcgaaaaaattaccagattatatgcaagcccaagccagaaaaaaaagtttgttgaggagccctgactttttgatcttcgggccaaaagtttttctcgtgttatttacaaatttgagcgctggagagcagaaaatgtagccgttttcaccaagaaaaggattaattttgccattttggatcaaaatttcaaaaaataagttaaactcggggtcaggcagtgtcgataggcaccgcctgtaaaattttgaaattttatgaaagaaaattgatttgcggcgcttttctgtgatgctgttttatttgttcaaacaccaaatgatgcct

SEQ ID NO: 23824 - DNA, 822 bp, Heterodera glycines
  unsure (1)..(822): unsure at all n locations
tcagaaaaganatttggcaacgcnttgaacaaaaaaaaagaggcaaatgagttgagaaaaaacagaaaaagaaagacgcactttgccacagtgaccaaagtcaacggaatccctgacaattaaaaggacaattaacgcaaatggccaacaaacgacggacaaaccgatcaaacaatagaggacgccgaaaagccgaccttcgaaggtcgacggacagacgaaaccgtagccaatcgaagtgagcattgtggcggtgaagaacagtgaattcttgaagtcccaagtcggaggattctcaatttgggtgcaaatttgagaaggggggggggggaggaaagtgtgataattacttcctcaaagccgtgccgaactgcccgatgggccacgtaaaccgtgtccacataattatgaaacttctcctccgttgctgcccgaatttcggccaccattttattttcattaatttcgtcccatggaatttcctgcaaatttttctgaatttccgtccacaccgcttcagcgtatttttcagagtcagcgccgacacggcggaggtgacgcgcttttgattctgttttttgaaatttgacaattttaaaaatacgaatgtattaagtttaaccaagaaaatggcgttcttccaaaagttggaacattaaagcaccaagaaaaatgtacaagacacaagcgaaggcgagcaaaaggtggtgggagagaaacttggcacggacaaagcgcaaaactcggcttaaaagacatttaatggaagtgatgcactgatcgaagagaggaaagatgatcaatcacggataaaagtgacct

SEQ ID NO: 23825 - DNA, 2107 bp, Heterodera glycines
ttattaattatcaaaacattttttttttacgcaaagcattttctattttttataatttttaatatataatttcgtacttccatctttcaaattttaaataccattaatatattttaaaaaagttcaaattttagttggccttttcattgaaaatgaatgaatgattcgcggagatttcgtggcaaaaaaataaattgctcatttgcttggctgtcggaactttttatgagaatagggccagttgaacaaataacaattttatttaaattattttttaattgcatttattatttttaagggaatttgggatcaattggacaaattaaaatttaaacattaataaatttaaatgtatttattattttatgagtgaggacgagtttgacaaatacaatttaaatacatttgaaatgaattttataatttttatgacagatccctcttttctggcacatattagccgtgcccatccgcgatggttctccaaaatcagtcgcattttccgtgtacgtcgtggccaaacatttgctggaactccagcagaatgggctcaacttgtcaaatgttgttgaacaaatggaatgccgcaaccgttcacgccaaaatgaaagaatatgaaatgatgtgaaaattttcaaataatttgccttgccaattgaattaatgctttttactagtgaagcgaataaagaggacagaaaaaacggacgccaaaaatatccaatacaaagtcaggacaaaatttactgatgggaaaaaattgttataatgttatgtttaataaatgaataaaacattttttttaatttattgatgtttaaatttcaatgtccttttggccatatgttaaagaaattgttccatttttcatttcaattttcgcattggaccaactcaatttttgttgacaacaacccaagaatagcttctctggttaattcagtcaattgttgtttgacctaaaatattatattaattttgtttttttttgctaaaaataattcttaattttctatacattaaaccaataatattgaaaaaacccttataaatttagaaaattgttcttttctaggtcaagaatcggttaatacgtatgttatttattgaaaattaaaaaattctacttaaaattttctaactagggctggacaaaattgtatttcacttatggaaatttgtaacccgtaatctcagagctcaaaacgtcttaatttccacaacacgatccgtaattttcgctcccaaaaaagacccataatttctttaacgcgtaatttggtccagccatgctccaaacaacggatcaattacgttttgcgattccattcggtcaacagccgttaaattgttgtcatcaataaaaacattcatcgtattggcccaaaagcgtaaaatctgttcgatcgaaatgccaaattcagacatttggaactaaaaattcaatttcaaatatataagcgaaaatcagtaataaataaataaattaattgttaattcattacatgtagtgaaaccaattctgaagcacttagtgttcgcaaaaatggtgttggattaggctcatttgcttcaccgagccttaaatttcgtcggacagcgttactaagccaattaacacattttgaagcgacatgcccagtaaaagcactcaatctgaaataataaatgcaatattatttaataataaaaaatccactttataattaatatttaaggttaattacttacaatatattcgaaattttattgtttatagtttcggccaaaaaagtgaaaatgcccataaaacaaaggcgttttccaattgctagatcacgctaaagaagaaatattagcttgcttgatgtagagtttggaggaaaaattttatctataaattaagaaatccctcatttttgaaattgtaattacatttctcagacttacttgaatttttatgcaccggagtttggctttacaaagaaatggtgccaaatttcaaaaaaaagtaccaaaatccatggctaaaattgggcaaactttgcacactcacttttaagtgtacgtccatttttacattgtccattctgacagtgcccaattgttcacaaatgttcgacaaatt

SEQ ID NO: 23826 - DNA, 1481 bp, Heterodera glycines
acttttgttaatttcgccccgtaaaatgatttttgaaaaattagaattttcgactttttggttcgaattcgggtccgggattcaaaattggtcgaaatggatgtcagattcgtgatcagcgaccccgaaggacccgtagaatgaatcaatgaaacaccagaatatatgttattagtacattcacaatacacagatggcacatatttaggcattggtaacaacatcatgatgatggcatttggggtgaaattatatacatacaaatcggatggatttgacgggagatcaatctcatggcaaaattatccgtgatttaattaatagcctctgcaaaaattctcgtcaattccgatcaccacttttcttcatggcgtcgttattgttgttgttgtcgtaccatggctcatgcgtaccacgcgtcacgtcatccagtccctttctatccttgaagaaatgcagacgacattcttttctagcctgggaaaaaatttattaataaaaaacgtccaaatttcgaccttttcgcaattttcatgtttttcatgtataacttttttggtaattgtctaatcgcgaagtgatacatagaattagattcgaaacatgttaagctttcgaatgataccaacaatcttggatttggatgccaaagaaaaaagttatagcgaaaaacataaaaatttttgaaaatctgcccacagataaccgacaagtaccaaaataagtgcagctaagcgggctcgaactccagactcccttttctcttcgtcttcactagcactcagttgtctaaggctcagatggcgtctgttcgacttcacaagggccaacgggaccactgatctttaatggggcagaaagaatgccttttccaatggccaacgggaccactgatcattttagggggcccaccatcgaccttataccataaattatagatgcatttgcgtgataaacaaatttactatcaatcgcagcccgatccgtggatttgttggaaaccaatacgcagtcccataatttgagaaacttcatgatcagattaatcaggtacaaagtcggacacactgtaatttggggctcttataaaaacttctcgttctgccccgatttccgccttaaggattggactgatcatttgcactctctccgtcactttcgcgttgatcaattttctaaattcgcttccaatgcctttcccttcccgtgccatttcctttcattcaccaactgtgggcaatccataatatccaaccacactttgctatttgtacgtattccgttcattctttcgcctctgacgaatttattcctcgctgaagctgcgctataattttgtgaatcccctcacactttccctcccccccctttttcctctccctttctctccgccctcacaattccccccaatatcccgtcggtcgtcgtcgtctgctttgaattcatcccccgcagcgttgtacgccctcatcccccctccc

SEQ ID NO: 23827 - DNA, 1517 bp, Heterodera glycines
cttcatgccgaacttcttctgactccacaatatcatctttttcgggtctttctaggggaattgatgccggtactccttcaatttcatgcagaacttctgattccacaatatcatcatattcctgtctttctgatgaaatttgtgccggtactgcttcaacttcatgccgaacatcttccgtctccaaaatttcggtcgttacatgtccgtcaatttctggcgatgatactgcttcaatttcttgcggaattttttccgtttccacattttcacctctttcatggccttcttccgttgaaatcagctacttccgtcatgagaagaggcaatatttgttcatggccttcacttgacacttcttctggtgcaaatgggcgctcttctccatgcatttgggagaatggtgccattttatcatcggaagattcaacaaaaaaatgcatgtgttcatctccagatggatctgtgacgctctcaaattgtttcactgtcgttacttccccatccgggaataattctgctgatcgaaatggtgatcgggaacgtggcgaatgcattggactcgcttcttcttcaatatcaacagggttggagtcaaccaacagctcttgttccgacgcttcatttttttgctggtcagttggactgcaatttcatcagcggttgttcagcttcatcttcacgctgatcggttgacattggtcgatgatcagacgcaatttccattgacgactgttcagcttcatcttcacactgatcggttgacattcggcggtgatcaggcgcaaattccattgccgactgttcagcttcatcttcacgctgatcgattggcactctttgatgatagccaatttctgttggtgactgttcgacttcttcttcttcggtttctgttccaataagccgcagatcagttagtgcttctgttacaataacatcaaagtctagtggttttaatgcttattcctcttgttcatgaacagctggcaacacttcaacaatatggcttactccttgatcttcttcaattggcgcgtcatgtattactccttgaacttcttcaacttgcacgtcatggcttactccttgaacttcttcaacttgtgcgtcatggcttgctcgttgttcagcttgttgagtctcataccctcttagataatattcatattcatcttctggctcgtcaggggcaggagtgatttagatgatcggcgatgcagaagttatccaacagcggtgtcggtggtgtagagacacatggacagtcgaggatcgaacgtcgttcagcattgaaatgaaagttgtgtgtgcctcagtctccgcatattggacaaacaagttcctagcaatttcaagccaatttctaacattctttgcaaaaagcagcatttccaacgctcccccccaccccaagggcatttcggtgctgttcatttcaaagccactccctctacaccaattgacggtccacgcccataaaacgccccactggggaaaggacctttcggtggaga

SEQ ID NO: 23828 - DNA, 2259 bp, Heterodera glycines
  unsure (1)..(2259): unsure at all n locations
agctccaccaaagagaccatcacagagtaccaccaccaggacggcatcgaaaatcaaaaaagagtttcgcccgaaaaaaatggaattaataaatgccactcttgacaaactgtacaacaatccatcttcccccgcggctttttccggtgttactgcactgtggaaagaggcgagaaaaaagataaaacaattaagtaaaaaagaagtgcagaactatttggaaagtcatcgtacctacacgttaatgcgcccccgacgggtgcacttccggagagcaaaaactgttgcagcaggattcatgacagatgtccaagtggatttggccgataaaatcatattctgatagagaacaattaaagatattgaatgatatcaaaatttggttgaatttgagccaagatatgaatttttatgtgttacccattttgttttcgaacccattggcgggtttaagaaacacgcatgggtggcggaatttaagaaaagcgccagcacgcttttatttatatatttcgggatttttctacatattgtatatgtacatatttttatacatattctggattttttagtacatatttcgcaattttttcgtacatatttattttttttacatattttgggaatttttgagaatttataaaaaatttcttgaaaaaaatttttaaaaatttttgaaaatatcccctaaaaaatcggtttttttcccaaaaatcaggtatcttaatttttaaaatactaaaaagtgattctaagcctatttttgtccatattttgagatttttgccattttatatcaatattttgcgatttttggtccatattttatggccatattttgcgattttatatccatatttttgacatacctatttattagtattttttgttgcttttgttttttggaaaaaattggtatcatattttaaaattctaattatccctcatgggggataattagagactgggggattatttttcaacctcctcagataatgggggataattggggaatgggggattaatggatatgggggataaaaagagaatatacggtatatgcctttaacgcagggatgcgatctgtcctgatttatcagatttgtcctgatttggaggtagcgatcaaattttgtcctgatttcttaaataaactcacagaaaatatttggtaacaaatttttaagataccaaaatttgacaataattaaagtttttgtgctttttcgtcaaaccctttttgattactttatttgattgtcacataaatgtgcaatgtgttcagaacaatgcctacagttgcgagcgttccaaatgtcaaggacaagccaataaatggccagcaaggacacgctcgtccttgaaacgagattcaaccgaaattatatttataataatagtttttaattttagtttagtaattcaaattcgcatcgttaaaatctcataaatatcgcaatttaaataataaattgtaatcaaataatattaggaaatttaagcttcttataggaaactaaatcagacaaagaattgaaaaatgacaataacacgcaatttatgtttaaatagtctgttcactaagtaattataatttacattaaaaaaaatcttgtaaattctatttttctatatgaaaactataaatttttgaaaaaaaatgaatatagaaagccaattgagctgagagccaagaattttgtcctccagcagttgttctacttcattgtagtagtggtcaaaacaatgctcacaaacatctaaaaaatttttaagaaaggagtattttaacgaatatttccccaaaatgcatctaaaaaattatatttctttttatttatattttaaattatttattatattctttatatcttgaaaattttgtaaatttttagtttttctataagaaatttccgagttattgaaaatctcaaaaaacaccctaagatacattaaacataaagacgcaataaatatcctgtagtttttttaaatatttttgtataatattttttatttagtatcttatgtatcaaaatgaatagaaaaattaaaaataaagtttttttaaaaataattttttgaaaatgactttgcataaaaagcaatanaaaccacaatattagctntctaataattttncatatacaatgtacattantaatagtataagaaaaattatggggcgtaaaatactcaaaaatttagagctgacaccaaaaagcctgagcttaactcgagactgcgattctcagcatc

SEQ ID NO: 23829 - DNA, 1813 bp, Heterodera glycines
tggtccgatgttcagtgtccgcgcaacgatttaccatgtgatcatttgtttgttgtttattattatttaaatccgaattattgttttaattgtttggtggattttgaaaagtttaatcatttaataggcccaatatttaaatttaattaccggaattgcatcaattagtagggtgtcaaaaaagaaatgcgagaaaatccgcacggattcaaaaagtaatcaaaaatgaaaaaacttggcgtgggtttgaactttgacaagccaacacacccacttttatccactgggccatttgtcaccatgaccatttttattttaatttcctaaatttacatatttatttttccaacagttcaacgcggtgtccgagcgtgtgatgaccagcagcagttgttggccgagtgatgggcggactaatgggcgcgcattgtggaaaaatgggtaggcaaataaaacaattttatagggcgaactaaaaaaattttcaatagtattttttgtcattttacagtgcatctttcgtcgtcctgctgctgctactgcttcaacttctgctgctgctgctcttccattggctggtgccgtcgtcgctgctgctagggaccatcgccacaacaatttgtgtgtgattttggagaaaacgcgcttaaaactggacaccaccgtggaatgtgctgcggaactgtggcgcaccgccgacggcacggcacaggaagtaggacaaaaaaaattttttttaatgaaacgattttaaatttttttttcccgaattttttaaaattaatttctaatatatgaatttatgttataattagacaaaaacgaaattgcttttgatttgaatattgaaaaaagttttgagtgtgaggggttggagtaaaaaaaaaaagatttttgttagtttgtgcgtccttttttattttgttttaaattattgattgtgcaaaaaaacaggaaaaaacaaaattttaaaatatggttttcaaaaaaaatgtgttggctggcatggaaccgaacaccgccgattggggaaaaaaagctttctgtcaacacaacaaaaatttatcaaacaaaaaaaaaaatcaaaatgttttttttttaaaaacaaattcaatctgctggttctcatcttcctccccctcttcctcatccccattctcttccaccgcttctccctcctctctatctggcgccgcgtcgcccccatcagcgtcctcctcctcatcttcgtcctcctcctcctcatcatcgtcttcctcttcctcctcccccaacaaatattcggcgtctccggggtggttttgttcccacagcgaagcgccgaatatgcttaaccaaatttattttaaaaattttaaggtgtcctttggtgaacaactggaatgaacgcgtgatcggagtggtagcaaaaaccaggtgggcattgtttttgaatttcctggattaatccccttccccctcgtctgcttgagttttttttttgctcagcttgtccatttttagcagcaattttcaaaaaattgcccatttcaattattttttaaaattggttttgaggagggagctttaacaaaaatggacataccctctgagctcggcaggtccggcggtcttttctctcaccagcagctcacagagctgaattaggaagcatcattaattagcattaaatttttttttttttgtaattcacccgcaacacatccggccattcggcgtccaactcctcccgggccgttctcatggcccatctctctaaccgccgaacctccaccttaacaaatgacctcttctcctcctccccttcaatctc

SEQ ID NO: 23830 - DNA, 1577 bp, Heterodera glycines
  unsure (1)..(1577): unsure at all n locations
tctctctttttctttctctcactctctctttctttctctctcactcttccctctctcacatcctttctccctttttcgtaatctcttatctctctcttttaacctcctcaatcactttctctttctctctctttgtctttcttctctctctctcacgctcaaatttctctgtctctgtctctctttttctctctctctctctctgtttttcactctatttttttctctctttcaatcccgctctctcatttcccttctctccctctccctctctttaactctatctctctctctttatttctcgctcaaatttctctgtctctctccctctatttttctttcactctcctttgctctctcaatctcttctctctttctctctttcagtctcgctctctcatttacttctctccctcttcttctcttaatctctctcttttcacactctctaactactttcactcctatccctctctttatctctctctctctatctctttctttttctctcaaattttctgtcttctctctctctatttttctttcactctcttgttctttctcatctcttctctctctcttttcctttctctctctctctctttcctccccttctttttatcacgctctctatcgttcattttccctcatcttttaatttctctctctctctctctccctctctcctttcttacttctctctcactgctttcttctttctcatttttttctctctctctcttgataattagagataatacggtaaacgtttttaattaatcgcgcaaattgtggttgggtgtcataaaattgattggagactaaaattgtagcagaactgcaaataaatcctaacaaatgaaaaaaggttttttaaaatgggagtaaaaattttaaaaaaatttaaaactattaaaaaaatcattaaaattacttttataatattttcgatcaattggaaatcattacaataattgaaaaaacaaaccgataataaaaaaatcggcagcaaacccaacgaactaatcaataaatgaattacttcagagattttaacatttaagtctgattttttgttaaaatgatactaaatcgacaaaagcctttgattgatcgcgaaaattatgattggtcatgtaaaagttgattgaaaataaaacaccaggagaaacgcaaccgcagcctaatataaaatcaattaatgaaaaaaggttttttaaatacataggggattatacatatttcaaaaaatcattttagtgtacacaaataatttttaaaaaatttattgtacacattcaagaccattaaaaatttgctattaaaatgattttgttcaaggaacggaatgaaacgtttgatttgacttctttatttttaacattcggaatattggaataataattcaataataagaaaagagaaatcgaattntacgggtgttgatttcgtaatggtattgnacttttgtntgtacaataataattctctttttcctcttcattctcnnttgttttgcaatgcnttcgcttcgaaaataatccattcaaagtgtgacatacatagtcacacatcaa

SEQ ID NO: 23831 - DNA, 1615 bp, Heterodera glycines
  unsure (1)..(1615): unsure at all n locations
ttggcattttttgatcactatntagttaattattntgggattttttatcactaaaaatcccatctctaattatatgcgaatattttaaataatatttttttaattaaaaaataattttatttttatttttaaaagaattattaatacgtttaatttgatcacttgcacttttcctactttgtcatattacttggccaaggcacaattcgaataggaaaaccaaatatctttaagcgttttcattcgaaatcttcgtatgtatggttgcaaattatataaatttaatgtccattagttgaaaatttcaacgaggcttagaactgacaccgttttttatgcaaatccaaattatgcgctgaattgacacgaaatcccacaaaatcaaaaaaaaaaattacatttatgaagagacatttaaaacttcttcttcggccaataaatatgcatctttaaaaggcataggcactcatttttcagttaaaattttagaatgatatttatgaacccttaggaggcgaaagccacaaattctgacgggacgtatcgtgtgatcgagaagatggacgccaaatcaattgacgaaaaaatgttgaaaaaaatcatagacactgagaagggtaaaatccatgtgttacggcttgaggcgggaggtgagtgggcggaaaaaagcagaatggccatctccaaaaccaagaaatctgagttttttcaaaactcgggaattatcgggttaaatcccaaccggcacggatcaattggcaaaatgcagtcctgggaagaggaaatagacgaatggaaatagggaggaggaaccataaggacattcgttgctcagattttttgtgtctgatattcgctgcataatgaaaatgcaccctttctaagacaaaggtacagagctggccaaatccaaagtgttcaaagaccgttctgtgtgtcatcttctgttgaccatttacaacacaaatatatccaaattagaaagcttattgaattccatggagaaggaacaagggtaagcggaagagaaaatgcaaaattaaaatacaattgaaatttcgttggtgaattattaatttagttataagttgtactcgataaaggagctgaaaaacgaagaagcggacaatgaacaagttgagaaagaagaggaggaaaacgaggaggaagaaggggagaaggaagtaaacgacggactgagggaggaggaggaggcgggacggcactatgcactcagcttaatcggccaacaatgccagaagagttatggcataaaatgaaagatgaaggaaagaaaagctattcgttccttacccatattttctaccttttagcgtttaataaactcattaacaaaaatgcaacaaaaacgaaaaatgcattcctaaataaatatcaaaaatataaatccaaattaaaaaatttttctgggaaattgattaggcctatcagaaaaatgacaaaattctctatcaggaatcaaatctgttaatgaatggtccataaatttgactattttttgcttttcaaaaccgcttttttcggcgcaattttttcaaaaaactaggaacaaagggggtccggcggtgcccataggcgccgcgggaaatttttt

SEQ ID NO: 23832 - DNA, 1149 bp, Heterodera glycines
aaatgaaaaatggttacagtatgacttacagtattgttgttttcatcggtcattagagccaaaaatgattcaacaataaaatgataatttctttaataacaacagatggctagcaaattaaatattttaatttaaaaattgaaaaattgcacccctaaaaagaaaaggtattaatttttcaacaaaaaaaatgatttaaatcatcgcataaaaatagaaaaacgcctaaaatttgaaataaaatttccacatttttttgtgtaaatattttgtcggcatgagcttggcacactagtacatagagccaagaagacagctacttcagcttatttttttgctttttggtccttaatgtaatttaggaatgccatgggatataacaaatgtttgtcacctcataaaagtgcctaattagctagagtaattgtatttaagggcactttttagtaggtaacctaactatctatttattaaattgagtttttaattaatttaacacttttaacactaacaaatacgataaagctataaattcaagaatttcaattatcatgctaacgaaggtccaatgttttaaactgacggaaatggcgagacggaaaacatacattttttataattaagcagtgttaacgaacgaaattttcaaggcttaggataacaaaaatttaaagcaaaaattaaatttactatgattaaattggtagcctagtaaaataatcattgaatatcaagcttctgcgcaatctttgtcgacttaaaaaaaaaaaattctaatgcaaaatgcaaaagccccaattttcataggcgcggacagaaaaatcccgcggtcgcggatcgcgcatcgcggattcaattttcgcggatttaaaaagtcaaaattttccaactttttaaacataccttttttaaaatttccttattataaaaaaataattaaaatcccggtgcatacaaaatttgggaagggattgaatgggggggggggggggtgggtcagtgtccaaatttgcgaaggtgcttttcaaaccggtttttcggcgcgctctttccaaataaatttttgagaatagatggggatgggtccggtgtagccgattggaacctacgggaaatttttcaaaatatatatagatttatctatatatt

SEQ ID NO: 23833 - DNA, 1226 bp, Heterodera glycines
  unsure (1)..(1226): unsure at all n locations
aaaaaattttttctaagaaattttacagtccccagggggttggaatatccataaacacatcatagggtaatatctagcaaaaagaaatttttttacacaaaatcctagtccagcagacagatgaagcgacttaataaatcgatatggattgcaaagagttaatttctcaactcacactagctaacacggaatttgccgcgtgtaggcgtaaaatgagccattatgaattacaatgaattacaagcgtatatcttggtccacattgagtgtgtgggcgagattaagtaattttctgaaagagctcaaaagcagctttcgaatggtgtattcaattaattgtttacttgaaaattcacagagatatgtccaaccgaatcttgaaatgaataatggcgtagtattctataaaaaattttttcttaggaattttacagtgcccagggatttgaattatccataaacacatcatagggtaaatatctagcaaaaagaaattttttttacacagaatcctagtccagcagacagatgaagcgacttaataaatcgattatggatttgcaagagttaatttctcaactcacactagctaacacggaatttgccgcgtgtaggcgtaaaatgagccattatgaattacatgaattacaagcgtatatcttggtccacattgagtgtgtgggcgagattaagtaattttctgaaagagctcaaaagcagctttcgaatggtgtattcaattaattgtttacttgaaaattcacagagatatgtccaaccgaatcttgaaatgaataatggcgtagtattctataaaaaaattttttcttaggaattttacagtgcccagggatttgaattatccataaacacatcatagggtaaatatctagcaaaaagaaattttttttacacaaaatcctagtccatcagacagatgaagcgacttaataaatcgattatggatttgcaagagttaatttctcaactcacactagctaacacggaatttgccgagtgtaggcgtaaaatgagccattatgaattacaatgaattacaagcgtatatcttggtccacattgagtgtgtgngcgagattaagtaattttctgaaagagctcaaaagcagtttcgaatggtgtattcattnaatttgttacttngaaattcacagagatatgtccaaccgaatcnttgaatgataatggcgtagtatctataaaaa

SEQ ID NO: 23834 - DNA, 1559 bp, Heterodera glycines
gacaattgcccataatgtttcatttatttcaatttataaaccaatttacaaaaattgcatttttgttcaaagacttttttccactagtgtaaatgaaatgaaagggaattgaatgaagaccgagtggttaaatgaaattgaatgaaagagggaaaaggacgcccatttaaatgatgcatcgattctctgttcctccaaatggacagagaagcagccaaaggaattagcaaaaggcagacagaagagaaagagagagagagagagagagagagagcttttcattttattgagtcttttgcggtcatagaaaagaaaaagtgcagagcaaacgaagaaatgagagaaatgctatacatggtacataagtatgtaacagacagataaaataaaatcgatttttttgaaaatgtaacccggtccagctggtttaaaaatatgtctattggaaaatcattaaaaaatggcctttcctacaaattcctaactcattttttgcccctatttgtttagtgcacattccaaagttgcaacaagaaactgcggaacaatgtgatgtttatgcatcacatttgggcccatgtggcccaacaaaagcccaccgactcggaagaacagtttaccaacatgcaggccgagcaacataacgccaacagcatcatcaccaacggcacgaacaacggcaccgacacggccaccggcgacgagcagctcagcgatgtcagccgacttcacatgtgcccagagtgtctgttggaacagcccacaccgcaccgggcgcacctccattaccaccgtaggctgatgagcaaaatatgaaaattattaaatttaaaaaagcaaaattttctagggaatccgccgaattattgttggcattatttatttggctaagaaataattgataagaaattttgggttataaattgtagatgcttttctgttttgagttccccccctcaaattttcaaatattggcgctgatcacgaatatgacctttgttttacaaatttccgaaactcggacccgactcgaaccaaaagtcgaaagtttaatgccaacttcagaaatttgtactttcgacattttgttcgagttcatggtcggggtcaggggtgggcgaaacttcgagcttcgtgcttcgaaaacttcgcgttttttgggcttcgaacttcgtgcttcgtgaaaatgctcgaaacttcgagaaaaatacacccctaaagattgagtttgaaaaatacacccttaatgattggcttatggtaaatttaaatctcattataactttttgctttgcaatcttcattacattcgtagtccagtgggttatgcttttggatccgttccttatttttcgttagatcagttcccctccaagtttttgttttaatttttcaaaaattaacattttaaatatatgacgtaagtgtagatttttaatatataggcccaaaattcgcaccttttcacccgcctggcgacgcctaccccgcccccaatttttattaaaaaataggctcaaaatcgcaaaatttttacatttttgcttaaatttttaaca

SEQ ID NO: 23835 - DNA, 1215 bp, Heterodera glycines
  unsure (1)..(1215): unsure at all n locations
tgcagtcgtcgatgagcagtgtgatggcngagaacaacggcaactcgtacaacgagtacagcgtggttgatggtcaacagcagacggaagagcaccagcagtagagattgttgtgtttggaaggaaatgaaaattggcggaaaattttcgcattttttggggtaaaaacgattgatatttgtggactacggtaactgtctcgcactgttagtttactgtaactttcttccataaaaatcccaagttggtttcgcttttcttgcataaacagtgggcattttaattgttttggaagaaactttgccttttgacccttaaatgttggcacatttttcccattttaaaattaaatgggtttttgatgttttcaatgttttgttgtttcggcatttatgccgtcactcttttcgagtctctcttctctgtttttattcacataagaattggcaaatgcacccaatccaattgccgccacattttcaacgtgccaccccccgagggcgagggggaggaggagggcatttccgactgatgaacagaagacattgagtgtccccttaaatcggctgcggcattttgcctttaaaaaacaaagaaaattcattttcggcacagaatttgagacgaatttgtgaatttgttgcgaatccaaaaaatctttttcatatttcttgttttaatttatgtatattatttaattaagtgggcattttcaacataattgtgtcattttccatctccattcccagtcccataccccggggggacattgcctttctctctcttcccatgggccattttggcctgaaaagagacggcgaccgctgggcggcgttggctggatttgggtcgtagtatttcccatttctccacccacacacggtctcgattcgaccattgaaagttcgggaatgggtgggtgggagtggaggggggggggggggggatgggtgactcttttctgttattgaaatcgctttctctttattcagtcatttgatgtgaaatttaatgcattgcctttccctccccacaacaagtaccgttgtctgtcatttgatgctccttcccctgctgttgtcatgtacttcttctatgactgtcgggcccttttcccccccgcggggggtccatttgttactgggcgagtcctttgaagacgtgatgagtcattcttgaatgtcaaattaatttttgaattattctccccccccc

SEQ ID NO: 23836 - DNA, 973 bp, Heterodera glycines
  unsure (1)..(973): unsure at all n locations
atacaaaatcggatttggatattgagttcaggattccattgccagcaaaactgtgattccaatctcgaatcgcgatcccgagtcggcttttccaaaattctgggctttagattttctttggtttgaaaaaaagctaaatatttttggcattttgtctttcagggctaaatttaaattttgatgattcaacttttgtttttttttgttgttgttttttgcttttcgctttgggccttgatgggttttcataaacacaagccatttccaggcattgttttttggccgcttgggtttttttaaaaaatctttgacattatagagcatgttattttctgaaaaatgatggattttggaagtatgactgtcttacggggggaccaaacttagtatttattatctgtactttcattaattggattcaattttcggcgaaccgtttcacataacattcatttgttttttgcttattatttcgcagtttatgtatcaatttttcaattttaagccaatttattcacaaaatacatttttttttgttgccgaaatgagcacggaacgctattccttctctctcaccaccttcaggttttgtttttgaaaaatgcataatcaattctattggtcagattgttcctttataactgaaaatgtagaactcttaatgtaaataatttccgaaatagaaaaaaccgattttcatacggttttggactatggctaaattagctgcttttttcaaacattgtaataatatgcatattaatttttttccctctctcccacagtccctcggggaagttgatgcaaatagagtatgcgttgaatgccgtcaagggcagtgcgccatctgttggcaccccngaggttttttttcattactatactttcacaaaatttcttacctanaatgaaattnntgtttcattnggtttttcaaaatttgtaccacatccactatttttggtcaaaaaag

SEQ ID NO: 23837 - DNA, 1394 bp, Heterodera glycines
ataaaatcatgggcaggcaaaaaaagaaataaagatgaacaaatatggggaaattagtcagtatcacggtgagcagagacgaaggcctcattgtcagatcagcagtattaagcgtaatcataaaaaaattttaaaaaaaagtgaaagcgctgaaaatgccaggaaaacttggtacaaaaaatgcgagtcaaaaaggcaaacatctgaaatttttttaatcattattatattttaaatattgtgggggcaagaggggaggaggtggctgagaattgctgctaattttgagtcgaatttcttaattatgaagtaatttaaaattgttcccaggacgaccacaagtctcgcgcatcccaattaaatatgaaaggaacggggaataggcgaaaaagtggtgtttaaaaaggcatgtgtaaattgaaaattgaatgaattgttattgctttaatttgtacttgaaatttcttagtggggaaaatcttataaaatcggaggagacagttttccgataattaagaccgacattctatgccagaaatgctcccgaagaaaaaaaaacatttttttaaattttaaatagttaaaacgagaaagcatcatctaacatcagtgagcactactctcctttgaaaatttggtttggaaaaaaaggaaattctggaaaattttctgtgtttacgaatgcctatgctttgttggcatttaaaaataaaggaacttggcttttcgatactcaacagtgatgcttagacttattacggtactactcgatactgaacttggccgaagagagttaaaacaaaaaagcactattttttttattaatgacctccctccactcaccctgaaaaattcgttggaaaaaactcgaattttctgtgcgttcactcgagtgactgactctacgcattaaaacatcatttgtcagcaacaacaacaataaatgactgctgttgttttacatacacacggacggaaacatgggctggacaatggcaatgaatgatgatgataatggtggtggatgtgtgtgctctatttgcgcccatctcacaacgccaaattcacacgaccaccttcaaaaagtgtgcacgaaatgagcaagcaataaaagttgagggatttgggggggggggaagacggcaaagtgcgcgccgcgcatttttgaagcgaaaatttgagggttggtcggggagtggagccaatctgtgaggtgatgatggatgtaaaggatgacaaattgcatggagaaggagaggatgaggaagaaagggcatgaagaacatggaaaattgggggggggggggattccaaagccaaatgcacgacatcttcggcattcttaggaatttgtgtggggccatgtccttgaacaccattcccagcccagccat

SEQ ID NO: 23838 - DNA, 2361 bp, Heterodera glycines
  unsure (1)..(2361): unsure at all n locations
aaatacccgtcaataataaaaaacattctttttaaaaaaatatccagtttgagaatatttttaaaagaaaagaaatattaccgttattgttttaatagtaattttaataatcaaaattgaccaatttggagcagagaagaaaaaattgaaacaaaagtcatttgacgaaatttttggagaaaaagggggagaaaaggaagaagaaaggcgaaatgaactcaaaaaaagagaaataattgcaaaattttataaaataaaagagaaaatcaagcaaaaaagacgaaaatacccaagaaaagaatgggataaaattgaaagaaaaatagctaagaaattggggacaaatcgaacgaaaatttataaatggatcaaagaatttggtcttcaaaaacaaataaagaaaagctataaatcaaaaactgatgaagaaaaaatagaaattatacaaaaattcattggaatggcaaatgaatataagcaaaaaagaaaatattcgccaaaagaatggcaaaaaattcattccgaaatttgcaagaaaattggagttagcctttcagtaattaagaaatggaagaaacaatttggaatgagtaaatttataacggagaaagaaaaaatggagaaaatgaaaatttattgggaaataaaaaaagaaaacccaaaaatgagtgacaaggaaattgcaaaaatgatgaaaattgatagaacgaacatttcaaaatggaagaaactgtttggataaaagaatcattgaagattgaaaggatgattataagaaaaattggataaatttgccgaaaaaattatcagaaaaactatgacaatttctagttttttttctaattttttgtatttgtattaaaaaaattattttaattaccctaaattttgaaatttttcttagtgaaaataagtgaaaacagtcaattcaaggattgggagggtatcattaaaaactgaacaatgttggaactgggctcccagtatgcctaaattttcgattttagaggccctgtaaaactccttggggttttgctagggtgaaaaataataaaaattaaaaaagcataaactaatattcaataacaaataagtttttaaaaaatgaaattgagaagcaaatgtttgggtcaaaataatctcaaaatgttgtataatttgcttaataaaatccaaaatgattagatttcactattaatgggccatttatttatttgtgaaatgatttaaaaaaaaataaattggttttctaattaaaataaactgaaaaacattacaaaactcaactgatcatcaaaaaataaaccaactcatttattcatttaaaaataagtatattttcaatgccttacaaagatttgcattcgaatcagaacaaatttaaaattcatgacatttttatattttcaataaatcaaattttcacataataaaatcaatggaaaaaattttgtttacttttctttatttaaaaaaaacatgccaagccaaatacaatacaatgatttataaaatataagaattaaccagtttttaaaacatgaataattttataagaaaatttatccatttttttcaaaaaatatttttctgttttttgttcctcaaaaatttcttctccaaatacatttcttaatcatggccaactccaatttcttcgaaatttcggcataattttggtgccattcttttcgtgttgcgcctgcaaaggtattggacggggacncaaacaaatgacaggcatttggtgccacatattgnagatcttagtaaaaaaacaaaaatcattttgagatgacaaaaatgaaattattcccgttattctttttaattattattttaattgcaaaaattggatcagaaatgaataaactgcaacaaaaatcatttgaggaaatatttggaggaaaattggaagaaaaaaggcaaataattgaaaaattctataaaataaaagagaaaataaagcaaaaaggaagaaaacacacagcaaaagaatggagtaaaattgaaagaaaaatagtgaaacaattggggacaaatcggaattacattcaaaaatggattaaacaatttgatctacaaaaattcaaattaaaattggagtaagccatggaacaattaaaaaatggaagaaacaatttggcattcgatatatgagaataacggagaaagaaaaaatgaaaatttattggcaaataaaaagagaaaatccgaaaatgagtgacaaagaaattgcaaaaattatgaaaattgatcaatcgagcgttttaaaatggagaaaaaaaattggagaggaaataaacgaaaaatgaaaatagttgtaaaatttaaaaattatggccttttgttgtctacctt

SEQ ID NO: 23839 - DNA, 1415 bp, Heterodera glycines
gcggcgtctgagaacgtcctcctccacgacgggcgggcgagcgacgactcttcgggcctgacttcttcggcgagcgactaggacgaccacgaccagcagacttcgttgacgcggtggagccgtcacgagctttctgctgaaaaaaggggaaatgaatgagtgacgacggagtaggaatgctgtccgaaaacgtcactttggctgccttttccttcgccgctttctgtgccgcaatccgtgccgagcgtcgcagtggtttggtctcgccagcgctggccgcacgtttcttcgtcttgcgactgcgagcacggcgttgtgatgttgttggcgattccgcagacattttgaacgttttgttgttgaacttgttgacggacgatgctgacgatgatgatgatgattggttgacagatggcaaaatatgtgaacgctaaatgaaatgggtgtaaacaattagaagacaaatggatggttgaaataaaatgggaaaaaactggagggaatggtttttgactcgaaaagtggccatatttatacactttttgagtgtgattttcacagaaaaaggaaaattaatgaaaatttaaaaaatcattggcgtaaaaaaacgccaatgcattcaaatggaaaacaaagtgtacctatatatgtttgataaaattcctaatcataggaaatccagttaactaatgccgggcttgaatgccaagacggggttcaaacttacattttttctatcttcgatggactaaacagctttaaataagcgattgaaagtgattttatgtggtagttttatcgtcagcaaatttttgaaaaaataattaatatttcaaacaacataattttgttcctaataactaggcattcaattatatggaaatccatattttttctggactatgggaggcctgaaacgcacgaaaaacatgtttttagcttggtttgaagcttctaggatgggtttccatatccatatttgtccatattttggcatttttatccatattttatgtccatattttggcatttttccaaaaaacctctaataaaacggccaccaaaaatttatttccatattttgcgattttggtccatattttatggccatatttcgcgattttatatccatatttttggactccctaattgatgacatggaaatgtactcattcatataaatgtatttattcggcaatggtaataaatgaccataaaacatgcataaacagggcaaacatattacaattataaaaaatacacatatatatggcatatttaaatagaacaacaaccatttgtgggagaattacattcagcaagacaatgccacagggatatggacatacaatatatacatacatatatagagatacaatttctctttttttaaatgggggttagtgttattatcg

SEQ ID NO: 23840 - DNA, 855 bp, Heterodera glycines
gagacctctctacgccccccccccccgccgccccctccctcccctcaattgaactaccttctcggccataatgattgactgtcctgcttttggaccaaccaactctcgagaaacagttaatgattgcccaaggcatttgagtgatgactcataaaaactgattgggcggggagggcaatagtaagtgattgacaaagatggttaggcagaatttatgttagaaatataaatcattgaaaaagaggacacagccaaaatggaagaatatttgtccgatcactggcgatttgagtctggcaattccaaaataagaattcactgcctttcggtgttggtcaattcaattactaagaatttgatcattttctcatcgtttgatcgcttttcgatggatttaaattcatttgtcgacgattaattgggcaaattctgttgccgatttttgcgcgtttcaaggtccttttttgcgctaagaatggaatgatcgccccgcccgtcttcttttggaaattgctcattgtcagtcggtcgagcgaatgaaattttttcgatcggcgattggcgcattttgccgaaatgtcataaatgaatttgctggacactcggacaaatgagcacaaaaaattgaatgaaaaatatgggagaaggacggacgccgaaacaaaagggtaaacttttaattaaatgaggtttaaatgcgatggaagtcgaaaatgagcagcggacagtttgatagtagggaagtggacaattggacattaacaacggacaattaagcaataagtgtcagaatgaccattttgacacgaacatttgacaattgtcatttgcagaggacaatttgtcacctttctc

SEQ ID NO: 23841 - DNA, 283 bp, Heterodera glycines
ctgaatttttctctatagttttcccggatgctcctcaaaaagttgtaagacccttccactactttcagggcgctcccggccttcggccgggagaaaatggttttagcaacgaaactccttgtcaatataacgtatatattaactagggtgaccagttggctatggtgtgaacagttttgtttctgttgctgtggggaaagcgcttcgcgctcagggacgcggcttcgccgcgtcgctagaaattgatgtaatttagcaattcatcgcagcctcaggacgggcg

SEQ ID NO: 23842 - DNA, 858 bp, Heterodera glycines
tttgtggggaacattcggccgcttcgcggcctcaggacgggcgcttcgcgcccgttttttaattttttgggggacattcggccgcttcgcggcctcaggacgggcgcttcgcgcccgtctttttatttttttggggatattcggccgcttcgcggcctcaggacgggcgctcccacccctcagaatccccaatttttggaagatttttggtgaaaaaaattttcactcaaaaatactggtcacccccctttggacccgaaacacaaaatcacttttatttctataactttttttaaaaaagtgataaaaagctaaattaaaatttataaaataaacaaaaaattgcgtattttttgagtatattatttttataaaatactttttcagaatggagttaggaatttttttttgaaaaatttaattttttaagaaattatggaataacttttttatttgaaagatagaaattccaaacaaatctcataaaattctcctaattttttgctatttttcaaaccttattacactaaatttgatcaaaaacgaagagagttatgaattttcgaaatttcactggatttcccggggcccaaatagtgacgatttttcaaaaatttgtaaccaccttccaaaaagtctgaaacgcaaaataaagcgtatatacttattcagcagctcaaattatgccataaaaatgcattttggctaatttaggtgcaaaaaaatttttcatgaaatgcaaacccatggggtcccccctttggttttgcatttaaaaattcatttttgttttataactttttttaaattcataataaaaacatgagataaagcacattagattgggcttaaaattct

SEQ ID NO: 23843 - DNA, 1729 bp, Heterodera glycines
aaacaaaaaaatcgattttttcaagtgtccgtttggggtactcaaacatttatggggagcaaaaatccaacgcagaattaaagtacaggctatagggaagctactcccgaaggattcggtctccccataaatctgggcgcatcggttcggggggactgccccgaaaacaaaaaaatcgattttttcaagtgtccgtttggggtactcaaacatttatggggagcaaaaatccaacgcagaattaaagtacagactatagggaagctattcccgaaggattcggtctccccataaatctgggcgcatcggttcggggggactgccccgaaaacaaaaaaatcgattttttcaagtgtccgtttggggtactcaaacatttatggggagcaaaaatccaacgcagaattaaagtacagactatagggaagctattcccgaaggattcggtctccccataaatctgggcgcatcggttcagggggactgccccgaaaacccaaaaaaaaattttttggataaaaattatttaaatgaactgactagataatatttaaaataggttatttcttttcctttcagtatccctgcaaagtttggtgcgcttctgatcagtttctgaaaaaaaagttaagcctaaactttttggcctgtttaaaaaggaattaaaaatttttaaaaattttattcatctccctttttgatagaaaaagcatcagagtgcctaaactaacatgtaaataaaatttggtgcgtttcagaaccctttctgaaaaaatatttaagaattaattttgcaaaaaataaataaaaacgaaagactcagattttcgaaatttttttgagccagctagctcggcgctcatttcagtgtaagttagtcctttaccggggagtatccttgcaaagtttggtacgcttctgctcaattagcaaaaaatatgagtgatcgaattttcactaaaaaagttaagcctacattttttggcatatttaaaaagcaattaaaaaatttttaaaattttattcacctccattattgatagaaaaagcatcagagagccttattaacttgtaaataaaatttggtgcgtttcagaaccctttctgaaaaaatatttatgaattaattttgcaaaaaataaataaaaacgaaagactcagattttcgaaaattttttttgagccagctagctcggcgctcatttcagtgtaagttagtcctttaccggggagtatccctgcatagtttggtacgcttctgctcaattagcaaaaaatatgagtgatcgaattttcactaaaaaagttaagcctacattttttggcatatttaaaaagcaattaaaaaatttttaaaatttaataattttcctgcaccgaaggtactcactcggcctcttcgcggcctcgtggtgggccttcgccccccccctcccacgcccttcagagcacgacaaatatttcaacaaaaattttgaaatcatgtttcccactcccttctcccaggggtattattttgtaaagtctttttttccccaataaacttttcaaaccccatttttcgcaccgtgaatgttatttttattgaattctgaaccggtttgagtagattagactagaaaaaattgaaaattttgaaatcatgtttcccactcccttctcccaggggtattattttgtaaagtctttttttcccccaataaacttgtcaaaccccatttttcgcacc

SEQ ID NO: 23844 - DNA, 1396 bp, Heterodera glycines
cggagtcgttgaaagggcaaatcggacaataaaggagcgcttgtacagatattttacaaagaaagacactcttcgatgggtcgacgtaatagacaaaataataacaaacattaacaacagtgtgaataggacattgggggccaaaccgtcttcaattaattttgaaaatgcccgtgcgctctgggaaaaattatataaggagaaggaatttaaaatttcgaaaaagaaaaaatttaaaatcggtgatatcgttcgtattaccaaggaaaagggaaaattttcaaagggatacctcccaaactttaccgaagaattgtttaaaatcgttgttgccaattcgacgacacccgattcatacaggatcgaagatttggaaggaaatttaataaaaggcatattttataaccaggaattagtgaaaacagatggatgatttttacattgtactaccttcgaacacaccgggaccagggaacagtacatcaaaattcacagttcgactccccgagactttggaattgggcacaaattggtcagtagctctctcatcaattatttacccctactcattcaccgcactcggtataaacggtcaagagtttattaaagtatgggaaaacgacagcagtgtccctactcaagtttatttaccggacatgaattttaaaaccgccgggggcctgggaaataaaattaacgaggcattcacacatcattacaaaatcaaaaaacaacgtggaaagagagaagccaaggctgaagataccaaagattcaaaaattgatgtcgcaaagagggccgcagaacgcgccgggagagacgtagaaagacattttaatcagatcaacaatatatcgaattccatccaaacccaactaaacacactacgagaaacaaatcctcaaattttagaagagcctgatataaaaatttggtttgacaaaatggttgagatgggaaccgaaattcaaacatcccgaaatgaacttaaatcttttcaataagaagtagataaagccaaaaacataacattggagcatgtgaaaaagaatgacatgaaagaagcaaagaaatcagccgacgtcgcaaagggaatcgccagacaggcaaagaccaaatatacatcaactctcgaggaatataatgataaatcggaaaagggttttagcgggatggtggttaggcttaacgaggcgctcggtgagcattttaaacgtaaggaaattgaaaataaagaagtttcagaagctgaaaaagggccgcaaaaaagagagagattagccaatgaggatgttcaatttaactacgacagtattgatccaaaatttaatgtctatctttcctctgccgtcacccatatagatttgtcaaaacacctcgcatatgttctggggtt

SEQ ID NO: 23845 - DNA, 1007 bp, Heterodera glycines
ccccgcccaacccccgccctcgcgaaaagccacccccgccccacggggctcgaaccctacttctgacggcttattttacgacttttgttgcgcattttggcatttttcattcatttttaaatgcttccattttggcatttgcccatattaaatgctgatttttggcatttttgcttgccattaaaatccggacccaattttacgacaaatgcgtagctcaatgcaactgacttaatagaaaaatgctttaccgttacactttttttcgcacttttagcccgtttttttatgttacttttttccatgtacgtcaaacgacgttcgtttatcacaaattaacaaagccgtccatgcggacggattaagagaggacggggaaagaaaaagcctatcaaaaagatttttttatgtttaaatggcacatgaaatggagaagcctcatttaatggtctttatatcaatttataaacttcgttttctcaagaaatgccatacagaaatattgtttaatgcgtgatttttcccatatattttcattttaataattttaatattataaattataacacaagttaaggcatgattttggtgccaaaattcgaagatccgttttctatatttaaaaatatcacgaaaaataatggaccaatatgaaaaaacctcattttcttgtcattaaaaagaattgtgtgaaaattgtccatatttttcaatggagcaattagcgtatttgttttatcgatgttgccatatcgtacgttttgaaaatatttgagatttttatcagttttcccgaaatataaaaaatatattttttaattttatttcctttaaaatgattttttttcccgttcaaaataggtgaacatattttgaaattttcagttttattccaatgcaactccacactgctgagctgaatgaaaatgatgaaaatggttggccaaattttcataaaaatatcatttttgaatattttaattaaatgttttatttttttatagtaa

SEQ ID NO: 23846 - DNA, 1557 bp, Heterodera glycines
tcgtgaaaaattataagggcagatttaaacatgttattcttttaaattttcgtaaaaaatagcgaaatatggaaaataactggacaaaatgtgaaaaatggaataaaaaatatggacaaaaaatgtaacttggaagcgcaaagtaagctaaaaaaatgctcatattcaaattatattgtatcagcaacccctttgtattctatttttttatttgcatttacttacgtagtgtgcactgcacaaaattgtccacttctgtccaaatatgctttactgtccaaacgcccccactgtccaggtgtctactgtccaactgtccggtctcgacacaaaatagagacgtttctaaaaattcaggtttagttagataaattttttcatttttttcgtaaaaatggcgaaatatggacgaaaatgtgaaatatgaaaaaatataccctaaaagcggagtaaaataaatttttaaaaaaatcggcttatgcagtttacgggccacaattttaattcacatttagacaaaaggcgttaaaaaatacagagcaattgaccaagaaccaatcaatacattttaaatggaccgtttcgttttattccgaaatttaatttttaaaaatgtagcccattagctgcatgtgacccaaaagtccttagcgaaatattcgtgagtacatcttataggtatgtcagcctttctggctgttttgttgttttcgatttttccaataatgaagaaatatgtgctcgctcataacacaaaaaagacgtaaacaacaaacagaaaagaaaaaaagactgaattatttattttccaaaaggaattcgtttcgataaattgtttacttttaaatgtattagttacagcgcaaaattaatatatagatagtatgaattttgcaggcttatagcccttatgcctatgccaaaatttaatgaaggcttaaaaatttctcgcccaactttttatgatcactcttgaacaacgtatatttctctctaacaaataagctgatcaatgatcaccagcaataaggggggggcgaaggcccaccacgaggccgcgaagaggccgagtgagtaccttcggtgcaggaaaattattaaattttaaaaattttttaattgctttttaaatatgccaaaaaatgtaggcttaacttttttagtgaaaattcgatcactcatattttttgctaattgagcagaagcgtaccaaactttgcagggatactccccggtaaaggactaacttacactgaaatgagcgccgagctagctggctcaaaaaaattttcgaaaatctgagtctttcgtttttatttattttttgcaaaattaattcttaaatattttttcagaaagggttctgaaacgcaccaaattttatttacatgttagtttaggcactctgatgctttttctatcaaaaagggagatgaataaaatttttaaaaatttttaattcctttttaaacaggccaaaaagtttaggcttaacttttttttcagaaactgatcagaagcgcaccaaactttgcagggatactgaaaggaagagaa

SEQ ID NO: 23847 - DNA, 1087 bp, Heterodera glycines
agattagactagaaaaaattgaaaattttgaaatcatgtctcactaggccttctcccaggggtattattttgtaaagtctctttttccccaataaacttttcaaaccccatttttcgcaccgtgaatgttatttttattgaattctgaaccgttttgagtagattagactagaaaaaattgaaaattttgaaatcatgtttcccactcccttctcccaggggtattattttgtaaagtctttttttcccaataaacttttcaaaccccatttttcgcaccgtgaatgttatttttattgaattctgaaccggtttgagtagattagactagaaaaaattgaaaattttgaaatcatgtttcccactcccttctcccaggggtattattttgtaaagtctttttttccccaataaacttttcaaaccccatttttcgcaccgtgaatgttatttttattgaattctgaaccgttttgagtagattagactagaaaaaattgaaaattttgaaatcatgtttcccactcccttctcccaggggtattattttgtaaagtctttttttccccaataaacttttcaaaccccatttttcgcaccgtgaatgttatttttattgaattctgaaccgttttaagtagattagactagaaaaaattgaaaattttgaaatcatgtttcccactcccttctcccaggggtattattttgtaaagtctttttttccccaataaacttttcaaaccccatttttcgcaccgtgaatgttatttttattgaattctgaaccgttttgagtagattaaactaaaaaaaattgaaaatttgaaatcatgttccccccccctctcccaggggtattattttgtaaagtctttttcccaaaaaaacttttcaaaccccatttttccccccgggaaggttttttttattgaattctgaaccgttttgagtaaaaaaaactaaaaaaaattgaaaattttgaaatcatgttcccccccccttctcccaggggtattatttgtaaaattttttttcccccaaaaaatttttcaccccctttttcccccccggggtggtttttttt

SEQ ID NO: 23848 - DNA, 1528 bp, Heterodera glycines
  unsure (1)..(1528): unsure at all n locations
agcagagatagtcccaggatttggcttcgagggataccgctaattgtaagaacgacgctttttttattctttgttccgctctatttcaaacaaaaagaggcccgaccttaccgataaggccgtcgagataattttactttgttgaaaaaattcaaaaagttattcattggtgcttcagcgacccgtccaaattgcactccgtgttggccaatgtgttgccctcctcgcgctgtctaattgcttttgtgctggccaatgtcgacgcgtgttgggagttaagtccgtttcggctgttccccgcttcacttgttgaacagtttcaaatcacgcacattaagtcggcatttgcaatgccaatttcaaataagtgccacttttcagattcaatccaatcgctgattctttactgacggcagcgatgaaacgcattttccgactgaccgaattaaattgggacgccgagttggccaaacaaattgtcaattgtgcgaatggtttgccctaacctcagcagattctgctcaattctctaacagaattttattggttttgcaggtgacatccgccgggcacttaacactttgcttttttcgttgatcaaaattgacagatcgaaacggattgacgctgaaaattgtctggccaaagagtcattccaacaaaaatcctctttaggtcgaccgaaacaactttctacacaaaaaccgttagaattgttccatttcattggcaaaattctttacgcaaagagaattgaagagaaaagtggtgtcaaaaataaacaaattgagcgatggaaacggacggagcaaaaattgggacaaaaggtgcaattttgccattttagcaatttgaaaaacatttttgagttgtgcgagaaatacggacgaccgatgccccccaaagatgaactgaaccaactgatcgcagcggcaccgatcggagggcaaagtgtcggagggaaatcccatagattggctctaatttaaaatgatcttcagctcattgggtttatttacgagcacgaaccgcgtttttcaccttcactttccgcattgacaaggatcaattcgactattgcctctttggacgtgattaatcgtcaatttggggtggaaaatgaacggatggcggacaaatacgcgatggaagtgagtggcatcgttcgggggagggcaccgtctcggacttcgtgtcatttgggtttctctctgcccgttgtcagattgccgtccgttcttccattttccacaattattctcctgccatcgaaagtgggtgaaaataaagggcggaacctttttctttttttctatagaagcgcacttccgtcgcactttttatcacttggaaaagccccgtttccacgaaatggacgcgcaacggcacgaccagcgaaagcgaatggcggaagggatcggcgcggaccggacggcgcaaatggagnctttgtgnccggggggggggtcttaaaagatgggaaaacatttgtgaagggttgtgccatgtgacgctctgaggtccccgg

SEQ ID NO: 23849 - DNA, 1050 bp, Heterodera glycines
ctattggaaacaaggcatttcgatgtgccaaattctcatgagctgtccaggcacgcaaccatccatcacatccctgtccataattcgcttcctgttcaccagcaattatttggggatgagcaacaacataggaaggaccaatgtaggttaacacaaaatatttgagtaattctaaaatcaggtgaaaaaaaaataataaaaaccctttcatacccaaaatttcaatttcgggagggccaatcaaattgtccatcaaaatgcacaaaaaggtgtacacttcattgattggtacaaaagccagcgattgaagtgatcgaaataaatgtcggtcatccctgttatttttgtaacggttgtacaacccagggagagtttggatgtgtttatgaattgcatttccgaggtgaaaggagcacccttgtaaaattggtctattaaatgattttttattaccggaacctgtaattattgcctggggaaatatttgccggatagcagagagttcggaggcttcaaaatcacacattactcttcccggagaccaattttgaattctgttgcgaatcgactcgaacacacgaatatacccctgcatatgtttggtaggtaaacaagcaaacacacatggaacagcgcatgcatcaaccacgacatgaatggtaaaaagctgcccaaaacccctcggtgcagtctgaaataaccaattaagctttaattttaattcatacgatccttttaaccttaaaagtcccatcaattgctatctcgttacggtaacgatcaagcatttcaattgcactttgtgttgaaaaaactatgattttacgcatttggccaccaatgttgacattttcatttgttatcacatttgcctccaaatgttgaggaatgacccattcaagtggatttatgctgtccagtccttgaaaatagccatttggggaattacatttaggcactcatgtttgggaaacgagaaattttgacgtcccattaaaaattttttacgtgatcactgatcagacactcaaaatcactatgaatatcaaa

SEQ ID NO: 23850 - DNA, 976 bp, Heterodera glycines
ttgtccatttttatcacggggccgatgtgggagataatgtaccggtccagtgattgtgttggatccggcactctttcgattatcccgttcctctcccactcattgaaaattttttggtattcttccaccaaattcaattctctcaatttctttactgtgccacaaagtcttgccctcgcttgttgaaaatttgtcggcaaatcctttactctttcgttccatggtaggccacattcatatcttccttctttgaatgtcaagccctttctgaacgttctcatcacttcttctttgccgttttcctctggattgtcgctcattccaattatgttcagcccgaaaaatgtctttatctgttcttaaatttcttcgtcagcctctcctttgttactggcacattgtaaggcacttatgagtgctccagtgtacgtcacttgcacactcatgtccattgggccctggacttggccatatccacttatcatccgcccgactcgagacgttgacaatgtgaatccacttggcaacttttctgtctcgtctcttattttcaggtcatgtctgacatccattcccaacagaatgtctggttgtcgtggtcgtgatggaagggaaagttttttcttgcttaattccacttaatccttcgaattcagcgttatgatgggcatcgctttcacaatgaattccatttcattgagtgcgcatatatatggatctccgttgactcccagaaatcctacgcggaccacattgctcacgtagcgtttggcttctttctctccgaaacccgtcaaatggcattcttccgtttcaatcaccggaaggcctaattgttttgccacattggcacggatgaatgagcgttcacttccatcatccacaaaaactgatgcgaccatgatttttttcggattgcatggattgaagatggtcacctctgctgtcctcagcagcactctcgaatttccttgca

SEQ ID NO: 23851 - DNA, 1110 bp, Heterodera glycines
atttgaggaggggacttttcgacagtaaagagtaattaagtttctaaattagaggtgtaaaatcgtaaaattttatcgaaaaagcaacaaaattaagccagatcagtattgagataaattatttttaaaatcaaaaattattaccaagaaaataaattagagtgccacgggaccgggacctggtagcggacaactgagtacaattgagtaccaaggtcccggttttgaccgggaccgggactagtctcggttttttcccggttttcccagccaaaaattcacggtttttcaacccgaaaaggtcccggtcccgggtttgcccaaaattcccggtcccgtggcactctaaaataaatagataaattttggagatcaatttttgagaaaatttttcattcttagaggtatatttttgaacacttttggggccgattcttaagagtgttttttctaaaattttcattgtaaaaaatgtaaaaatcgtatccctagtaataatgaattaacaatacattttagtatgttaatttaaaataaatttagtaaaactgacaagcaatataattcattttaactagcgggtgcgtgaaccgtcggatctgggcttgggataaagcgcttcgcgcttcttgagcttcgctacctagattagctctggttgtggagatttggaatttaaaaaaaattatctgggacttttaggccgcttcgcggcctcgaacgggcgcttcgcgcccgttataaaattctccttatttttctctattttaaatgctttattagataaaaattgtacaacattgaagtgagttatgaattttcaaatcatagcccaaaatcccaagggccatcgaaatttttcaaaaataccaccaatcgatagaaatcgaaaaacgatgttttggaagtggtctccgttttcccgggaaaaatcgttaaaaaatcataaaattcaaaaactgaaaaacctacatttaggcctaactcgaaaaattttgaaaattttcgaaattttaaaatttggaaaaatcgagctcatttagttctacaataagtctgctggccaccccccgcttattgttagagcaaagcctaatgagttattcaacg

SEQ ID NO: 23852 - DNA, 1208 bp, Heterodera glycines
  unsure (1)..(1208): unsure at all n locations
ccccccccccccccccccccctcttttcatcgtcccccaaccattgacacttttctgtttccctttttctaaatttttctcccccatttttctttctttctttatccccacacccccttttgctgtttctgcattgcactttgtgttacacttngtgttctcttttcccgtcgaccgttcgtccgtttattcctntgccctcctcaaaaagaccaaagtccatttgtggtgatgagtcacgagagcaacatacaaaacgctcccgagaaaaaaaagttcgtgtgcctcgtggcggcgaattttttgccttttatgacgcgaggaaaggccaaatgccctgaggcaatatttgacgcaaacatcaaaggcaatttgaaaagaagcaaaatgccaacccacgagaagagggccaaaaacaaaaaggaactttttgtcgaatgaataacaaatttcgtcacaaaaatttgcccaaattgcgtgaacaaattatgaatcattaaaaaaatgcgcgaaaattcgcttaataattaatttttgcacgtgctgacgtcagtaaaatgttatgcactttttacaaaaagagaggacgaaacggagaaaggaaagaaagatggaacgaaaaatgatcaaagacgaaacgaacaaatggtattttgggaaaggtcatcggcaatgacgaaaattgtgcaacttttgaacaaattgcataaggaatagcaaagagaataaaataaataaaataaaaaaattaatttttattgaaaattatgacgaaaaaccccccgggcttaagcaaaacgcacctccgtccgttctccgatcagtttgggctgttggatcgcggcgagcatctgatcagactcactcagcacccccttgtggatggccgcgtcgaagtcgcgtctgagctttgccaccgactcttcgctgccaaacttggcactgatcggcaccagtcgatgatgagacgtctcggcaaagcacacaatgcgctcaatttcgcgtagagtctgaaagagcaacagataaaggataaatttggatggaaggtgatttattgtttgatcactgccgatcggttggctacgatcagcagtaaaaagcggcactgacttggatgatcagcgccttctctgtactcatctgctcnaactcgggcgatgaaccgccgcccccggcgtgtccgccaccgcccacgggggacgact

SEQ ID NO: 23853 - DNA, 988 bp, Heterodera glycines
cgtaaaaaattttaaatttaaaagtgtaataaaaattcacttcgatgtattttcaatagcatgacccgcaaaatgaagcgttcaatgtcgagttgcgtcagttacacccggccagcaaatatgaaatttacatctctgcatatggtggaaagggcaaggagctgcgcaagtcacgtcatgtgtgcgccactaccaagagtgattaattcgcacattttccaaaaacaattgcgggatttacatattgacatattcatacacgtttttgttgtcgctgttttaaggcttaaatttttattatttttaaccgatctcgtcttaaagttgtttgttgacatcgtttcgaacgttgcataaaagcaaaagttatgcacgtgtttttaatttttggtttaattttgaaaaattgttttttcaattaagttttttgaaagaacaatcgtttctatgcgtctttcagtgcctaatagcacaattagtgctctatttcgtaattaatctttcgagccaaaactcaaatttttggaccgaaatttgtattattatgcattatttaactctggatttggtacgagtatcgattaaatttttaggaactttgatctaattattgcgataaaaaataaataaggctatcaaccatttgcatttaatttgggcaactgccaatggaattatcccaaaaaccggcaatagtcgcccgggcaggaaggagtgcattggcgtacaaatgtccttatttggttaaggacggactatggtagtcctttgactttcaatcagggttcggatagcatatcatacgcgaaaatcttattcaaatgatttgtgttttttgccagaatgaatttctcgatttaagtgatgtgatttatatttattaaattttttttttgcttatatgcattgaagaaggatatcaaaaaagcaatttctgcattttaattcatttaacgtcataaaaaatatttgggggttttggaaaatg

SEQ ID NO: 23854 - DNA, 916 bp, Heterodera glycines
  unsure (1)..(916): unsure at all n locations
gaagaaggatatcaaaaaaccaatttctgcattaaattcatttaacgtcaataaaaaaatatttggggtttggaaaaatgagttgactgtggatgacctgcgactgcgccgtgttgtgaaaagctttctttcttcctctctttctctctctcactttgtaacatttcgaatttctttttttttgaattttgcgcccacttaaaactagggttgcaaccccgacgtcggggttggaaacatcgggggtcggggttgaccaaatcgttcggggtcgaggtcggggtttttcaatttgtaccttacctacaccatattgtcaaattttttattatttttttctgaaaaaatatttattaatttccagaataataatttatttgtttatattttttagtgaagcgttcctttttttggtttaattacccaagtttgaggtttaattacccaagtttgagattatgtcgaatttgcaacctcccaatcttttaaaaattcatggctcactccagcaaaaattatcagcaaaacgtaccgcggcacacttgacaacatcccctctatcaacaattccaacgaaacgacaacaatttttggacggcgcagcgcaattggacatcgcagcactgctaaccagcactgaagtgtctgaacccgttcgtgcagtcatttgccaactggatgcacttctcaagctcgcggtggacatgcttcatgagacgtcgacccaggacacttgcgcggtactggaggaagaccggagagaacattcggtcgttctgatgggcgtgctggaatcggacagttgcctttcctctacacggcgcncgatttctaaagaacaccaggtattgnacattctcaacgtttggacttgttgagcaatgccgaccaaggtttaccggatgggccaaagaaa

SEQ ID NO: 23855 - DNA, 1828 bp, Heterodera glycines
atccgaagatgataataaagctctccaaatttgtccggttccactttgctccgacgaaattgagctgaaagaattcgagtaaaacaaaatcatccgattgaccatggccgttgcagattcgcaggcgctaagcacaacttcatggccctcacaaatgaattcaaaatcgccatcggagtcgtgatttttggcagtttggtacgccagcagaatccttgcctgaaagacccccccctggacatatttattcacctctaaaatccgtccattggcacaattttttcttactcctttcaatctcgcttgaattgcggcatcttcctcccaaaattcaaccaaatcaacaaacttacgtttgttgtcaagaaaatgttcaaaagtggcaacaactgtccttccgttattgtccaaaatgtggagagttgtctcaatggcgaactcttccatttttatccgatttttaaggaaacaagacgacaatgccgctgcgatgcctttttcagctaaatgaatgtcagttgcggcactgaaggggaattggaacttgggaagggtttcaaattggcctatgagaaatgattttctgatccgaagctttgtcgtgtttggccggcaatatgaagagtccaaactgtccaattgctaagtccggtggtcgatcaatttgaacggttgtggcaaaaatcaatgcgccaatttggagttgctggtgatcgcgtaacgacaattggtgcggatagagccgttgacagacctcaaaaccggggaccgcaaattcaacgtaaaccaaccggttcccttgtttgggatttgttcgaatgtcggaaatgatgctgacgtccttatccgttcgtgacattgtcacttgggcaattgaagtcgcttcggcttcggcgttgatccgttttgaatttgaaatccaatcacggccaacgtttcccaaatttcacttaataaatcattagccacaaagacgaatcccggtctttcgtcttgaccgaaaggaatcacaatgactccgtcctcccaaatttggcaaactaccattttcttaccaccaccgaaattttcctcttcatctgaatcgcgagaatttttctttgaaaattgcccattctcgcctttatccacttcctcattttcaatttcgacttggtcagagtttgacattggatttgggtccatttgggcttccacactcagaactgatgacccgagggccttttcatctccttccacttccatctctccagcattcgccttttcagaagaatcttgaggccctttctcgaccgattcatcatcctgttgggaaatccccaattagcgcccccatggtttcaagcggactcacaattttggcaacaatttctacattcgtttggtcattttcgcccgaatgattgggcaaattcgcctccctctttcaaaactgtcgacccgagggccttttcaatggactccgctgttatgggcacagacttaaattattttcattttttttttgaattttcgttcacctctccggcatttgtgtcttcaagaagacgatcaatcgagtcaggagaaagtgccaacatagcgccgttgtttttgggtgaaagtgccaaaagggattccatctgctgatcaacaagatgagcagtggcagtgcctccggcggctctcgagtccaattcctcatcagaggtcaaatcctcgtactgaatggccgcggccggtggttcgatagacgggggaggagcaggaggaaggtcaggaccaactttgtcctttttcgcctttttatactttttgggcattttgaaatgtttgcttaatttaactt

SEQ ID NO: 23856 - DNA, 2438 bp, Heterodera glycines
  unsure (1)..(2438): unsure at all n locations
tagaaaaattttttcatttcttagggtctatttttgacattttagtgtcgattcataggggtaatattttttcgaaatttttttaagtcgattcttaggggtatattttttcgaaatttttttgggtcgattcttaggggtgtatttttcgttttttattgcatttttgttaataaattctggacaaaacgccaaaataagggcaaaaacttattttaagggcgaacatccaaaataaggatttttaagtgcgaacatcaaaaataaggatttctaaggtcgaataagggcgtgaaaacgcaaattttcagacaaaaaatgtgtttttcgtgtatttctcgttgagttaaagccgcagaaaaaataagtaaaaacttagaaatcccatccctagtaattagtaattactaattagttgattttaaattcatatctgtcgttttttggaatcgaatgtctccctcaactaacaccgacttagtcacgccaaattatattgctgaaattgttggagttaatgagactgtcgccccacaacagcaattgaatttgctggtggaagatgcgctggactgggcccactgctttggccttgtgttacgtacaacggaccataaagaccggtttgcctgcaataattcagcatgttttactctgcccattcttctctaaacaaattttactttttgagtgtttttcaattttaggagcgatgtttgccaagcggctccatttgcgcttttcccatcgcctttcccgcgtaatctttttgacgaagcaatggcggtccaaaaggtcttaaaacatttataaattgatttaacgcaaatcagcatctttcaggatttgaacttgttgtattttcgtatctcgtgggacttggaatttctgaaggaagcacaccaacacgtgatcccttccgatgcattcactcgaaaaatgctcgaaattttggaggatgtgcacagcggtggtgtcaaacagcatatcactctgctcacacaacgcgcggttaattattagcaattggaggggtaaatcaatttttttgcggttttctactcttattgttaggcatttcaattttgcatgtgtttaccatcacatgtacctacatttattcatccatttatgtttttaaggattacatgtgccatgtaacaacaattgatgaccaaacagagacagcgaggcaacagcaattcgagcttaagcaggttctatctgttgtaaaaatctccgcctttaacaatttgtgttttttttcagattgaggtgaataacatagccgttagtatgggcggattggctcagcgtgcttccgttcttcatcgacgcatgttacaaaaaaccagcaaaacgagagtaattgaaaaaattgactcagttttgcctgaaaatcgaccaattgacacactgactgaaggcattcataacgcttggttggacctgttgttttttcatcagtaaaacaaaaattaataatttggcgttatttgtttaggaaacaatttggcgacccaaatgcaattcttttggttgttgtgggcgaagtgaaccaaaaccaattcgatcaacgatttgtggaatatgaaatggagcaaaaaacgacgggacaaatcaaaattgttcgtctcacacttacgcaatgttcgcaaaagtaaaacaaaaggcaaaaacaaatcggaaatcaactaaactaacaataagcatttttcaaattacaggctgaaacttgacccaaaggagtacactcttcatttggacgcccttaaagtcgcggttgtctatttccgggctggttatgcacctgaggattatccaacccaaacggaatgggaggcgagacggaccatcgaacgatcgacggctattgtattaacccaacgcaacgtttaatcttctttcataaacaacagacattcagaaatgcccatggattggtcttcaagtggcaaacacaaaaaaagtccaacaagttggtggattgttttttgtttgtttttttcgaaatttaaatttcaggttcttgatactcccggtgctgtcgaacgttttttcaagggaccagccgatgaacagaaagtggccgcaattcgtcatgtcttcgcaaaaatgtggggattggatcgtgacgatgctgaaacaaacaaagttatgcaagtgagaatttacactttcagtgtctgttatcagtcagttttcgtcttacaaaggatgccattaccagtccccagcgttatgtgttgaagcctcaacttgagggcggaggcggtaaccattttggggaggaaattgtgagcaaattgcgcactttgactcccgctgaacgggctgctttcattttgatggaaaagatacagccactggtagtaaaggtaggcgtttttgactaattcttgnagagnttaaaaaagcgttattttaaaataaaaaaa

SEQ ID NO: 23857 - DNA, 2595 bp, Heterodera glycines
  unsure (1)..(2595): unsure at all n locations
aaagaattcgtttatgaaggtttgttgttacttcagaacatttaaggccaccaattgcagtgccattcacttcaatcttaatttaaattataaaaaattaaaaaattattagtgtaattaattacctgttttaattcatgaattttagagtcttcattctcgttgtcattcttttcacaaagcatataatccttaatggttttttaaattatctttactaaattttaaacaatttttcatttatttctaaattatttattttttataaatttactgctcgttggaaaagcaaagtgagtggttgtttaatgccatcagaatgaacttgatccattatgtcaaaagctgatgatataatttcgtcatgcccaattaggccttggtaaacttcccgcaaaaattcgtaatcgcgcattattcggaaatacaacaaattaaatgcctaaaaataaagaatactttcgaatctgcattggccattaaattttgattttttcgaacttttttgtattcaaatgcattcaaaaacctcctaaaaatgtgccttatttgaactgcaaccagtgataaattaattgctcgtgtgttttaggtagggcccggatttttatgcaggtttagctcgtttgaaatgcacgaaaaacaaattttttgttcaaaaattttgagttttatcgattttattcgaccttaggaatccttattttgagtgttcacccttaaaataagtttttgcccacattttggcgttttgtcctaagaagcgactcaaaaaaaattagaaaaatatattcctaagaatcgaccctacaattttcaaaaatagacacataagagatganaaattttcataaaattttagtctcccaaatttatttttgctcctctgacatgttgcgacgtgaaaacgatctttttccgtttacaaatcatttttagccgacaatcgtatgtcttttactcccgaaaaaattgaaatgtatctcatttgtaactgcaatcagtgaataattctttttggaaaattgttttgttttccaaaattcagttcttgtaaacaaaaaaatgcattgaattatcaaaaattttaaatatttttttatgaaaaattattaaatcgtttaaaaaatgaagggcttattgaataagttatgttaataattaaaattataataaataaataaatatattactgtttgagcattgtacgcttgatcaaaatatgttccagaaaatggcgacggaaaaagcgtaaatggtgccacttgtaacatagcactaaatgaatgaagcttagttgccctttcacatttcaaaaaaccattggagttagccgagtggaatccaggctttctcctaatcaaattctcgatcccattatttccaatccttagtttttattataactaaatggaaattatttgtcttaatgcgaatttcaaaaatatgactcaatatatttcaaatgttgaaattcagaacaaaatcttacaaaaattttaacaaaaaacccaatctcgagttcgatcaaccttacctttgatcaaaaagtttaatcttaagtcccatattttctgcccatcgtttcacttcatcaattagcttctcagtttgaaatgtgtttaattgtttttctatgtcgcccatataagcatttaccgtatattttccttaagttaagcaatttttgtatgataaaaataaataatttatttaagaaaattgtgttggttttttaacactgattaattaataagccataaggcaaatcacacaaaataaatttacacattgttaacgatattttccgtaacaaattgtgaaatactttattgttacggaaaataataattaaaaataaattaatattatggactttaattaaatttttattcgataatcacctgaacttgacgaactaatgtactttccagcggattcatttttgggaggtgccgagtccaaaaaacgaatacccaaaattaaaatcaaaagaatttgtggaaaaacattttcaatattcatattttctaaaatgttgaataaaggtaggaattttaagtacgaataattttttttttaattcttaaaaacaatctaataaatagggcccggatttttatgtttttacatattttttttgcggcttagttatggcgagagaagcccaaaaatagcattatctccgaacaatttttgatttagagcgacttataaaaacataaaaacacatattttggcgttttgtcacataaaatatgttagcacatattttggagtttggcacatattttgcacatattttggcatttttgagaaaaattgcaataaaaatacaagaaaattgaaaaatacaccccctaaaaatcgacttttttcctaattattaacataattttcaaattaaaaaattttttctcgattgtagaaactaatgaaatctcgaattcattaattcgtcattggatttcgaagttctctgctggaactttcaatttatagaaatgatttatcaaaaaaagacaattttaccccaaacacttcgaaatgtatttgatttgcgttgtatgggctaaaaatgataaagaatgagat

SEQ ID NO: 23858 - DNA, 1024 bp, Heterodera glycines
gaaaagcctacggattggcattggccaaaagcgaatttgaaatggcacttaactcagagacccacaaatacgcaacgtaagcaactgctttacgttttgtgaccagcaaagtgtcggttaatttgtcataaaatcgaatgcattcgtattcttcacaagcgaaagacctttcattacgaatggaggggaaaaggaaaaataaagtcgaacaattggaaagtgataatcagtaagtaatcagaaaagaaattgtgaatgattcaatcaatgaaaaactcaccggacagttcgcatcgttgagagaacctatgcgatgagtgaatgaaaagccagcctttttgggacatccccaattcccatgccatccccaattcaatgggtcccatgccatctccaattcccatgccatccccaattcaatgggtcccatgccatctccaattcccatgccatccccaattcaatgggtcccatgccatccccaattcccatgccatccccaattcaatgggtcccatgccatctccaattcccatgccatccccaattcaatgggtcccatgccatctccaattcccgtgcgatccccaattccatttgctgttccctttcagccgacctcttccgccacatcgttggaataagcaaccgcgtcttgagccttttcactcagaaactaaacagacaaatgtccaaaatttggagtgccttctaacatcgtaataaatgccaaagattttcgaggcgaccaaaatgattggaacgacaataaaagggacgagagaaaggcgccagcagagagtcatcataaaaagcatcgaaccgcccatttggacagtgttacgcagaaagactgaagcgacgacgcacagtttgttgaaaagaaagcacaaacaactgactgttcacgttaagagcgattgtatccgacctaaaggagggacggatactgtagtacggtaggatacggtacgcacattgtggtcgtatccgcggtcagtcgcgaagtaatttcgcctgtaaa

SEQ ID NO: 23859 - DNA, 1068 bp, Heterodera glycines
tcaaaagaagagatagtcattttcttgggatatagataaattaaaaaattctctgtgaaattaaatggcgattgcgcaccgccccttcctatcatgctcgagagcatttgtaacgtataaaatttctcaaaataagagatagtcatttttcttggatataagataaatttaaaaattctctgagaaattaaatggcgattgcgcaccgccctccctctcacgctcgagcgcttttgtaacgtataaaatttctcaaaataagagatagtcatttttcttggatataagataaatttaaaaattctctgtgaaattaaatggcgattgcgcaccgcacttcctatcatgctcgagagcatttgtaacgtataaaatttctcaaaataagagatagtcatttttcttggatataagataaatttaaaaattctctgtgaaattaaatggcgattgcgcaccgccctccctctcacgctcgagagcatttgtaacgtataaaatttctcaaaataagagatagtcatttttcttggatataagataaatttaaaaattctctgtgaaattaaatggcgattgcgcaccgccctccctctcacgctcgagcgcttttgtaacgtataaaatttctcaaaataagagatagtcatttttcttggatataagataaatttaaaaattctctgtgaaattaaatggcgattgcgcaccgccctccctctcacgctcgagcgcttttgtaacgtataaaatttctcaaaataagagatagtcatttttcttggatataagataaatttaaaaattctctgtgaaattaaatggcgattgcgcaccgcccttcctatcatgctcgagagcatttgtaacgtataaaatttctcaaaataagagatagtcatttttcttggatataagataaatttaaaaattctctgagaaattaaatggcgattgcgcaccgcacttcctatcatgctcgagagcatttgtaacgtataaaatttctcaaaataagagatagtcatttttcttgggatataagataaatttaaaattctctgagaa

SEQ ID NO: 23860 - DNA, 914 bp, Heterodera glycines
tttgtaaaacaaaagggtcccccctttgtttcaaaaagacccactttccatatagcgccaaatttttttcttttttgaaatttttctgaaaattataataacacttttcggggggtgtttggaggcattgagtacaaatcccatccttttttcgtgaattccggaccccgaatcctaattcgaacatttttctaaaattatttaaaaatttttaaatttctctaaaaacatggttcttagtgttttccgggtcgctgatcacgaacctgacattcattttgaccaataaaaaaaatttcgtgataaatgaaagacatgattgctaaaggatggacttctttttttgaaaattagcatttgaacagcactggcgccggtgccgcgttgacagccgctgccgcactcactgacacttcgacgcccatcggcgcggttgtgtcgcgtggcggtcgtcccgaccttgcaatgaatgtgttggatcgcgtgtgcgcgccaacgcttctcctcgtgggcggcttggacggccaagtgatcggaatgaatgaacgcgcgttgaacgcattggtcaactgcaagcataagaaactgcacattgtgccaggggcaagtaggttttgttccaactaaaaaataggaaacaccggagagctcgtaacgagaatatgcgacatgccgatttttgacaatttttaggccgttgaaattccgattgccaaaatggtcgatgaaaataagaaaaattcggcaattttagtgaaaatttgttaacaaatttcgactaaactttcaaaaaaatttcccctgcggcggtaaaattaaaaatttgactaaaatccacaaaattggtcttttttagctcagattacgtttctcaaaatttcttcggcagcgcctgtcggtcaccgacaaactaa

SEQ ID NO: 23861 - DNA, 1028 bp, Heterodera glycines
gcagcccttcctattataggtagaggcttggattttttttattttttagaaaacacttcaacttagccccctcacagcgaacattttttgattcgggttttagaaaaaaagttacgggcctcgaactgcgagcaaaaacgggaaataagcccctggtactcagttggacaccggaccggaaaatccttatttttcccggatgcgccgtctcaagttacatacctatgccaaatttaagcccggcacctattcccgttcccgagattttggttttagcaacgaaaccccttacctatataaccagggctcccagatctgaggatttatcctcattttgtggctttttgataggtcaatgaggatttttttggaaaatgaggatttgaggatttttgtggctttttgagaaattttgaggatttttgaggcttttggggaaaatccccaaaattttttaaattttgataaattggcataatgtttacaattatttaataatttgggtttttaatagagcatcaaaacgaaaatctcacccaaattttcaaaaaaaatttttctaaattttttataaaaacaagaaaagaaccaattttttcaaaaaaaatacaaaattaataattttttatgaaaatctgttaaaaaaaataaggtcaaaattctcaatttatcccctggcggcgcctgtcggcaccgccagcctttaaaagtcctttattttctataaaatttgctcaaaatcacaaaatttggcatttttgtggacaaatctgttaacaaatcgcattagacgtgttttgaataaattttgtaaaaatgaggctttttgacccaaaatgaggcttttttgcctgccaaatgaggcttttgaaaattttgatctggtagccctgtatataacgtatatataactagcgggtgcatgaaccgttggcattttagctgggaaaaagcgcttcgcgctttgggagcttcgctacctagataagctatgggttgtggagtaattgttggtccagaagatattt

SEQ ID NO: 23862 - DNA, 1737 bp, Heterodera glycines
agccattcctcttcctttaccgatcattacgttactcacccagagttttgcatgtgagaagaaatcaactttttgaacctttatgaatttatgcgaaaaattcccaaccctgtcacttttttccattgcccagtttatttgagaaattttttaagtttcttgttttaattaagaagcaactcttcttttaaagttttattactttatatgattatttcaatgtattttttgtttttatatttttaatgaacattcatatattgtatctatctatctagcatcatttaacatcgctttatccctatttgagaattcggattttaaggcaaatttatttttcagctaacttaggctatcacaaaaaatctgattccctatcagtgataaggaaaattttaagaagaactcagtccattaaacccttttaaacatcgggagtgccaaagtcgacactggatgactcaatgctgcattcatctgtccctcggcgccatttgaacagcccattcagtccccagctaaataattcggcagaataattacaaaattttgacaatttttacttagtgccccaagaattgacgccaagccaatacttgaccagctcgcctttgtccgtgctttcctcgccccatccgattagtttcattgcatgtcctccaatcggttttgtatcgttcttgtgctgataatgattttatgataacatgtattaattttaaatagaattcggaatttaaaccgtttttaacaaaactgttaaattgagaatttttaaatttatttttttttaattgtcatattacttcatatacgctgttggtgcctttgacgacggtatgctaaaaattcaatttcattattaataagattctaaatgcatgataattagggcttatatttatagttgcaaaaactgtaaaatagctaatttttagtttctaaaaaaaccccaaaaggtgctaaaaatggaaaaatagttgctaaaactttcaaattgatgggtgaaaatcgtgaattttatccaaaaccaaaaaaaaaggtgaaatacataagtttttagaaaatttgtcaataaataaataattaaattttagagtgtattttcgtttttattgcatttttgttttaaaatgtgggcaaaacgccaaaataaaaacatgttttccgtttcatatcatagggatgaaaaaactatgaatataagccctaatgataatgcattttttagcattgtttctttttttaaatacctatgctcacgaatctaatttaccgcatcaactgaccagatttttaaacattttattggcaattatacgtataaccattttattccccatatcttaaacccttagattacattttttcattctctcaaaaaaccgtgtcggtattagaccttcccgttcaaaaattatggcaataaaaatttaatggaagtcttcaaattcccaaaatcatatgtgtcaaaaaaacctcgtgaaaaatgacccccacacaaatatccagctggcttacaatggcgttttgactataaaaacggggcggaattaatgacctgggtttttttttgaactatacaattaactgtataataggttgcttttttttgccatttctgtatgtagacctttccttcaattcacataaaatattgtcttaccacataaacattgattcgattgctgctttcaccaatagttgtaaatatcatcatatgcatttacactaatt

SEQ ID NO: 23863 - DNA, 1844 bp, Heterodera glycines
cacatgacgcgttgatctgcgcaataagtgacgacacctctacaccagggttgctgtcgaattttgaaacactcgtagcgacctacgaacagcgagcgggtttcagcaaaaaggcttttgaggtgcgaaatggtgtcattccaattcacttggtccggctgtgtggggctgatcgtgtcccggtatttgttgtactcctcctctccaagtttgccgagaaggagtcgcacttttgaggcctcaggcagagtgcttccgtcgtcctcgatcaattttccgtaccgtttgaaccaactttcaaatgtggtgccgacctccggattgtaattgaatgctgaaagccgagcatcaatagagcttgccaaattggcattgctcaaatttgctggtgcggcgttttgcggtgcggcatttgtgaccatttgttgcagtgcattaagcaattgttgaagctgttgcgcgtccatggtccaattgaagaaaaactgcacacggcagactttaatctcacacggagagaaaagttttgttttttttttgatctgcgaaaattagaaatcaacacgagatttctaattttccaacacgagcaatatcagcacgagataaagcttgaattgttgctttgccggtgatgtgcagttaattgctgactgcgccaaaatttgttatgtccgaagataacaaattaaataagtttatttgccgaagaaaataaaataataaataaatgcagagaatataaattgggaggtcaaaattggtgggcacaatgaacaattgaaatgaggggaatcggagggggaagatgacgaagtggcgttgggtcatacacctaatcaataattacttccttctctaacaattttcatttgtccgacccaatttggaacattctgagtcgtatcaatacattttatcgcaaatttttcatgaataaaaagcaaaacagtgcaacgaatgagcaacttttgtttaggatttgtttagaaaaaaattctttttttcaaaaataaatttcagataccaattttgttatagttggagatgaagaaacttatggctgatcaaaataaacaattgaaaaatgacggatgggggtcgttttggcgcccacgttttggcgcgaagccaaaaattaaaaaaggtaaaaatttgatcaaaaattttacaaaaaaagtgaaaaacttttaccttccaatgggtttttcaaattttcaccctagaattttttttcaaacttcccgattttgactgtgttttatgggtgtagattagagatcaacatgtacctggatccagccctgtatttttcctggatccaggtacaggcacaggccatttttcggcaacctggatttttcctgtacatttattttcctgtacttatgtacagaaaaaataggtacaggccattttttgaaacaggtacaactacggttttttcaaaatgttgatctctagtgtagatcaacatgaaggagtgatatgatcaacttgctgtgaacattttgttggtcaacatgaaaaattgacttatttgttagcaagaattttttcaaatttttctcttcgctatgcttctaaaaatgtcaaaacattttgaatatttttcaactcttaaattttttggtctaaatttcaaaagagttgataaacataaccttcacggtatatttaataaataatagtcactatccctaaatcagaatctggtaaatcattttctcagatttggaccctccatattaaaacatttgataaaccaaaacagatagaaggcctgatctaatatgttcaaaaattgtatttcatttaaatcaagtccgggcttcgcaattgtc

SEQ ID NO: 23864 - DNA, 1063 bp, Heterodera glycines
tgaaatttttaattaccgtgatccgaattttcattaaccattggagaaacataatggactagacactacaccattctattttatgtgttatattaaatttttaggcctcataacttggcccagcggctcagtccctcattcataccggtgcttatttggctctattctcgtttacgcgttcgatcagtgactaagctaaaaatgatgaaattttggtttcttattataattttttcttaatgcaaatatttgctcttttcttgtgtttataaattccctagactttatttaagctttcgattgatattaagaatatatgggtgtgcctcgttccaaggctttgagacccagaaatgattatttaaatttgtcaagcagctaggggaaattggtttctaattaaatcagtaagaaaatattcaaaatttttgtaaatttgaattttaaggtcaagagtgtgagtgttagtcatataaaattgacaaaatacgtagttaaaaactgcccggtcgaataatgattaaaaatgacaaatctgtcgatctacaatatccttgaccattttctttaataattttttgcattttcatttttaaggcatatttattgaccttacggacattttcggacaatatcgggtaaaaataaaaaaatatcgaataatagcaagaaaataaaaaatctaagaaatttataacggacatttttcattagacctaaagaaattttgatcataaaaaattctgatcaaaactttctcagaaccaaccgaataataaagcttgctattattcgatagccctacgtgtcctctattagcctgcaaaatttcaaaaaattttattgagcttaaaaaaagttatggccaaaaatgtgtgaaaacccggtgcctttcgtacttttggccatatctttgctgaacttgaccaaatttattgaaaatttagatgaacttgtagagaaatgttagggctatcgaaagaaccaagaatgcctaaatttggttgaccttgacaaaagttatgagaagttttttgtgaaaatttccatttgatgggttttt

SEQ ID NO: 23865 - DNA, 751 bp, Heterodera glycines
gacactgcggcgtgaagcagggacggacgtggtctcccacctgcacacttcgcactccctcccccaccgattcgacaacccccgcggcctcgtggcccaaaatggagggggaaatgccctcagggtctcttccgctgagagtctgaaatatcggcaaagataattaccacagaataaaacaaaacagcaaactagcacctagtttttatataacgattcagcacctgaattccatccttcaactgcttttttccatcgaccgttccaacattggttttcgaattctgcggggcatctgatgagcaacctcttcgtattgccgaagacacagaagttcatcgtttcagtttatcagcgcgaatgactcgtcaaagttgaagccaagcccaagcatagccagatatttggctttctggttgcttttttgaaacgcttaaattgagttgttcttaatacttgatataaccgtttccagtgaaccggtcgaattaattttaatgtacgtattaagtaagaaaatattaagctataaaaaggcagaatgcaaatagattacaattttttcaaaaagaataagatactttgaaactagagtaaaatcatctccggcatcagaaatctccagagcattgcgcaggcttctatccattgcaggttttcgcagacatcaagaaataaaagaataatccttcttagcgtctcgagtgattccatcgagaccaaaattccggtgatttttttcgttttcatt

SEQ ID NO: 23866 - DNA, 1549 bp, Heterodera glycines
gggctttataaaaaaaagcaacaacaatgaatttgagttaaatgtgctgaatgcagtaagaatattaagtgcaagcaaggcaacacctccaatgcgataaaccaccttaaatcaaaacacaaaacagcgaatatgaggcgaaatatgaagatttgttgaagcataagcgaggttagaaagggacaatcgaaacacccttggtcttaggaagtggcacgttatattaaatgtgcatatgcattggtttttttaaaatttttaagagggtctttcatcattcgacaaaaaagtaattcattggatcgcatgcacccaatcatctttctccgatatcaacaacccgacaacaatcgcactatttatggcaaaccatccgttgcaaaaattgaaggatgtgtcaatttatcgtaaaaaattcttccaatggtctacagaatggtcaaatcaacggtccaaaacgtcggatatttggtctgacacttcaaacgcattcataaagttgtgttttcaatttctttcaatttttttcgtcaaacaatttagtcttacggcacacggaatcagcaaaatatttgtcagaaaatcatttgtactgtctgcggcccacacggaaaacattgtcgtacgcggtgcgttagacagaaatgagctgtaaaaaagcttcttgctaaatgccgccgcattgttgggcactataaacattcaccattggctacaagcattttgaaaagaattcaaaaggatttgggcatctcagttcatacacttttacaggttgtactcccaaatgtacattcaatccaacgcataatttttaataaattaaggacacgccaactcgatggaacgcggcatatcttatgatgcgccgaattgaggagcaacaagaagcattggcacattacgcaattcaaaatcgaaaatttgattttacatttgatggcactgaaagcaatttgatgaataaacttctgaaagttttggatccaatggagcaattaagcagattattctgcctaggaacgtcttcaatttccgttaagtacccgttcacaaaattaacaattcaaaatctggaacaaatggagtttgaaaaccacgacgtaagcgaaatacgggatcaaattgtcgatggattgaagacaaaaatttttggctgtaaagatgaaaggtctaaatagttaacggaattcttagttaatttttttcttagggatcatcaaattgcaatgtttctcgatccgagatttaaagacaaagtttctgactttccggatcttttacggtaaacattgaatacaatcacaacatcacaacaaaattttttgtattactcagacgccaaatttgttcacaactcgaatcattaagggagaaacaattcagtgaggaggtccttccgttgtcaaattctcctatttctaaaaagccgaagggattgcttgatttttttgatcatacgctgtcagcatcgtcagtagtcgagacaaactcacgtaaaaaaaccaattttttttcatttaaattttgagttatagaagagcgaaat

SEQ ID NO: 23867 - DNA, 1583 bp, Heterodera glycines
cattcccattattacattatgaagtgaatgaatgttgtgaccattcttccaaaagccgtgaagaatgacagaaattaaaatcaacaaaggaagaaagagaaaaaggaaagcattggaaaaaacgaaagaaaaatgcaataaaaatgaagggcccaccgcttccaatgcttgcggaatgccaccagcgaaagggtaatcgaacgccgcggcaccaaacggcgcgaaggcacttccccccgtcatcgcttctcccatgccctccgggcagtgctccttcaaaaagtattctttcggatcattgacttctcccccgccccgtacttcggcatccgacatataatctgccggaaaccagccgaagcgaccatccaacttggaaaattccataattacaacgaattaacagagtttagaaccattagattgattgattgacccgcttttcatcatttccttttggcccacctttccaaaaagccattggccgccgatcgaaggcatttccgagtgtggttggtcgatcagctgaatgtaatcccccgcctcgaaactgagaatgttgggctggcgagtgccgtaggaggaaactgcaaccacaaaacgacgccgctaaacgaataattagttaattgctttctccaaccgctgtctctttttttattatgtccctctcatttttttacctttgccccaccgatcacaaagttctcgatcagttttttgacgatggccatttgttgtccactgatcagaatggcaatgttttggcgagtgactattcgcaatgcgttatcgccattctcaagcacaaattcggcaatgtcacaccactcgaagtgatcctggatggtcattttcagctcctcgttgtttacattgggactcgaatggacggagatcagtcggatgccggactcggaaatgcccaaaagctgagcaaaactgacaaaacaaaagaacggagtgactgtttggtcaagcaactgaactcaccgcccacttggtctttcctcaacgacggggaaaaaccggcaaaagtaaagaggccatttgcggacgatgtcgatcagttccaactttacatttgctgggattgtcgcgggtttgtccaaagcatttggcggaacattgaaactgcctgtgggtttttacgtttttttttgaatttgccgcccttttccaatttgacaaacgaagcaattgttgaacagcttcacgctcgtaccgacgaattcgaagctgtcccacctgacgacgacagtcgcggatgatctgaaggaaagcgaacgatcatttggcaacaaagagaatggcctgacctgggcaaaaaccagatcaacctcagaagcatcgtctaacacttcgcccggcacgaacaaatcacggcacagaaccaaactcaaaattaaagtgaaaatgatcaatgttatttagactttattgccctttcctttggctctctctctcttctctctctctcttctctctctatctctgtgtatctcttcctcctctccctccctctctctacctctccctatctctctctcttctctctctcttctctctctctctatctccct

SEQ ID NO: 23868 - DNA, 962 bp, Heterodera glycines
tacccccgatgctaatccttccgcagaccctcttcaaaatttttccattaccgcaagagttgcggaaatggtgaattattctcagaaaaatggctatctctttttaggacaattttctatctcgtacccccgatgctaatccgttccgcagagcctcttcaaaattttttccattaccgcaagagctgcggaaattgtgaattaattctcagaaaaatggctatctctttttaggataattttctatctcgtaaccccgatgctaatccgttccgcagagcctcttcaaaattttttccattaccgcaagagctgcggaaattgtgaattaattctcagaaaaatggctatctctttttaggacaattttctatctcgtaaccccgatgctaatccgttccgcagagcctcttcaaaattttttccattaccgcaagagttgcggaaattgtgaattaattctcagaaaaatggctatctctttttaggacaattttctatctcgtaaccccgatgctaatccgttccgcagagcctcttcaaaattttttccattaccgcaagagttgcggaaattgtgaattaattctcagaaaaatggctatctctttttaggacaattttctatctcgtaaccccgatgctaatccgttccgcagagcctcttcaaaattttttccattaccgcaagagttgcggaaattgtgaattaattctcagaaaaatggctatctctttttaggacaattttctatctcgtaaccccgatgctaatccgttccgcagagcctcttcaaaatttttccattaccgcaagagctgcggaaattgtgaattaattctcagaaaaatggctatctctttttaggacaattttctatctcgtaaccccgatgctaatccgttccgcagagcctcttcaaaattttttccattaccgcaagagttgcggaaattgtgaa

SEQ ID NO: 23869 - DNA, 1509 bp, Heterodera glycines
  unsure (1)..(1509): unsure at all n locations
aaaaattcccggtcccgtgcaactctaatttttatcagccggggcccaactctgttcgagtccggccgaaatatgtgtgcaaaaaaatattgaaatccacataaatccgtgtcctagcaattaaaatcgcttaaatcaatattaaaatttgatgaagaaagatcaaacctgaatgctcaggttggttgtaatttgccggttaatttgtttccttcgagttcagtttttgtccaaatttttatgagcaaggccattttgtagccacaaataattattaatgtataagaaattaaattttcaacaaaactaatcccaaacgcaatttgaatgggaaaataatccttaaaaatatttaatattttattttaatttttcaaaaactctcacatttctttcacaatatatcaaaaaatcgctgatattagcatccaaaatttgttccatttgcttcatttcttcttcattaagcaatttaaatatttttataaacaatttcttttttaaaataaaaaattttaaaaggccgagaaaagtgagggcctcaattaaaaatgtttctaaattattattgtcaggaacgacaaaattattaactaaatttgcggtagagttttttgttggcatttactgccgtcatgttatttgctgaggagttttaagcatttgcggcgcatttttcaagtataaaagaattttatcagaaaaattgaccattttttgttcctgaacaccttgaaatgtatttggtttgttattgtgcgggcgaaaaaaaagaaagagcatttttgagacttttattgaatttagttttttttcaaattatttaaataattttatttttattataacattttaacataattttcgatcaattgttttttttacaaatgcttttttcatcaactagccaatattaacaacaacaatatttacatttacgtgaattactcaaaaccaattaattgttcattatttttattccgcacttaattgttagtcaatttgttttggtccactgcttcacatatactgcttgaaaagggtgggataattttcataattaaattcaaagcgccgcccaatattttcaaattaattaaaaattttataaatgattagtagtattaggacagaaatcttggccccccccctgggaagagagatgcgcattcactataggagagaggagagaaacagagaaaaagagtaatttctaaaagaaggaaaaatgattaaattgtaaagggatccccgaccatagttgtaatacaaaaaacccccagcctaatgatattctcgggtatgttttgcgccactgcgcgagtgttcagccgtttttttgcttttgtgtccccagttaatagatatcaacggaaattatcgatttgtaatttcaagaaaaatgatttggaataaacccccctcggntgttttgtccacataattttagtgcgggaaataaatgactatgaaaatgcccgaataatgattttgattattatttttttt

SEQ ID NO: 23870 - DNA, 1084 bp, Heterodera glycines
aatttacctatgtgcttatgatgcttgaattgaactgcgtttagccggtccaaaaatctttgctttacttaggctccatccaatccctattttccggatccaaaaagcaactttccatctggccaattccgtctggccaaatatatttcactctaacttttttcttagttgatagaattctactaaattatgtatcactcttaacaaggtctatgtattagcttacgaaaaattgcaaagaataccaaactcagactttttttttaattttcaagaaataacttttttttacatttttttaatctcttaacttttcatttcaagccttcaaatggcacaccattcttagttttggcacaaataaaacatcttgaatccaagacagaattgaccccctcccctcgccgaaatgggacggaaatgaggtgggtgcaccacccctaatcaaccacttaatcagcagcggagcaataaagtgactgtgctctgcttactccctgctgctgggtccatccgccacccctacgcccctaaggggctgacactatgctatatataattggggggccacgttgtccctgtgccctgctgatcgatcggtctcgatcttccatttgtctcgagcgatgggagggggggggcaaagcaatacacgggcagagggggggggggggatccgctggcgataaatactcctacatacatgtgtacgcgatggcgacgaggcacccaccaatcactaccacacccaatcagccacttttcctaggccaaaagaggctggaattttgatcaagtaatcagagatttagactatttaaagaaacaagtttaattttctgatctaaattatgccagcaattgtccgtttttttttaaccatccataggaagtgaaaaggtatagaagggtttgacttcgttgccccagcctctcttcatctcttcccgtcttgtctcctccaccttccccatcccccgtttaccagcagcaacagccgtcatcttcatcttcgtcgacggaggaacaggacggcgccgcagggcaatgggatgggaagcaggaagaacacaccttcacatcg

SEQ ID NO: 23871 - DNA, 1816 bp, Heterodera glycines
aaaggttttaaaagctctccttaaatatgaaaaatgcattaaaattatttctttgtttaaaacaaatgtaatctgtcattatgaagtggataaaaatcgatgtaaagtgaaaaagcttgaaaatgagccctcaagcacaaaatttcgacttttgaggccctgtaactcttgaagaaagcaaaatgcatccgtaagattaaaaatccacactagaagtcgaccctgctctatcgaatggtatataacacatatgcattttccgacttacagttcgggtggttcccttgtaagtttttttagaaaaattttgttttttcgagaaatttgatttcctgtccattttgccgctcccatcccattttcccagccaaaatgccaatttaaaacttgttaattgttccagcattttgtctgtctcactttgcctgttcctcctcctcctcctccacttcctcctcctcttccctcgtcccccttttcctcttcctttccccgtcgcttttcctccgcttctttttgtcataaattgtccgaatgtgtcgcttctccttcctccgttttggctttgtcttcgtcggtgttgccggcgcctcctccgcctcattttttttgtctgttcgactccttttactcggtgtcgtcgtcagtttgttcgcctaaagggtgagccaaatttgaaagcgtaaaacattgggccaaaaacttagaaaaaaaatcagcagaggcgctaaatttggcggcacctccgtcggaaacggagaagcccgttcccccttccccccgattttttttaaactgaaagctttttggttttttaaaataatgtttgaaatttttattagagttgagcgggaccgggagctgaacacggacaactgagtaccgaagtcccgatttttcccggttttcccagccaaaaattcccgggttttcaacccgaaaaggtcccggtcccgggtttgcccaaaattcccggtcccgctcagctctaatttttattaaaaaggttattttgttttaaaaacttctttgcacttttttttacaaaaaaaaaatttaagttccaaattttataaataatttatttatttatttactttttactttaaaaagacctataagaatttaaaaaaaaataatttgatcttttaaaaattaaaacagttaaagttgcgaaaggaaacaaaccccactcccgagtagaaaaattttttgtcgcttcggaattattttttcttggaaaattttgctgtattttctgctttttcataattttcgtaaaattaaaaaaatccttaagtttagaattttttaaaaataaacagtatatttttttgagaaatttctaaattttttaaatttttcggggaggaaacacgaaacgactcgggcgggaaataaagtgcaccccaaaaatccaccccgcccacctcgtccagccatgccggtcggccctgctccatgaacagccatgtgtcgttggcgaaataccaaaatttgcggcccgccgagtcgacgcacaacggcttggcgtgcaactgttcgtccgagaatttctgcgagaaaatttttccaattttttccggaaaattatttgttttttaccgtgtccaacccgccgtcctcgtgcacacactgcagcaaatagtccagcaaaagtgcagccaaacgcagcacatccgcaacgaacaggttggacagctggggcttgtcctcgtcggcttaaaaaggaataggggggaaagtttggctaaacgaaattcggatgctccgcggggtggaattccccataaatcattcccccccagccccaaaa

SEQ ID NO: 23872 - DNA, 1964 bp, Heterodera glycines
  unsure (1)..(1964): unsure at all n locations
agattttaaaaaatatttataaaattttattcaattatataaaattttttaaaactcattaactttttaagcagaaatttattaaaattattcgagacttcaactttgaattttcatttccataaaatgcncattagtttattccattctttttgtacggtatctgtagactaaaactacagtatacatcaggacgtgggtaaaactacaaacttttcaacagtaatggacatgctgatcccaaaaaatttcggaaatcgggattggctatcagtccaattaataaggacagtttggataaaaatttaaaaattaaattaataaaagtaaaatatattacagtaagaaagcgttgtcaaaaataataaagatattctgctggtttcattaatattattatataattgcctttttaagagagggacgaaagtttctttttagataattcgatatttaatcttatcttttccaaagcaatttaataattttcggcaaaatgatgaccctaaacggggggcaggcataaaatattaatttacaattggtgttccaaattttaaatgagcaaaattctgacctgaagaagaatgatgcaagcgattgaggggaaaacagcgggaaaatattcaaatctttgaaatcgaaaaagccttttaatttagggctttgaagaaaatagtatttttgcataaaattttctattttccttgttggtgcccctccaagacataactcacccaaatttttattggctcaaaatttagttatttttggacaaaatctgttacaaatcgcattaagaattatataaaaaaaattcatggccgcccctaatcttttattttaaagacaattacctaatcgaaaaaaataattattttttggatttttttcaagacccggttttaccgggtacccggacccggttgaaaatcttggacccggacccggcttttctagacccggcaatatccggacctggtttttcccaaatacccggacctgtgtaacctcaattttaattagaatgaattttctagacattttcttgtttcggcatgcgttttttcacgaatgtcaaatttctttattgttttctcttctctctctccccctcctaccttttccctttctctctttttctctctctcctccctctttctctgccattttctctcctcttccctctctcctttatccctcatcatcgctccgcccactttcccctaaagtgcccttcttctccattcgccctcatttggcaaatatcctcctcctccgttttggcgtggcttgctctaccttcccttccttcgtccttcttcattcttcctcatccctttcctctcccaaatgtgcccaaagattattcacctttttgcccatttaaaagttcccattttccctctgtttttagcacatttttcaataatgggacaactgaactcctatttcttctcgccggaagaccattcgtcgtccgtttgtgctcagcccgtgctgatggagaaggaggaggagggtgaaaagtcgatgaacgacctggtgaccgcttcgtccccaacagaagttcgtcctgcttctcctcccgcttcttcctccgtctccgttccgccatgtgagcctccggcaacgcccacttgcgcaacttcgtccccatttaccgcccaacaattggccactccgtcgtcattctctcctcctccggcacccggttcatctccccccccccctacgtcctcctcccttccgtttcgtcattgccaattttccgttcattataccaaattttcctcgaattaatttctcttaccctatttccccatttttagtacctcattctccccaggggggatttcgggttcctaccagggatggcattccgaggccccaaaaatattggaaatcggaattccgtgcaatccctgattcctaccaggggtggagcacggacagaaaaatcg

SEQ ID NO: 23873 - DNA, 246 bp, Heterodera glycines
aaaaaaaaaaaaaaaaaaaatttttttgtggggggggggggggggggtggggggggggccccccaaaccacaaaacaaacaaaaaaaaaaaaaataatctctccccccccccgggggggggggagggggggggggggggggggctaccccccaccccaaaaaaaaaaaaaaaaaaaaaaaaaaaaaaaaaaaaaaaaaaaaaaaaccccccccccccccccccccccccccccccccccccccccc

SEQ ID NO: 23874 - DNA, 1747 bp, Heterodera glycines
ggaaattgatgcccaaggccgcgccaaagtgctgaatattgtagctactaatatgctcaagttacagtaaatgagcaatagtccagagcagttgggcacatggtttttggagagatgccaatcccattcccatctgcactatgttgggtgcgaaaatggtgagaagcttggatccgggacatggaccggtcagccctctttagggcctacaggtgaattgccatttagcgctcaacccaataacgtgccaacacctggactaagggagggaggagggccatgacgtgcaacgttagggcacttccggtttccattgcattatgcgatgtgtcaactccaattattggaggaaaccaagtgcatgtcggctgacgcaaagaccctaacagactaaaacgcgcctaggtagcgaagctcaagaagcgcgcagcgctttcccaagcgccaccctcgcatgcacacacccgctagttttaaatttaaaattgatttttattataaatattttgataatgaagtagtgtattttgaataaatctcttaaaaaatataaatttgtaggtgagtataaaaaatgttcatcagatcctatgtcgcttttcccacgggtgtaaaaaatttcgtttaaaccacagaattttatatgttaattattattttaaatattatttttcattacaattttttgtttttttaatattgtcaaattacaatgtacatacatttagttttctccttttacgatttattatatttttgtaatttgaagtcttaaatttttatattgcatatttgtcagttattgtttaagggttaataattacttataattaattgcgttaatttagtacagaaattataaataataatttttctcacccttattttcgatatttttatttccataatcgattatatgccttttccgttatctatttaatgtatttatttttcttatttatatataatcatttcatatgactcggtgcttaattttagtttctaatgagatttattagttttgataatttttagtggattatttcgcttttttttcttgtcaagtaatacccgttttactcctgagtatgttgagcatgcttttcattaaaaatcaacaaaaataattaatatcttttaaattaatatttttaaaggaaattatttataatatgattatatagcaatttcataacaatttatttaaatattattacaaattcttaatttatgaattaaaaaaattttaacaatataggtctaaatatgaaaattccccatagtcttttgaaagaaacgcgaaattgccgggggcaataaaaggcatgacgataaatggaaagtggatgaaaatggcaaatggcgaaaagtgaatttgggatgtggctccgctgctgacaaattgaaaagtatggcgaaagtggcaaatgatgagaagtaaacacattaaaaaataataatttggtaaatggaacttattgaacttttgtttactgccagcagaaattaaagctttttatatgttgttaaatttttgtataaaacaagaagttgtattaaaatttatctttttaattatatgttttcattaatttaacttaaattgtttttttaatatatatcataatttaaataatttttaaattattcacccaaatttattattgatatttaaaatttatcaataatatttaaagataacgtatcgtttaaaataagcatttatgaaattttcacatgaaacatt

SEQ ID NO: 23875 - DNA, 1250 bp, Heterodera glycines
ttacgaaacgactcagcacgctctattttatttatttttgaattcatgttttcttgttgacctcatgtttttttactattttttataaatgtgtactaatcgtttttcttttatcttggtgaattattttctttgtatttatatcagttttatatatttatttatcaatgcaaatattaaatataaatgttttttcgttttttggtaaataatgaaaatctattatttatttagtgtaataatttaattcgttagtaagagttaatttttatattatttcatatatttatatacaaatcattttattttttttaaatattttctattgaaatttttacaatataatttctatttttatttttcgttcataacttttgttattttctatacaattggtctatttcgtcacattaagtgcacttaaattattacatcattttttgtatttatttgcgtttatttattttatataaaaataagtaaaacatagaatgttctgataataataaaatgacacggaaagcaacattttcaaacctagtgaaatttgcagccataaacttttaatattttttcagttttcagttttcaatttttcatttgtttttttcaaatctgtgcattttcagcaacttttatttttatttgcaaatctaattgtagttttatgatatgaattttaaaatgtaaattaataaattttcaacttttaaaaaaatcccatttttaaatttaaaacaaataatttttattaaaattctataaattaaaattgccaaaataatcaaattgtttcggttttatttttactttcattttatcctattatttttagatttttattgctatatgaaaaaattagtcccgcattaattaaaataaatttcaaagttttgttaattatttatatgtttttgtatttttaatttaattttagtccactattttttctctttaattaataggcacgaaaagggtgaaaaaatcataaaaaaggcacaaaaattaaaaaagtttattatagtgaatgttcaaaataaatttaatttttttgtataaaaaagatttatttatttggaaatttttaataatttttattttttattttctcgctgataagtagagaccgcattttgaggtatatgccttttttttgcttactagtttcgatatactaagcataaataacacatcttccacttgatttgagctttctacgttgacttttaatatgccgtttttggcatttt

SEQ ID NO: 23876 - DNA, 1622 bp, Heterodera glycines
ttattactatttttaaattcggtttaggatcgtgttgaactctttgccaatgcgaatcctacttcacgacctgctgtcgactcggcaaaaagagagatgcggccacgtcgcggcggcttaaccaaacaatcaactcaactgcggacgatccaaatgcgacaaaaagggctcggtctgctagcgggtaaaccgaaaaacgcacgattttcattttcggcatgtttttttagccgtcgtcgttctgtcaaaatggttgatgcactgattgaaatgtacgagcaagacggagcaaacggaggaactgcagaagaaagaagaggaagaatcgggcaaaaattaaaaaatttgtgaaattataaaatcggttgtttttttgtttgttttgttttggtctttttcaattatcgtgctgatcggatgcgtgagattaacaagtgcatgggtggtctgcaaaactttcaggatttgggcaccaatgttgcatcgagaaaaccttgatgtccgtgggtagcgaatggtgttcgcgcgtctgcgcgacaatgtacggcacttgcttgtcaccgaccgcctgcttcttcaccttgcacagtctgtactggccttcacgactttggattcggtggatgacaaattgttgtttgcaaatgatgcgcacctcatttttaaaagacagcacaaaaagtttgaaatggtacaaaaatcagagactgtcaaatgccataaacgaacaaaaaaaaagaatttgggatcctattgtttacagaaacaaaacaaaaaaacatcgtatcaacagaaaaaacaaaaattggagatcgggcaattcctcctattcatcaattgatctgtccagcgaccggcggcggcaccaaaaaaaagttcgagttgggcaccattgtgaatgtgtatgggcccaccaccgatgatgatcaaattgtttggcaaaatttgccctaaatgaaaaaaattatgactttctatgacaaatggactctaccggcgaaacgcaaaaacatttgatgcgctggttggttgagagcatgcgacagacgccctttgagtgatgcgatgttttcacttatcccgatgggataccataacaagtcaccgttgtacataatgcgcacagaaaaattttccattttttataatttgttgcttgaaaaacgttaaaaaaaatcatatttgttaaacatcatagttaaatcattgggttttacagaatctgttcagacccaaccgcgttttttaactcaagaaacccctaccacagggacacctaaacttataattagagagcgaaccggactggacccggtaccggatttttctggacccgaaatccggtccggcgattttttgggattgattggtgtgtgtttgagcttaaatcttgagttccctcagttacaacaattggattaaatagattgaccggcttttggtagaccgaatccgatcgtttttgaaaatgccaatccggtctggtccagcgaatttttgaacggattttccgggcaatcatggagtttactagtccatgattgactgattgaaaataattttatcaggtaaaaaagacaaattaagccccgaacagtttatttgtaattgttttggcggaa

SEQ ID NO: 23877 - DNA, 1763 bp, Heterodera glycines
tttctcgagtaaatgtcaatttctgtggagttgcactactgtagcgatggacagcgacggccaccaaatatttgtcgtccaaaataagtgagaaatccttcggatggagcttcagccttaattttttatttttggtattaagcctagaattagtaaattccaataaaaaattaacaatttcgaaattcaatttcgaaattcaccgaccggttaatggcttcgcgcagaatgaggaaaacgcactttgtttgtccgttcgaaattcgcgccacctcattttggacttggcgcgattcaattaagcgtgtgtcgaaaggagaagagtgaagaaagaggatcaccgcctcgctgttaccgaactcattccttaatataagacatttagattaattaattatttcagaaagtccaataaaaaaatatttttagaaaaatttttataaataaaagaaagttttattagctcctggagatataatcatttgtgccattttcgctgattgactatactatgggcgacacatttaaattatcacattggcaaattctatcaaaataaactgaaaaatggattcgatatccggcaataaatcaaggaacttttcgttttatttcaaccctaccaaaaaatatctatggtagttttatgtgctatatggtcaataaataaattataatctttgcttttaccatgccatgtgcagtgtcttggccaccattgtgtccgtgtgattaggcggaagcgcccgaggcgtaatgtcggcattggccatggaaaggacatgctgatgaagcatagtgacacgggacgaagtgccaaggccgccaattggccggcattaacttccaccagaaaaagtaataataaatgataaagaaaaacgaaattaccttagaatgttagtccaatttacccaatttttgaaaataaaattcaattgttacctgctttaattccaatttcttctcattgttctcttcactttcatgtgtcatataatcctaaaataaattaaatgtttactaaatttatattcaatttaatttaaataattaataaattgaatgtctatttaaatttaaattcaattatttcttaccgctcgttggcaaaacaaaatcagcggctgtttgaatccgtctttataacaattttctatgaagttaacagttcgtcgaaattcctctgttatgttgcagtgcatatccttcagaaagtcaaagtcgcgcattgcgcggaagtacagtaattgcagtgactgaaaagtaaaattgaatacggtttgctatgaaaatcgttttaaaataaggctaaaatttagtaatttcaaagaaaaatttggtaaattttggctggtttcttttattctgcatttataaattaagcttgcgtaaaacgcgttaatgaaacgtttagagctcggcctggaactggatccaggcctggatttttcctgaatccaggtccaggtcatttttcggcaacctggatttttcctggatttttgtccaggaaatccaggtccaatgtgaaaaaaaatccaggtccaggtccaggcaaaacacgaaaaacctggattttcctggacaaaattttagaatttattatttcaagtgaccgatgttttttttaattttcaaaaaaagattaaattaatttaaaaatacattattattattaagtagatatttttagatgtttctaagcaatcacttaattttttcaaactttttttgatttttaagatgagtttcaaaaaatc

SEQ ID NO: 23878 - DNA, 1798 bp, Heterodera glycines
ataattagaaaaattgtttaattaactttagggatttgtaattcttcttttcaacaaaaattttgaaaatttttctccataattatcattttattgcatttaatgtcgattttttaaaatttttataaatgatttttagttttttttagtatcacaattctgaatgattttttgatatattttatttcccaatttggctttgctctgtgtttctgttcgatgactttcaatttcattggtgtcggttggatcagtcggcccaaacactcaaaaaaaacgaacggagagaaataaataaaaaataaaatataaacaaataaaatggaaaaaggcaccgaaaagggagcacaattggaattattacataacataacttatcaatttgatatgaaaaaacttatgtttgcttttgtcgtatatttaaaaattcgaaattccaataaaacattttttggattgactaacaaataaatgggcaaacaaaacattggccatggttttgggggtgaaaatcggttgctgatcggacggatccgcgcaaaaatgaattgttaccatttttaattgtttttcactttcttattttttctctttttaagtgaaaataaattgttatcaaaattaaaatgcgtttacaaatgctccatttgcccgtatttcttctccttttctttccaattttttgttttggagtttggcaaaagttcgaacggcccattgaaatggcagtgccaaattcggtgacaaaaaaaatgattatgaatttaatcaaatgaaaatacatgcgatcaggatggcatatatgaattcgatctgaccgtgaagcattctctaacaatgagcgtgccaacggcgggcgacaaactcagcctgatcgattacctgcctgaaaaagttgtccgaatgaaatttaaagtttgcttattttatttttgaagcaaatttggatgccccgcgggaataatcgcacgtcatttggggacgaccaaattcaaaaattgttgcaatgggacggaatgcatcggcgaattgtgaccatcaacggggaaaggtaataatggggattaatactccgttaatcttgcatttttttctcattatttacgctctgaacatgctcctccctccgtttcagtcccggcccccttttggtcgttccgttcggagctcgcgttgcgatgcgcgtgcgcaaccgcctccgcgccgaagcgttgacgagtgagtgggtgaaaatggtgctaggtcgttttttaagtccgccaagggggaggaaaacaaaaaatgtaagacatataaattgataacttggcttaaattcgattaaattaatagtttcatggtatcattcaatagctttattgttccttatcagaatattaatttataattttttttttaattataaaaaagttatgaatttatatgtcttacatttttttgttttcctacccattgacggaatttaagaaacatgagctaacaaaagcaattagtgaactgcgcggtaatgggccgattgaaccacttttagcattgttttagttcacttacacggaatggacaaacgaaacgcgtggtaaaaagaagaaaaagtggcaaaggaaacggaaaatgccatttgttattacagcatttcgattgagtttatgtaattattgttcaggtggacggacggagtggcctttgtgcaacaatgtccaattcagccccttactgagtgagtattttccattgataaattagccaattaatggcaaaagagtgccattttccattttagcttcgtttaccgtttcat

SEQ ID NO: 23879 - DNA, 1523 bp, Heterodera glycines
  unsure (1)..(1523): unsure at all n locations
caaactacaacaacgtcctcctgcaccttcctccacgtgaagactactgcccaaaccaaaagaagatggcggacctgcagaaatttgaagactggtacaataacaactatgaacaatgcttcgaccttaaagaaaaattacccgaatactgctgcaatgacgtccaaatccttatccacgctctcgtggaactgcgcagggaattcaaacaacttacacaacggcacggaaaacacggaggaatcgacattatttgccaagccattaccatcgccagcgcctgcgtcaaaaattatgcactcaatcacttgaaaccaaactcactcgccatcgtcccggaaaaaggctacactcctcaacaaaatcaaatcgctctggccatcaaatacctcgactggtactcccatatcaataacgtcaacattcaaacggcacattccctttacggcgaatatgtgtttaagcgtgaaggacagatataccaagtggacggctacataaaaggcacaaatgggaagcgggacaaaattatagaggtgaatgggtgtctgtggcacggctgcgaggagtgttttgaggagatggacgacgaaaagatgtcaaacggaaagacgctgcgggagattagggaaagggaagagaagaaacatgaaatattaagccgttacgtcgacttggaggttatttgggaacacgaaataaatgagaagctgaaaaaggacacagcaatgagggagtttttcgacaactggaaggaccgctcgccaatcaaaatcagagacgcttttcatggaggacggacaggaccaatgaagctactccacacagcaaaaccgggacaaaaaatcagctacaaggacttcaccagcctctacccgtggaccaatttctctacagactatcccctcggccaccctaaaatcatcagtatcccaccaaatgagcagacggtcaactggcgctctccatccgacaacccctacaaaggtctgctcaaagtgctacttctacctccaaacaacaacatcaacgtcactgttatgcccataaaatttgatcaacgcctcctcttccctctctgtgagaagtgcgccaaatacatcacagcaaaatatcccaatggcctcaaagacaacgactattcctgcccacacttcaaccctaacgaccgcgcctttgtatcaacctgcactcatcttgagttaaacgcagcactggaagccggctacacagtccgcaaagtcttccacgtcctccaatacgaccaatggagcgacaatgtcttcaagtcttacgtgagtgaaatgatggccctgaagatccacgcaaccggcttcccgtcatggtgcagcagcgaagaggagaagagtgaatacattgaggagtgctggatgaaatttggaattcatctggagaagagaagatgaaagctgaaccggggaagcggtacatcgccaagctctgcctcaactcactttgnggccgcttctccatgangaatctactttcgaaggcgtaaatca

SEQ ID NO: 23880 - DNA, 1021 bp, Heterodera glycines
aagaaattccagttctgtctcgaagattgacttaattttcggaattttcatcacaaaaaggtcaaattttgccttaaaaagggtaaaaaagtcatgaaaaaagtcacaaaaacgcaaaaaaggcataaaaatcccaaaaagtataaaaaagtcaaaaaaagtcacaaaaaaatgtatgttagaagcttcaaacaaagtgtagaacccctttgaagtcattttaaggtcatttagagtcagcaaaaaaagtcatttgacttaaattcccatccctattcattcctttgttccgagaaaagaagggcaaacaaaaaatcttttcacaaattcaattttatgaatgttattgagaaatttaagtttaatatagtttaatatttatttggttgctaaattagagaatacaattagctaattgctggacaataatcaaaaaatgaactcctcaatcatttcatcccattcagtcactcatcattagggtcgcgatttctagtgatttcactatttgattactcaattgttttgaagaaaggagcacaaaaaacgcattctgctttgaaatcttttcgtttgaacgtcaattttcgtcataaaaaccaaaaatacacccctaagaatcgacatacgatgaaaaatttcttaaaaattcattcgaaaaatttattcatatattttcatgtgagaaattttagattttcaaaaattatttatctcaagacttagcttaattttgttacttttttgaataaattttcttattttacaccccctaaaggctgaaaattttgtcacgatttcgtcactatttggcatttgtcctcactattttagttaactatttcgagatttttcgtaactaaaagtcgcgaacctactcatcaactcatcattcagtgtttgtgtgagccggtcaatccgggcatggaaatcacactgttcgtgccagtctcatttcgttgggagtggtctccttgaattgtacggaataattaattagtgacaaattcacaaaaataat

SEQ ID NO: 23881 - DNA, 1650 bp, Heterodera glycines
  unsure (1)..(1650): unsure at all n locations
gagtcccagagatgaantgctgtgggttgagtcncagtgtctgaatgccagagatttgagttccagtgatgganagcctgagaattgagtcccagagattgaaatgctggtgggttgagtcccagtgtctggaatgccggagatttgagtcaccgagattgaaatgctggtgggttgagtcccagagattgaaatgctggtgggttgagtcccagagattggaatgccaatgaaagttggtgggttgagtcccagtgtttggaatgccggagatttgagtcccagagattgaaatgttggtgggttgagtcccagcgattggaaagcctgagaattgagtctcagagcttgaaatgctggtgggttgagtcccagagattggaatgacattgaaatgctggtgggttgagtcccagtgtctggaatgccggagatttgagtcccagagattggaatgccggagaattgagtcccattattggaatgctggtggcctgattttcagtgatttgaatgtcattgaaagttggtgggttgagtcccagtgtttggaatgctggagatttcattgtttggaatgtcggagaattgagtcccagagattgaaatgctgctgggttgagtcccagtattggaatgctggtggcttgattttcagtgattggaatgtcattgaaagttggtgggttgagtcccagtgtttagaatgccggagatttgagtcccattgtttggaatgccggagatttgagtcccagagattgaaatgcttgtgggttgagtcccagcgattggaaagcctgcgaattgagtctcagagattgaaatgctggtgggttgatttttagtgattggaatgtcattgaaagttggtgggttgagtcccagtgtttggaatgccggagatttcattgtttggaatgccggagaattgagtcccagagattgaaatgctggtgggttgagtccaagtattggaatgctggtggcttgattttcagtgattggaatgtcattgaaagttggtgggttgagtcccagtgtttggaatgccggagatttgagtcccagtgtctggaatgccagagatttgagttccagtgattggaaagcctgagaattgagtcccagagattgaaatgctggtgggttgagtcccagtgtctggaatgccggagatttgagtcaccgagattgaaatgctggtgggttgagtcccagagattgaaatgctggtgggttgagtcccagagattggaatgccaatgaaagttggtgggttgagtcccagtgtttggaattccggagatttgagtcccagagattgaaatgttggtgggttgagtcccagcgattggaaagcctgagaattgagtctcagagcttgaaatgctagtgggttgagtcccagagattggaatgacattgaaatgctggtgggttgagtcccagtgtctggaatgccggagatttgagtcccagagattgaaatgctggtgtgttgagtcccagagattgaaatgctggtgggttgagtctcagagattgaaatgctgctggtgggttgagtcccagagattggaatgccattgaaagttggtgggttgagtccacagtgtctggaatgccggagatttgagtcccagacat

SEQ ID NO: 23882 - DNA, 1544 bp, Heterodera glycines
  unsure (1)..(1544): unsure at all n locations
tgaactttcgttgtttctgtggcccatccatctatccatcattgttattctgtttttcccacaattgccaaattattggccaattattaattaattaattaatttatttagcctttccaagaatggaaaacggagtgacaaagtgttgttacagcgccattccgaacaatgatcggacagtagcagaaaatgagcaaggaaatgggcgggaaatgagtagcgacggtgatcaaacgggagcagcaaaaggcatttccatgggcaaagggacggcggcgccgtttcgcgccgctgaacgccgtccgatacgttttgccaattttggaatgggcgccagcctacagtattcgtgccaatttgcacagtgacttggtcaccggactgaccgttggcattatggtagtgccacaaggtccaattgatcatgagcgaaatttatttaaatatcaataattttacatttttaaatttaaaatgtttaaatttaagggatggcttatgccactttggccggcgtcgacccggtttatggcctttattcatgctttttcagtgcattattctacatgttttttggcacttccaggcacatttcaattggtccgtttttggcttttgtattttttaaattaataataattgtaatttatgtttttaaatgactttcggttgaatttattaattgccataatataaacattcgtaattatcggcaatcataatttcttttatcaaaccacttaagatggataattaattaggtggctacttatgaatttactttatattttaaaatttaaaatattaaattttatttccccttaggcacttttgccgttgccagtatgatggtgggcagtgtttgcgcaaaatttttgtcacccaattcaaacaacaacggcacatcggctccggagacgattatcggaaacgatgacatttttttggacgatcaaatcactccgctggtgttgaccagcacattgacattcggggttggctgttttcaggtcactcattcaatttaattaattaataattttaatacatttttataaattttgaattgttcttagttgtttaaaatataattgaataaaaaatattttaaccgataaaaaatgttttgcgttttgtctttttttgttatttattaatttcgtttatattttttgtattaattttaatttttaaatttattttttcctttttttaaatttatttccaaatgttttctccattttctctctattcagctcctttttgccctctttcgcctttcctctttgaccgattatttctccgattcgctcatttccggctttaccaccggcgccgctgtccacgtgctcacttctcagatggacaagctgatcggtgtcaaaatcaatcggtacagcggagttggcatggtcattttggtgagaaattattattttttattttttaactttggccatgattntgggctaatttgctttgtctccgcttgtcagatgtgggcgtgagttggccttggcttctccccgggccacctttttgac

SEQ ID NO: 23883 - DNA, 1164 bp, Heterodera glycines
tttattatgcattttttcatttttgggactttcgtgcattaaatgccttttttgtcattttccttttatggcgtttttttccgaaaaattccattataaaatggaataaaattagggaaaatatacccctaagaaatgacctgactcgaaaaatttcagaaaatacacaattaagttttgaaaaaaaaactttctcaaaattgatcggcaaaatttcactacttttcttgataaaaattttaggtttgaaaattgttcttaatcgaaaaacattataaaatatttaatatcatttaaatgaatgagacaaaaacattttggttaagttttttaggaaccggaggccggcggtgcctataggcgccgccgggaaaattttttgaagcttagagtggatttgttaacagattttcatcaaaaatggccgaattttgcccttttgagcgaattttttaataaaaatgggatttttgggatcctacggtgccggtaggcaccgccggggaaatgttaatgaaattttcaaaatttgcgaaccccccccccctcgctgcgaaccccctcctccacctcttttacacccccccccttcagagcgaaaaaaatgtatgatattaattaatgttaaatctgaagtccattgttcgagcctgggggtgaacctacaccgatttaatccgatgaacttaccccgttttggagcaaaatgaggttaagaaacagcctagctgttttgccgttagagtcatcaaagatgtgaatgcgcagctataaaaagacatttttgattgagaacatttttgttattccattattttttgctcattgacattaatagacgtcgaccaaaatttcaaaaaatatattaacttaacaaattttataagtgtctgatcgcccgaccctttccgacttagtttttgaagtcagcagaaacatcgaccgacaagtggacgcagcgaattgagctcggaatttcgtgcactataaaaattttgaagattcgatcatacaattctcttttttcgattcattcaatatttaaaaatatcattatttttcgtgaaaattgttatttatttatgcgattctggtaaagtattaatgaatttcgtattttgaagccttaagaatgtaattttaagactttttcgctaattttta

SEQ ID NO: 23884 - DNA, 1509 bp, Heterodera glycines
tctaaaaattaaatttataatgaaattaaggcttccacacttcgtaagatgatgacattgaaaaagaaattaaggaatttctcgcgctggaaattgcgaacccagaagcggacccgttggacgaatggaagaaaattgctccccgattttcaatccttgccaaatttgcggaaaaatatctttcagcacctgccaccagtgtcccaagtgaacaaacattcaaagtcgcccgtgatgtttttgattatcgccgttccaaattatcaccagaaactgcagaacagcttatttttctgaacaaatctcttccccagatgaattacaattattgaatcaatttttctgttgattttattaaaattgttaaatttctacatataattgatgaaattttgtgggttttttcccaaattaacatgcgaaaatttaaatttttaccaacccggaaaccggtgccgggcccggcaatttgaaaatccggtttgaccggtttttgagagaccgggcccggaaaccggttgcttctgaaaaagtcagcccggcccggcccggcagatttggaaaatccggtctctactagttattatgtggcgataaattagggattattcaatatttgagcattttacattttatttgccttagggaatttatcataactgttttaagcaaaaaaataagcaaattttataaaatttatttgatttaataaaattacttaccatcacttaaaatacacgaatttgtttctgtgcaagtgaacgttcgctgactatttactatacggcgaaaaaattgtttacatccttaagcaacaaattgtttactcattaattaataattatattttagtgaaatgcttgaaagttcatttttattcttaccattgcaactttgcacattgtaatatttgaacgctgcacctcgtccacaaattaaacatttttttggtgtttttggttgctttttgtaaatccttttttgtttgattggttccgccgcgtccatttcgaaataggatttttcgtgatttaaataaatttcaatttatctaagcatatattatttatctaggttctgataatttctcattcaatctgcactattaacatagagatatataaaatggaaattaataaaaaaaataaaagaaagtgaattcattttttcgtctttcctaaaattatcaacagcattatctgatgctaaattgatttttttacgaaaaatgtgtccttaagctgaatattactatcgaaaataggttagccatattgtgatgctcggtttgcatgatccggaaaattccgggaccattccaggacatttattcggattgtccatataaataccataccagcataaacttgtattggttagggttaataatattttacatcttttattaaaatgatttcccttctacaaatgtcatcatcattttggtggcacttctgctcgaattccgaagctcaaaaattttaatctcaaaagctcggagtccgcaat

SEQ ID NO: 23885 - DNA, 943 bp, Heterodera glycines
agccggcacactcgcggattttggccgctatcttctcacctgaaacaaaatcagccctttatagggaacaaaaaattaaacttgttaatttcgtaaaagtcccccatattttccaataaaataggattttttgctgaattttaggtgaaatataacatatatttttaaatattcataataaaagccttaattttccaggcggcgccttttaagccgaggtgttgctgggagtccccgacttctcactctcactttcgtgtatggattggatgggaatgaggcaatttagtacatttgttcaataaaactaattgttaaacaatgcttctttttaaatttcgtttattcgacctttttatctaatttaaatttatttgtataaaacaagaaatgataactttccaaagaaaaacccgaaccatcgaaacgcaataatatttttcgaatgataccatgatttgttggttggttaacaaaactattaaaaggtctttaaaaatagttattcttttagcactttaagtttaaatattaatgttagaaaaatgggtttttttgatgcaatgacagaaggaagtaggagaaaggggagaaacatacagtgcataagggggggggggtcgaccccgagggcccgaaaaggggggggggcttgcaggggcgtatctagaaacatttttcgggggagggggacccgacctgaagacctttttttttttgctatttaaccataacttttttccactgctggttaaaaactgcactttttcactaaaaatgacccaattttggctttttaaggcaaaaaacttgtaaaaatagtggaaagtggaggtccggcggtgccgataggcgccgccgggaaaaatttttggaactttgagtgctatttgttacgaaatttgcctattaaactttttaattttcgtttggggggagggaa

SEQ ID NO: 23886 - DNA, 1466 bp, Heterodera glycines
aaaatatatatatatatatacataataagtggataagaacatataaaattagaaagaaaattataataatgaaaaaatattttattaattctttttccacaattttccttcgtaaatcgatgttcgtcagtcagcacatccgccaacgaaaatccaactcatcattttgcaaaaaaatttatttatcattttgtaaattattaaaattaaaaaagcataaatcttgcggaaaataaaatgcctacctcataagataaattttgaattttcgaatgaccacaattaatttatttattaaaattacgtccataaagatctgaaaaaatttattcgcaaatgtaaatttgcattaatgacaattaattatgtaattaattgagtgatgagttgtaataaaagcgtttccattttcgcgcatttcccaaaacattcgttttgcttctccgccggtgttcagcagccgcagtcgaagcacaaagggatcggaatgcacggaatgcagcagcagcacggcacacagcgcgggccgctgtccctctccacgtaacgacgttcgtaccttaagcaatttggcagtgcctaattaggcagctaatgagtgcgcttaattggttttaaaaatggacgatttttgtttaaaaaaacaatttgcctcaaattccttcctatccctactgattaatttaatttcaaattgtttaacaattggcacttacaccaccgggggaggcggatttgggtagtattggtaattctaaacaaaatccaattggtttatgccattgcgaaaagtttcgattaattaattgcctggcgttgaggctgttccgtgtacgtgtgctgctgcatgatcaaatgcttcaacaaaataaattttctggaattgtacaaaatgtaaaaagttttcatttgtcagaaaatttatcacaattaaattctttggcttagaaaacacaaaattttcaaatttatctaaacttttcaaaaccgagcctttgaaaattctaaaccgaagccctgtttatgaaatttttttcaattttaagaatttaacatttagacaattcttaaaatctcttaattaatgggctaattaattattacaaatttaatttggcagggaaaaagaaacgaaaaaagaataaatgaaccgttcaaataaaaatgctgaaagagatttgtcggcgctatattaaaagtgggtctttttgaaacaaaaggggggacccttttgttttgcaaaatttttttaagataaaaaaccatgataattttttatccggggttttaaaggtcgctaatcacgaatctgacatgtattttgactaattttaatccctaacccgaactcgaataaaaatcggaattttgaatttttcaaattatgattttttgttcaaattgagattaggaaatcggaattgatcaaaataattgaaggattcgtgatcggggaccccaaaaac

SEQ ID NO: 23887 - DNA, 1004 bp, Heterodera glycines
atcagcccacaaaaagaggtcactaaatttgtattccaaatatcattatcaccctctctcatagccaccacggcacatcgttaagctttagcgttcttcttaaattctctggagctgcgatcagcccgcaaaagaggtcactaaatttgtcttccaaatataattatcaccctctctcatagccaccgcggcacatccttaaactttagcgtgcttcttaaattctctggagctgcgatcagcccacaaaagaggtcactaaatttgtattccaaatatcattatcaccctctctcatagccaccgcggcacatcgttaagctttagcgttcttcttaaattctctggagctgcgatcagcccgcaaaagaggtcactaaatttgtcttccaaatataattatcaccctctctcatagccaccgcggctcatcgttaaactttagcgtgcttcttaaattctctggagctgcgatcagcccacaaaagaggtcactaaatttgtattccaaatataattatcaccctctctcatagccaccgcggcacatcgttaagctttagcgtgcttcttaaattctctggagctgcgatcagcccgcaaaagaggtcactaaatttgtcttccaaatataattatcaccctctctcatagccaccgcggcacatcgttaagctttagcgtgcttcttaaattctctggagctgcgatcagcccacaaaagaggtcactaaatttgtattccaaatataattatcaccctctctcatagccaccgcggcacatcgttaagctttagcgtgcttcttaaattctctggagctgcgatcagcccacaaaagaggtcactaaatttgtattccaaatataattatcaccctctctcatagccaccgcggcacatcgttaagctttagcgtgcttcttaaattctctggagctgcgatcagcccacaaaagacgtcactaaatttgtattccaaatataataatcaccctctctc

SEQ ID NO: 23888 - DNA, 893 bp, Heterodera glycines
ttttacgttggaaaattaccggtttttaccggtaccctttccggtggaaaaagttggtaccggtaccggtaccggtttttgcattaccggtcagtaccggtaccggtttttttacaattaccgattaccgctcaactctactaaaaactgtcaaaataattaatttttagtttctaaaaaaaccccaaaatagttgctaaaaatgggtaaatagttgctaaaaacttccgaatttagggggtgtaaaattacaaatattttattcaaaagtcaacaaatattaatccaaatcattattgaaattcgcattgcaaataagttgcatttcaagatgttcgggagatagacatgagcgattgtcagtcaaaatagatttgtaaattgaaaatgatcgttcaacatcacatgaagtcaagggagcgtatttgtaaagtgaaatcagattgattttctaaaacctctatttgacatgcttgacaaaaaataatttttgaatcagttgtgtaaacatcgttcttataattggaaatccatttcttgaaaagaaatgcgcgagatgaagtttcttttggcattcttaacaataaaaattgtatattaaacgttaaaacaaataatcttaattaattgtgcaattcccggatttattttccgagatttcttcattttatgtaaagaattttcgtttttgttgcatccttgtaaacgaattttgggcaaaacgccaaaatagttgaaaatagtttttttttcaaaaaattatagttttttagttgctaaaaataaaaaaactagaaaatagttgctaataactcgaaaagtagcttaacaacagccgaaaaaaacatgtttttcgtgcatttcaggctatggggagctcaggaaaaaaatag

SEQ ID NO: 23889 - DNA, 824 bp, Heterodera glycines
gtatggtggttacaaatgtgacaattgcatgatcgcgggaaaaggtgtggataatggcaacatggattttcctgactcgtacaagccaacagatgaggaaaagcacggtgggtgagataatgagaggggggcgcgggtgatcaatttgttagaatccgggaagagttaggggatcccatcgggattttatcgggatctaatccggatcccgcggccttttttggagaatggtgggtgagataattaggggtgatcaatttgttagatttgggacgggattggggataccgtctggggattttctcgggatctggtccggatcccgcggcactttttggagacggcaaagcagtgattgtatcccggtcaaccgatcccgtcccggccttttaaatctttctggccctacaattcatacacaaacaaaaaatcattaaaaggcgctgaaactggaaaaacggattcatcgacgaaaaaatttggtgagcaaaagcatggtttagggcttggccaatttgttagagcccggacgtgttagggatcctatcagggttttcccgacatgcgattcgggtaccggcatggtttgtgttaatattggggtgtgataacaaaaaaatcataatgaatttgggctaaaatatgcaaaaaatgtttaaattaaaattttgggacaaaacgttctaacgatgcaataaataggcatgaaaaattaaatttaaaaaaatatccgaaatgtaaaaaattctaaaattttcaaatttatcttacatatttctcaaaaaaccaaaatgcctgaaataagcaaaaatatgcaaataaaa

SEQ ID NO: 23890 - DNA, 1912 bp, Heterodera glycines
  unsure (1)..(1912): unsure at all n locations
gcacatcggaatttggaagtgcaattntatgaacatatactttgctttccanttatnggtcattcacccataattaaaaaggatgctttctctctctctctaccctctttctctaccccctctctctctctctaccctctttctctaccctctctctctctctctaccctctttctctaccctctctctctctctcattagcattaccttcgccgtcaccggctgaattctgtgcatcagttcgtgtgctgctcgctcttcgtgcgtgaattgctgcagtttctctctcagtccctcgtcaacataatttggtgttccttcttcgttttgcgctttcaacacataaaggccggggtcagcgatggccaactgaataaatggccaaaataagtgaacgaaagaaaaaggacgagaaagaggaagagacatttatggaaaggaaaatgatttatttgctttgatttgacccaacattttgcaatttccattttaattggcccattttcgtgtgtttactcacctgtatcaattgtcgggtcggatcgtcgccctcttccaaaggccattgctcaacaaatgttctccgaattgtctccaccatttgcttgtcttcttcgtctcgcataaactgttcgatctgtccgcgctgtgcgagcagcttcaaaagggcaaatggacattaattaatggtgaattcattaattaattgaggcaattctcatcttatccgttaatcacctgcctcactgcttttgaggtgctcaaatcgctaaacaccgtcgatgttttctaaaaagcatactttttacgaatatttagttaatgctctttttgctaattgcataattaattaaaaatgccccgacaatttcccatggaaatgaattccttccgctgttgtccttacaattgcccgcgatcgttcgattctccgccgtgtctcccattcgtcgtccgtccattccggcaaatgcccattcgacgaatagacgagggcaaccgcacgacgatcggacaaacgacgcaaagtgaagtcattctcgtcgagaaacaacctcaagaaaagggggggggggacagttaaacaaaagtcattacagtggtcaatcacttgacaaaggcctcttctgacgtcattcgctcaacttcaatttgtccatcggaaatctgctgaagttcgttttcaattgcgcgctcatcgaatcggaatttgtcctcgggggaaacgatgaaaacgaccaaagcatccgcgtcaccaaatctgagcctgtaattaattatcttttatttttccattgaattttctttatttattcccttaccatccattgaaaagtccccgtgccattgtatttactgcccgattcggcggcacattcgacgcgtccatccccaacttttgcagcatttgccgatgcacttccgctgaccgctgaactcattgccaccgcgttaccaccatagcaaatcgtcattccatgcttgtcgaacgacggagtccattaacgatgaaatgaactagatataaatatattgtagtacatataataatatgcagagccggaaagacggaaagcaaaatgtaagctagaaaaattttgacatactatcccgacaacaagagaataaaatagggacattttttcggaagcctaaaaatcccaaaatacactgaaaatgtgaaaattttcgaaaaacttaaggatttggaaagctattaaatttatacattgaatagagttaaaaaaattagataacttatttacttcatctattttaaaaatcccgccgctgaattaatttgggcactgaacaaaaccatttcgacagaactttgtgcgctaatgcaaaaattaatggttaaaacaaaagtacaccttcgttcccatcaacagcaaggcgaaaaactcaa

SEQ ID NO: 23891 - DNA, 1362 bp, Heterodera glycines
cggatcagcaacagcagcaaccgaaaaagaaagcgcttgctgagttcatcacacagcagacgactggcggtgccaattagcgaccactaccaatcctctaaaaaacctaccagcgctctctcgctcccgcatacctcacaaatcactaccccccctctgtcgatctctcccgtacctctattaaacctgccctatcgcactttcgctctcttcaaacattctttggaaaacaaaacatgaaatctaaaaatcgaatatttttatatggcactatgactataaatgtgtcgtccgatggtgaatatacccagtatgctcggaacaccataccggggcccggaatttagcccagggatcccgagcgcggcatgtacagcaggccttcatccgacgagaacaggcgacgccttcctgacaaactgccggaaggagctatagcaaatttatttaaattttattttaaacatttttcagaacctcaatgacgaaattgtccactgacgaattcgtttgatagtaaaaagttactttaatatttaagcaccatatatattgaatgaaagaattatccgctacttgaaaatacattaaagaaaataagtatgtatatagaatatttaacgtgaaaattaagtcactgacgaaaatattcactgtcgaattcgaccactgacgaaaaaaatggaaaacagtgaaataaataaaaatagttcactgacgaaagttgttgggggcttgagccaaaaagtcggaaattttgggcggttctgtgcgggaaacattgtattccaggacatcgttattaattttcaaggacgtccttagcagggatgtgccggacggaatgccggttccgggaattttgggcggttctgtgcgggaaacattgtatcccaggacatcgttattaattttcaaggacgtccttagcagggatgtgccggacggaatgccggttccggtttgtcggcaattttgggcaattttttagccctcggaatgcatatttttcagccgtcagcagaatgccgatttccgaaatttttaggttcggaattcccaattgccgacattttttgagggcatcggcacatatccctgctggtccttaatgtccacggacaggccaattcagtatcattttaagcaaaacattgttgtttaatttaaaataaacttgaaaaaaaacagagttccatgaagttttaagctgtaaatttgtggcatatttttggcattttgggaaatttaatcattttaagctggaaatttgtggcatatttttggcattttgggaaatttaataattaaatattaaaaaatgcaaacggataaaatcaaaatgttccacgcaaaaataat

SEQ ID NO: 23892 - DNA, 1079 bp, Heterodera glycines
gggaaaaaagacttttcaaaattatacccctggagaagggagtgggaaacatgatttcaaaatttcaaatttttatagtctatctactcaaaacggtcagaaattcaataaaaataccattcacggtgcgaaaaatggggtttgacaagtttattggggaaaaaaagactttacaaaataatacccctgggagaagggagtgggaaacatgatttcaaaattttcaattttttctagtctaatctactcaaaccggttcagaattcaataaaaataacattcacggtgcgaaaaatggggtttgacaagtttattggggaaaaaaagactttacaaaataatacccctgggagaagggagtgggaaacatgatttcaaaattttcaattttttctagtctaatctactcaaaccggttcagaattcaataaaaataacattcacggtgcgaaaaatggggtttgaaaagtttattggggaaaaaaagactttacaaaataatacccctgggagaagggagtgggaaacatgatttcaaaattttcaattttttctagtctaatctactcaaaacggttcagaattcaataaaaataacattcacggtgcgaaaaatggggtttgaaaagtttattggggaaaaaaagactttacaaaataatacccctgggagaagggagtgggaaacatgatttcaaaattttcaattttttctagtctaatctactcaaaacggttcagaattcaataaaaataacattcacggtgcgaaaaatggggtttgaaaagtttattggggaaaaaaagactttacaaaataatacccctgggagaagggagtgggaaacatgatttcaaaattttcaattttttctagtctaatctactcaaaacggttcagaattcaataaaaataacattcacggtgcgaaaaatggggtttgacaagtttattggggaaaaaagactttacaaaataatacccctgggagaagggagtgggaaacatgatttcaaaattttcaatgttttctagtctaatctactcaaaacggttcagaattcaataaaaataacat

SEQ ID NO: 23893 - DNA, 1424 bp, Heterodera glycines
tttcccggtttttgctcacattgtccacgtgttctgttcggcaatgtttgctgctgacaaattgcactcggtcggcaaaatggtcggctgcaattcgatgcttcttccggtgccgtcgtcgccgtattcttcggcatagtccaaatttggcaacgtgtccatttttatgaataaatgctaaacaatcgaaaatatcgaatttaaaattaaattttgtgatttaaaaacgctttgtctctttaatttttcttttcgaaataaaattaccttttgattaatgtggaaattttgattttcataaccataaatttttaatgagaacttaattattaaattttgatgtaaaggcattttaataatgatgcaataaaataaaataattaaaatcgaaaatgaatttttaaaaaatatttttaaatttattttaaatagaaatttcgcgcaaatttatgaatttttgaaagaagaaaaacgcgcaaaaacataagtaagcacccgttttgtttctttcattaggagcggccaatggcgcgttaaatttgttggcatttgcgatagaagtgaaatgggaaatgaacatttaattggtttcgcactcaaaagccaatgagataaattttggacaggccgaaactgagagcggagcccacggcacagtgtgccaatgggaggggtaggcgttggcactttgctgtaattgaatcattttatgaagtttgccgggcaacaaagggccattattgttggatgatcgattttgaaaataaaactaaaatataaaaaaataaaaaaaagaaagaattaaatattaaagaaaaaggaaaagcgaaggaaaaaaattgaaaatattagcaaactcaaaaaaaaataaaaattatacagaaagacgaatttattctaattatttaaaagcataaaaattgtattatctatcaaatgaaagaaaattatttaaattttcgcattttcaacattagctcttccttatctttttataaggccaaatttcgtttaatttttcctttcgtttcttgcggagttttgtgccattctttgccactcattttttggcacagcacttcgataacaaatgcacacacatccaaaccattttgcataatcatttggccaaaataaggacattttttaagttgaagtacgaattaaggaccccaaatttggcaccaaaaagtgccaaaataaatggcgaaaaaagcacataaaaaaacgtgacataacgcattttcaagggcctgatgaagatgaattctttcattttaaaatttatttttttattttttgtgtacggtatgacaaatgaatagcaaatgcattttttcaaattgaaaaggcttttcccagaaattcaatcattccttccccttccctattaattaattactgtgccgggagggatttgtcct

SEQ ID NO: 23894 - DNA, 1053 bp, Heterodera glycines
ttctcttaaatttttttgaacccaattcaaaaaaggaaaaaaatttgcagtcaaaaaattattcgaatttctccaattttgtttccataatttccgaaagttattcggtatcataatgccaaaacaaaacgaaatcgttttaaaatattcctttctggacttgacttggtttcttgatatcgaagctgttttctacgctatttctaaaacggttataccaaaccccagatttttgaatccggttttcagaaaaaatgccttgtggtgaaaacaatatttcacatttcactccataactttgtgagttcggcacggatcgagaccgggataagaccattggaaagagcagctcgagctctacaagaaggtatggaaagaaaaaatagttatttctgggactttttcagaaatcagaattaattctccaatgtggcccaaattttaggcccccagccacagccccttgcttctcccagttttaagtcttggatttgtcaaataaattcaagacttcaaattaataatcaaaaattctcttaaaatttttttgaacccaattcaaaaaaggaaaaaaatttgcagtcaaaaaattattcgaatttctccaattttgtttccataatttccgaaagttattcggtatcataatgccaaaacaaaacgaaatcgttttaaaatattcctttctggacttgacttggtttcttgatatcgaagctgttttctacgctatttctaaaacggttataccaaaccccagatttttgaatccggttttcagaaaaaatgccttgtggtgaaaacaatatttcacatttcactccataactttgtgagttcggcacggatcgagaccgggataagaccattggaaagagcagctcgagctctacaagaaggtatggaaagaaaaatagttatttctgggactttttcagaaatcagaattaattctccaatgtggcccaaattttaggcccccagccacagccccttgcttctccccagttttaagtcttggatttgtcaaataaattcaagacttcaaattaa

SEQ ID NO: 23895 - DNA, 1628 bp, Heterodera glycines
catttattatttttgttataattttcttaaaagttggtcatactttattaaaatatatatgctattagagtatacttgaacctaccgaaataaattaagaatataaattcagtaaaatgcggaaattatttatttaatattaatataaaactttttatttttaaatatttatttaaaaaattttaagtaaaataatgacatcaaaattcattttgtccataataatataataaacttattaaaatgcggaaattatttatacaatattagcatgaaactttttatttttgtaaatacttatttaaaaattttttaaagaaaaccaatgacagcaatttcattttgcaaataatacaaaattttataccaaagaatgctttttgcaaaaaagtgaatattacaaaactcacttaaataataatccaaaatgaaaaagggcccataaaatcacagcttttaattatcccccaaaatccccgtaaaaattcgttttgatttccttcttttgactctcttcttagttttctttgttctctttagtgccaaaccaattatttgtcaaattcgaaatgactttttttcctttttcaaaatcctaaaaatgaaaattttcgatttttcaatttatttttttaaaattacgctttgcattcgttccgcatattcctcttctgtttcgcttacatccgaaaacttacgacattttttgcactttggacatttcgttaataatttgcgcgattccgatgtgtcttcacagcttaattaacaaatttttataaattaattttacgaaatttaaaaaaaaaatttgagtattattatgtttttagggtgcgcgattttgtatattatcaactagtcgtcccggtagagggctgggcaattgatggggtcggctggtaggccacaaacggcgtagatgcatcaggttgttcgagcagcagccgggttggtagggcagcagcagctcaggcgcagacacatgggtggttgttcgtgcagcagcagctgccgataggtgcgatacatagaaattatgccgagcacataaaaacaatctctagttattatctgttatctgtgatcaaattcaaaagttaatcaaaagacaaattttaaaacgcctttatcttttttctaacacgtccaaatgtttaacattttttagaaaaagtttctttttaattttttttggacaaaaaataaataaaaatattcatgttgcacacggactcgaacctcaactctttgtctctttaccatcttacaaaaaccacttagccacacatgcaaatcttattggaactgaaaggtaaaattgaaatggtgtgtatataaggggaggattctttgatttctactattttttgaaccattcgtttttatggatgcatcccaaaacgtcgtcggccgaagcgtcgccggaagactttttggacatacctttgttcattgtcaatcaaataaccacattccttggtgttgttcgaaagttcatgtgtttaattcttagtttgcaaaatttcataaattttccttaagttaaaaaagttatgggcagaatgaaatcaaatctttccaaattttttttgccctagtttttttttgtacattgaataaaactt

SEQ ID NO: 23896 - DNA, 1697 bp, Heterodera glycines
  unsure (1)..(1697): unsure at all n locations
gtttcagcgcggatggggcccaacacagacggggtgcggggataggtgatatttttcgtggtctctggcgctttttcctgccactaattcgcagagctggagattctgtcacagacgaaacaattcagactggaaaacgctttataaatagggtaatcgatgaaaaacccggtttgaagggaacgatagagacgttggcaactgagagtaaacgtggagcggataatgttttagagaagggcggatttcggcgtcaatttggcacaggagggcgaagaaagcatataaaagctaacaattcctccattctatcacatcaaacgataattggaaaaacaataacaaaaccgttaattcaaagcaaaaagaggcttcgatcagacgcgttcgggctttattaaaaaatgacctttcacaaaattgacgcgagtagcatcgattcgattaccaatgccgttgattttttcagtatacccccgacaaatgttaccgtatcatcgtcaaaggttttcgagattttgccgagtaatccactcaccgacactccttatcattttaaaatacactcgagccaaaactacattgacctgtcaaagtgttaccttttgaccgaatttcgaatgcgaaaattgacacccccaaatggtgaatggggacatttggatgctactgatcaggttgttccaatacaattgattgggcacaccttcatgcgggacctgaaaattgcaataaacggtcgtgaaattttcaattctaattcactgatggcatacaaaacttatctttctcatgaactttcgcaatcacttgaagctaaagtttcgcatttaactgctgctggatacgaccgtgaagatgctagtaatctacaaaacgcaaattccgaagggttcaaaagtagaagacaacggtatttgggaggtcgaacagcacaatacattgcaaaaattgatgccgatcttttcaatgtaccccaatatttgattaatcattgtgaaattgatataacgatacaaccccatgacgacaattttttgttaattgacaccttagaccccctggtcaaccatatagccttgagcttgttggattgaaactctactgtaaaaaagtcagtcttatggatggtttggctcttgagttggcgaaaaaattggaaatgaaaccagcacggtatgctgtacgaaagacaatgatgaaagcattgttcataagcccaggacgctatgaatttaatgcaaacttgttcatggaccaagttccacgccgcgtgacaatgggacttgtcgcaaattcagattatgtggggaacatcaaaagtagcccattcaactttcagcactttaatgtacgggagttaagtgttgtggccaatggtcgctcctatccccaggcaccgtatgacattgactatgaaaattggaaatttgttcgtccctacaatgacacgcaggaggcgcttggttttgccaactctacatatggaaatggaattgattacttttcttttttgcacactcactgtatttatgtgtttaatatgacaaacagcggcgacgatcatggcggtttatttgatctaatcaaaaaaggctgtaaagcagtgaacattnaattcaaaaaacagtacccgatggtggaatacacttattgtgatgngtgaaagcgactctatttacttttttgataaaaac

SEQ ID NO: 23897 - DNA, 2091 bp, Heterodera glycines
  unsure (1)..(2091): unsure at all n locations
tgaaatttatgaataatttcgcatttttctgatcatcaattaatcattctgatcatgcgaaattgaatcggctgaattnaattcatttttgataacaatttgcgttttgatcagttgcattttcatattccattttttcattgtccgatttttgtccaaaaatttcagcaaaaattggccgaagttttccattcttttcacttaatttaactgataaaatttcgtttattgagtaggttaccaataataacacgaaaataattgcagcattctctgaaaattgttgtgttttcttgtgttttttcagttcaattattaatgaataagaatattaaataatatgaagaaaatgcaccgcttaattctctttatttatattattttattatatattttttttattaaattgaagttttaaaatattgttttgttttaataaaaatttgcaaaattgaagttttattaatctgttttaaaaagaacataaaaacacaaattttccattttggaaaaaaccttaacaaaattggttttcgaaaaaaaattcagaacacaattgttcgtaagaaaaaaggagcaaaatgacaaattaatataaaatcaaaaaggtaaatccgtcattaaattacttgtgattgattgaattattttattaaatattcttaaataatatgattttttcgcttttggtctgattttctttcgcacattaaaaaagaataattattaatttttatttttaaaatttttcatagatttttaaaattttcttattagactataatttttttagacataatttttattttacatattttcggcttttcctaaaaatatatattttttgccatttggttatataattattcataaatatctaatgctttcccactgattcatctcatttcatccaatacacaatttacattcacttgaaaattattctaatggaccaaattatttggattaaaaataattccaacccaggaaagcggataaataaacaataatcaaatagtaaaagttatttaaattaaaatttaataattttagcaagcttaaaatttaaagaaaaattccgaaatgtgccagccaacaaaattttttatttctcttttcacctttagcgcctttctgttggccgataatctcgccggtatgaaccaggggtgaaaccggataaatcagatatcgattttataatagctgagcctttcatgcagttggataccaacctggatttcagaactttttcaaaactcttgtgaatcccggatttttgctattttcgcacttaaaattttttttaatgatgcttagaggtcattttaaattgattacagccgacggatataaaattaacatatgaaatatttcaaaaaacaaataatttcagaaggtctcaagtgcaagcagggattcgaaatccgtccattggttgaacaacaattggaaccggacgaatgtgtcgatgttgagcttcctcgattttgtgaagcgtcaatttgcacaacaggtgatcactgatcagaaaggcacagatttttcgtagaaaaaaaatcattaataaattaattaaatattaatggtgaaaacagtgcgaaatgtcaaaaaatgtataaaattaaaaaaatcataaaagttttatttttgaatgtaaacaaaaactttttcttatttttgacattttttcgaaaagtccatgttctccaaaaatttattttataaggtattaaaaacattttattatgctattcgatagatttttggtttttacaaatacacaaatgaggaaaaaaattttcaaattatcaaaaagattttgttttatggaaattaattttctttttcgtgttttataattcaaaactcttaagatgaggcgccaaattttgcgagcattcattggaaatgtgcggaagaacaaaatgccaaagaatgtgccgaaagaatgaaagaaatctatgagaaaaagggtgaattaaaaaatgtttcatgccaatgccattatggcgaagaaggtgaagactttggcaacaaaaggttcacgcttccgccgcctgccgacccgacggacaaaggtagacgaaa

SEQ ID NO: 23898 - DNA, 1769 bp, Heterodera glycines
attgacaacggttctctccgtcggtgaaaagggacaatgtcctccgacatcgtctttttgtcgggccactgagtgcgcagaaatttcatcacctttttgcgtgtgtcgtcctgctcaagcgattcgatcacattctcatttgttaatgggaaattcttcataacagaatttaaggtcccaattgtagcactcgtagaaagtttggccaaaattatgtcgtcttctggcatcggagttttcgcaataagtcgggaaagcacatcggcttggccgaactcaatgtttgttggtactcaatttcaaaatcgtaccccagaagaatgattgcccagcgctgtaaccgattggcggtgcacgctttgattccttttttattgccaaaaatggacaataatggcttgtgatccgtctgtagaagaaaatgccttccaaaaagatatttgtgaaacttctgcacggcatacaccaaagccagtccctctttttcaatttgcgaataattcttttccgctggggacagggaatgtgaagcatgggagactgctttcattgtgccgtcggaatagcggtgagaaatcactgctccgattccatgctctgatgcatctgcggacacgatgatttgttgcgatgggtcgtagtgagccaatagctgatcagattgcagaatctgaatgacctgatcaaaggccttctgacaatcggtggaccaactccagaccacatcttgcttaagcagattgtccaaaggttggcggatgaaacgcatgttcttcacgaactgctgataatggtttatcatccccaaaaacgaacgaagtgtggacaaattggttggcacaggcatcttagcgatcgcctgtattttggctgggtccggccttcttccattcttattaatgatgaagccaaggtacttaatttcccttttgaagaaggagcacttttcaggcttaattcggaacccaaacttggcaattcgcttgaagacctcttgaaggtgcttcttgtgttcttctgatgatcggcttaccacgatcacatcatccagatatgcaactgcgaatgcacaaccagccaacatcgaatccataattgactggaaaatgccgggggcggacttcaccccaaatggcaaacgttggtactgaaaatttcctcgatgagtggcaattgtgcacaactctttagaattttcgtccaactcgacttgtagataagcatcccgaaagtcgatttgcgaaaaaattcggcctccattcaaagtggcgaagatgtcttcaggaagcggcaggggatgctgatgcaaaagcagtgcgctgtttaagccagtcgaaaagtcggcgcagacgagaattgaaccattggcctttttcacaaccacgatgggtgcggcccaatttgtgtgttcaaccggacggatgacattcatcgattgaagtcgctccaattctgcttcaacaacagatttggtgttgaatgggacgggacgcggtcggcagtaaattggagttgcattgggcttcagcgacaaatgtgccttcacctttttgcaatgcccaagtccgtcggcaacaatttcaggaaacatcttttgagatcaccattttctttttgattgcattcaaattcaatgaagaattgactttttgtcgaatgtcgtccaaaagtccgaaagcatccatcatttcaatccccaataaattcatgatccactttttgacacataaaatggtctgttttttcgtggtgtctccaaatttgaactt

SEQ ID NO: 23899 - DNA, 2185 bp, Heterodera glycines
cacaaaatgtccaagccacgaaatgtccaaaagagtggaaacccacgaaatgtccaaaatttataaaaacaaaatgagtctaatttggggtttttaggggtttcggggtcgctgaatacgaatatagcctttatattaccccttgcctaaccttaggcccatccgaataataaaaaactcaatttcgagacttggacatttcgtggcctggacattttgtgggtcagcgcagaaaactgatgctcatacaattgagtcccagaaatttcaattttgcggttcttcctgcggaatttggtcccaactttttttagagctatgctctgccatacaaatatataaattaaaataattgtttttttaataatttaagtacgcgaattccctgtttctagcgaatttcaatgccgtcgaattaacaagatttacttcactctcgagaaaccacttgttgatgcttcttgccatccacaaaaccaattatgcaaattttgagtacaacaaactattggattatgattgatagaaaagagcggaggaggaaaaaggagtgggaaataaacgaatttttagggttttctaatccaagttgattctttaaaaaaataagcaaaacttcaattctttcatttaaataaaacagttgattaatataccgtatttcctttaacacagccccccccccctccctccctgtaataaagccccacttttgaggagcgggttggaaatagagcctccccctttgatgagggaggcttgaaaaaataaagcccccggtggctctatttaggcaatacggtaattattatttatttattcattggttttaatttgtttcatgcaaaaattttcctggggcgaaatttgcgcattcggacggcactcactcactactcaattatgtaacgcacttagtaggaaaattttggactgctgtgttgagagactaattgactcattcattctcgtcctcatcaatcattgaaattattccaaaaacacatccattaaattgtgcatttaatagccaataatttgctgaaacgaaaaatcaatttttatattcattatccttattctcgagtcgagactcgagaccgagacccaaaaacccgagactttctcgagtcgagaccgagacgctctcgaacagcactagtaagtaactccttagggaacggatgaatacataataaaataatataaatgagtttctttgacgtcaaatgcaaacaaataaataataaaacggtccaaatgaatgagtgaatgacctttaacttatgagatgggtgtagcacataagaagaaagtaaataaacattcctaataaaagaaggacatcccattaaaacaaatttcgacctacccaaaatcacagatagtgccaggatttgttggggcttggggggattagggagttgtgcctgctgctgtttcagaaagcgcatgtctaaccccaaaattgtacgggaatatggaaattcgggagtataaccttcaaaaaagtcgggaatacggtaattcgggaccgggttaaatccctggtccagtgtatatatcactgggatcactgggaattaattcgatcgaaccatttttccatttattgcattttattaagaatttttgcccattaggccccccgccctccgtctcggcccaaatgcttaagcattgaaaggacctgctgctgcttgaaaaagcaaatggtggcttcttcagaaaccactcaccaaaaatattctcacaaaatgactttgagtttcgtggccaaaactgaactgagtacacagttaagtagccaaagaacaaacatttgtaaagtgtatataaattaaaaaattttttggagtattaaatggatgggataatctaattactttctaattataaaaaatcattttaaatatttcataatttttcatagatataaataaatattcactctacggcttattttgagataatactgcaatttattttaaatattcactttttcgcttttgaatattttgtatttaattattggaaaattttacactttctcactaagtctttcccaaaaagtgccaattctctttcaaaaaaaacttttgttgcctatggcattcctccatcaaatcattttctttccttctcttttgtctctcatttcggcatcgattcaaaaaaatggcag

SEQ ID NO: 23900 - DNA, 2150 bp, Heterodera glycines
gcataaaaattcccaaaaatctcattctttatcatttttagcccatacaacgcaaatcaaatacatttcgaagtgtttggggtaaaattgtctttttttgataaatcatttctataaattgaaagttccagcagagaacttcgaaatccaatgacgaattaatgaattcgagatttcattagtttctacaatcgaagaaaaaattttttaatttgaaaattatgttaataattaggaaaaaagtcgatttttagggggtgtatttttcaattttcttgtatttttattgcaatttttctcaaaaatgccaaaatatgtgcaaaatatgtgccaaaccccaaaatatgtgctaactagggatgatatttataggcactaaaaaccgccaaaataggtaggctctaggctctaaaaaacccccaaaataggcactaaaaaatggaaaataggcactaaaaatcctcaaatttaggggtgtaaaatgacaaaattttattcaaaaagcaaaaaatattatgccaaatcattattgagattcacattgcaaataagtaacatttcaagattttcgggcgatagacgtgagcgattgtcagtcaaaatagatttgtaaattgaaaatgatcgttcaacatcacatgaagtcaagggagcgtatttgtaaagtgaaatcagattggggggcataccgaaattgattttttgaccagaaagaatttttccaatatcgcaaattgtatcaaaaacctctatttgacatgcttgacaataaattatctttgaatcagttgtgtaaacatcgttcatgtaattggaaacccattttttgaaaagaaatgcgcgggacgaaggttcttttggcatgtttaacactaaaattgaatattatatcactaaagaattctaaacaaatttttaacattaattaatcaattccggattttattatccgagatttctttattctatccaaagattttcgtttatatgccatgtaagttatccacatttgaacaaaacttcaccatcccccccccctccaacttcatgcataatttctttttcattcattttccattcccaataaacacacatcctcttgatcaaaaacataaacaaaatatttatctgatctatgtaattggccaaaaagttttgctccatacctttttactttttcaccccccccccccggcgtatgacacgaaaaggacacatttttactccccccccttctctctcataattttctctaactatctcacattctctttgatttatattctctctgacttttctctcacacatgctgcggcgccctccccttcacaatgcatattaatttcgtccccccccaaatgacacctctcacaaatgcgcgaaattttcccgcaaaaaactacccccacaggcacacccttaattaccacataattaataaacgtttaaaaaaattcacaaaaaaaagttttctcccccacaaatgcgggaaattttcccgcaaaaactaccccctcaggcacccacgctaattaattaccccccccccccataggcatagactcattcccgcactcattaatcacggcggcaccttcaaagaaaccgcaacccatcaatcaccacccgctacccgctacccgccctggtaactaactacttttgctcttttcggtaatactgccgatggaatgaccccatttttgaataaaatttagcttttaaaagtcactgaaaaaataagtttctaatggttttcgaagttctgaacatgattttgttgttaatttcgaccattttcgagccccgaataatgatttgaacaaaaaaggcgaaaaactcaaaatttttgaatttcgcacttttattttaaaattgagtaatactgcgatggtgctccccttctttttttggtagaaatttttttgttttaaaaggcgcgaaaacatggcatctaagggtttggggaaacttgtcccgaaaatacaattaatttgacccgttttggtaagggacacccggacccgaattcgtcaaaattcaaagctatccatggttcattctaaattgataaaacaaagcataaaaggcaatatcttgaacagcggccccaaaaaccccaaaaggcaaaagaaaaaggggtattttaa

SEQ ID NO: 23901 - DNA, 2517 bp, Heterodera glycines
tttcatcaaatatttgtcctccttttcttttgttgcttctttgtctctccttttctgtccttctctcagcaaaatgaatttgaaaagtgagcgaaagtgcagtaaatcgcttctttttccgtcgccgtcgtgcggcggtcggaaattttccggcacattcacaaaattggcgcccttttccgaaccgctcagactgatctgtccaaagtgttgtgcgttttggcccgctttcagttgaaatttctacctgatcgctcaactgagagcgcggaattgcgcccattcggttcaaatgcgaatggaatcggtccgtccgagtcagagggatggcaagaaaattctctgaaaaacaacattcgaattgttgttagcttttactaatggtgtcgagactcgactcgagaaatcagctttctagaagagccttggtcttgtgacagttaaatccgttggattgaacttttcagtcctccgcttgcccttcccccggtgatttgctccccccgcgccctcacccaaaatgaatccaagtgccacgtcgtccggcacgccgagttgggcacagacccattggaaattgcccctttgctgatgggtttcgcccgtggcaatgaatcggcgcagtctgcgaagtgttagcgcggacagacaaatgccagccccgccggtgccgaaccaaaatggactttttcggtgccgaaagggggcgaagagttggggacggtcatcaagttggggcagcacaacgggagctgaggtggaaggtcggcccaggtaaaggtcgtcgagatggggcctaaactgtcggagaaaggcgcgcagattgacgagcagcacaaaactgtcgtcgtcgaaatggcaccaaaaacttaaaatgccaaaacaattcgaaaagggaggcaaaaagtcagcgaactttttgtaatatggtgataggcgattttaaagtgtgatttggcattatgataagcttttttacagtagtaatgtcaacaaaattgaaaaagaaattaaattggtttttcgattctccgaatttttttcattttccaattatttgaaaaatttaaacccatttgtgtgcatagttttgcccatcactttttctgaccgatttgttcgtgcgataaggcacggaagggagggaattcatggaaaaggcagcaattaaccccggggggaaatgagcgaccactgacatgaccaattgaccataattgctgacctcaaaagtaaccttatcttaaatacttaactaatggtcaatggtcctttaattgccccccccggttcgatttagtggggaaggattttaaatgtccgcccaaattactccggcgaccgctgaagcgcaattcgaagttcggctgccattttgcagcacagtgcagcgctaaattaagcattggaggagataagtaattgagggttcactttgtgtgtcccggagggcatttggtcgattggatgagaggggacggagagttcgcatcggagacgaacaaaatctgctgaaataagcgaattgtgtgggaaatcaatcgcattgacttcttatggtaaggcatccggaaaatgggacaaaaataacaatgctttttaaacatgctaatccgtaaatttctcccgctttcccgggttttccctgtcaattcatcgtcaaaatccccgacattttccctctgtccgattggcaacgaaattttcaccgtattttctgcccctttacgcccggccatcgatgcccaagtggccaatgcgtcttcgactcggctccgatggtttgcccttgtcgtttttacggtgatcaaaatggacgggtcggacacagaagatgggctgttgatcggaactggcgatgccttaacagagacatcaaatgcgggagtgaatcagagattcctccaagttaattaattacgccctaatgatgcgcgattattttgctaattaactcaccgatggagaggagaacaacaaccaaaatagagggaaaaagaagacgaactgctgttggaagaagatgccgaaagaggaagaggaggaaaaaggcattgccgaaggaagcggaggaaagagacaattttgggaagggtcagtcacatcgttgccgaaggggcgacgaatggcaaataaaaagggaaaataaatccaaggaaaaggggagaaataacgaaattggcaattatggcctctaaaagtgccgaaatgtaacaacaaaaaagggagggggacggttttatgaccaaaacagacaaaaaatgaacggatgggtgggaaagtgcgaacgaatgaatgcccccgggggagacaaatgaaaatgaatggcgatgatccaaccgaacgaagccaatggacggaagagcctagcggagaagtgaccttgggcaaagtgaacggtgagggaccattggcagaagcaatttccaaaaaacaaaaaatggacaaagaaaaattgtaaaagttgggggcgtaaagggagagaaaaaagaggggagagacgcccctcggggtaat

SEQ ID NO: 23902 - DNA, 1921 bp, Heterodera glycines
aaaaaattcaattttttggttattgttcgagtttgggttagtgcttagaaattggtcaaaatagatgtcagattcgtgatcagcgacatctaaaaccccgtagaataaatttttatgattttctatcacaatttttttttgaaaaacaaaagggccccccctctttactttttgaaaaattcaaaatctgccattctacgatagtgcccaaatttttctgattaatccaatggattcagaaataatgagcacttcgatgctgaagacggcgtaccgcggcatggcaatgtttgagggggaaatggcggaggaaagggcacaagggaacaaagattgcatcattcttacgcttttatgcgggaaaatattggactattttgagcagcagctgaaagaagcgaaaatggacgggaaaaatgaaaaaggggagaaaatggccaaaattggcaaattttggaaattattcacgcgaatttttgaccttttcaagaaaaaaagcgaaatgcacgacaaaaaaggcattctgatcaaattgagccaacttttgcgttatttaaggggccaatttggggagcaaaaagtgtcgaataaatggcaattaattggggaactatttgagcagggatttaccaaattgtacaaggaaaatgaggaattccgaacccattttaagaggaacatcattcaaatgatcggattgttcagagaaatttgtgaaattgcagaagagaacggggaggaattcttttcgaagcaattttggaccttatttggtggaccttttgtaaattaaaaagcataattaattaattaattagttacagtaattagttggagagtctgcgattttaaaagaaaaaacgaaaaatttctcagctggcagaatattggtctgaaaaggcaaagatgcctgttcaaatccgaccagcattcccatagctttccctcatcaaagtgcttccccaactcattaatatttcactcgcaaagacctgagacttttctcgtgttgaaatttgagtccacgacattcggacatcgctagtcgaaaattgctaatgatgactaattaatttattatgaaaatacgacagcgatgcgataaattaacatttgcttaattaagaaaaaatattaaacaaaacgacgaccaatacgccgcagaacgaaataaaatcactacttcttatcgaatgcccaaaaaagaatatcccagtggaaaagctgaaagaaatagacattatacgagcaggaggaggcaattaataattattattcatttcttaataggggaaaggcgaaatgcacggacagtgaaattgatcgcctttttccgaatgatttcacttttttgattacgcctaattaataaagtaattgccataattaccatagtcattttattcagataaactaccacttttgatgacttcactgtacaaagaattattaatgaaatcagttggcaaagatgaaagtcgcggctacaattcaagccaaattcacattttggcaatgcttttgagctacaaaatacaaattgactttatgattggcatagggaaacagtttgaagaaagaactgaaaaatttgaggaccaattggaaaattacatgaacgaatttgttgtcgaaaggccagaatccggcagcgaagaggaggaattatgcgaaatgcacaaattggcacattcgatagctaaaaatggcattttgagggaggaaagtgccaaatggggcaaatttattgagcaatttgtgggcaatgcaacgaaaacgccaactgaacgggtgaaaaatgcaattataataatattaatttaacttagtggccgaatgtttggtcactgtaaaatataaaaaagtaaaaacattgaaaaaatgataatcaaatatcggagaaaagagttaaaaatattat

SEQ ID NO: 23903 - DNA, 1871 bp, Heterodera glycines
attaattttttaaaaatttttaagaatttaaatgtcataaaatttagcagttaatagaaatctaaggagtgagcggtgcggaaaaagagagacggaaaattaggattcaaggcaaataactgatattagaaaaaaaaacaaaattatcatgtttttaaaatgggtggatctgaaattagagctactgggtatatgaaatttccggactcttcgagacccgaaaacccgaaaaattctcaactcgagacttagtactgcgactgctcaatattcttacataattcctttcattcgattaactcaccaaatcctcatcagctgttccgtgctctgttttggcactttctgatagcagccgcgtagcggtgctcgccttacacaacaattaccgctcacaactggccaaaggcactgcagcaaatttgaccggcacaatgccggcaggcagcaatctaattcaacaaaaatataatacgagcattgagtcggtagcgcagaattgggccaacggatgctcaatgtcccactcgagttcatcagggatgggagagaatttgtacatgaccagttcgtcgacaatttcggaaggtttaattgaagtgcccatttttaacaaattaggtcgtaaattccaaggggcagcggcaaaacttttcagtttctgtttgtatgttaattggctattaattgaccataaattcattattttcctgggcctacattaagcatagatattaggttaattgaagaagacaatttgcagctgatgcgctgaaacaagcttgcgacatgtggtgggcggagctgaagcagtacggcttccagtcgagtcttgtgctggacatggatcagttcaacaagggcatcggacattggagccaggcaactgaatgaataatagttgtagctatcaaattaaacttgttctttcagcaagcgtgggccaacactgctcaaattggctgtgccatggcacgctgtccctcctcgacctggaagacatgggttgtgtgcaactacaaggaagcgtaagcaaaatggaattttcttagctttataactaggatagcaatttttagttacgaaaaatatcgaaaatttaatgtaaaatagtgaggaaaaatgccaaaataaaaacaaaataatgaaaaaaagtccgaaatagtgacgaatagtgacaaaaaattttcagccaaaaattgagcaaaaataatttttattttcaatttcccccccccccccccgtttaggcgcgtaaaatgacaaaattttatttttaaaaagtaacaaattaagccaaacttgtattgagaaaaaaaaaattttaaaatcaaaaatttcttgtcaacaaataaattgttgagatgaatttttgaaaatttaaaaataatgggcaaaacgccaaattagttaatttcaaatattttagtgacgaagcgccaaagtagtgacggatagtgagccgaatcaaaaatttcaaatagaaatgcgtttttgagctcctttcttcaaaacaattgagcaaaaaaaaaaaataggcaaaaacctaaaaataaaaagagccgatttaatggttttttgtttgtttgccttttcctttggcttattttctgattattatatatttttttacattaatctaattcattaatctcaacagtggcaactatttgaaccagctcgtctacaaaaaaggaaccgcgtgcagtcagtgttcggattacaatggggcgtcctgcaacagcaccggcggactgtgcgtattgccatgagtgagggatatgcttggaagaatgatttttatttgatttatgaatcgaaaggaagtgaattggcattaattatgaaatcaggcttttcatttgaaatga

SEQ ID NO: 23904 - DNA, 1236 bp, Heterodera glycines
  unsure (1)..(1236): unsure at all n locations
tgcgctcgctcgccccctccatgctcagttcgtactcgnccaccattcncagcgcacagtcagccgcgccccttgcgaagccgaaccgcgcgaaaagcaactcacaaacgctaatgggcggaacagagccaacgaaaagtgtaaaggaacggacggacaaagcgaaagtgaccgaagcaatgtttagccgaattcgcaactgattgtcagtgagaagtgcggcacaagcgcagaaattgcacagccgcaaatgcagcagcaattgttgcccggcaatgtgccggcgacgacgtccgggggagtgccggtggcaccgcaacagccgcaggggcaaacggcgcaaaacggcaccaaaagcggcactggcaaaggcatctgctcaccaaattcaaaagcatcttgctaccaggtgggcaagcatcaaccgactataaacacttgtgaagggactgtttctcccattcacaacttcttttttcgttgcattgtcaggtcagttcactaaccgaggcttctgctcggaaactgtgccgtaagcatccgcaaaagtgcataaggtggggaaggcacaattcgacatttattcattcattcgttcgtttgtcagttacactcgcaatcacattatgcgcacttaccccggcggcatgcgaatcgattcgtccaatttcaatccgcaacaattgctcgaattttggcagtgcggcctccaaatggtggctttaaactaccaaacagccgacgttgcgatggcggtgacttttgcttgacattttggacgaagtaaacacccaaatgcaggtgaacacggccatgttcgagcagttcggcagttgcggctacatgctgaagccgagggccctttgggacgcgtcccatcctttgttcggcaaattcaatcccttttcaaaagtgcgtcttttggggatgccaatgcaaagacaatctccatcgttaaggaactctccttgtgtcctgcactcattctgcagttgaccatcatctccgggcagtacgttcagaacccggccggcccttcccccgccagtccctttttggaaatcgaaatcatcggagtgccggccgactgtgccaaggagaagagcaaaatggttgactgttttaactgtttattctctctccttctctcctttctctctcttctctatctctctctctcctttctctctctctctcctccctctctctctctcctttctctctctctcctctctc

SEQ ID NO: 23905 - DNA, 1402 bp, Heterodera glycines
aaaatggggtttgacaatttattggggaaaaagactttacaaaataatacccctgggagaagggagtgggaaacatgatttcaaaattttcaattttttctagtctaatctactcaaaccggttcagaattcaataaaaataacattcacggtgcgaaaaatggggtttgaaaagtttattgggggaaaaaaagactttacaaaataatacccctgggagaagggagtgggaaacatgatttcaaaattttcaattttttctagtctaatctactcaaaacggctcagaattcaataaaaataacattcacggtgcgaaaaatggggtttgaaaagtttattggggaaaaaagactttacaaaataatacccctgggagaagggagtgggaaacatgatttcaaaattttcaattttttctagtctaatctactcaaaccggttcagaattcaataaaaataacattcacggtgcgaaaaatggggtttgaaaagtttattgggaaaaaaagactttacaaaataatacccctgggagaagggagtgggaaacatgatttcaaaattttcaattttttctagtctaatctactcaaaacggttcagaattcaataaaaataacattcacggtgcgaaaaatggggtttgacaagtttattggggaaaaaagactttacaaaataatacccctgggagaagggagtgggaaacatgatttcaaaattttcaattttttctagtctaatctactcaaaccggttcagaattcaataaaaataacattcacggtgcgaaaaatggggtttgaaaagtttattggggaaaaaaagactttacaaaataatacccctgggagaagggagtgggaaacatgatttcaaaattttcaattttttctagtctaatctactcaaaacggctcagaattcaataaaaataacattcacggtgcgaaaaatggggtttgacaagtttattggggaaaaaagactttacaaaataatacccctgggagaagggagggggaaacatgatttcaaaattttcaattttttctagtctaatctactcaaaacggttcagaattcaataaaaataacattcacggtgcgaaaaatggggtttgacaagtttattgggggaaaaaaaattttacaaaataatacccccggggggaaagggaaggggaaaaaaggaatttaaaattttttatttttttttttgtttatttctactcaaaaccgggtttaaaattttaaaaaaaaaaaaaattcccccgcggggcaaaagagagggggtgtgaaagagtttttttgggggaaaaaaaaaattttaaaaaaaaaaaacccccgggggagagggagggggggaaaaaaaaaatttaaaaattttttttttttt

SEQ ID NO: 23906 - DNA, 998 bp, Heterodera glycines
atttggacaatttgcttcgtcgcacttcgcctacaattctcaccgatctcaaccaattgacttcaatcaattcctttgatttgttgcccgctgcgtttggtgatggttttgatgggccaaattcaacaatttctgctggccaagcattgtccaaatggttgcactctccgagaaaagatggacaacccaagcgattgcgttgttggcaagggaactttgaatggatcaacaatttcaaggaggtgtggccataatctcgaaaaatcactgatttttgttttcaaattgtttagcattttcttcgtgccaatgccatttcttccgtcagttacgaaattcatttttatgttcatgtgccatcaatggaaatggtgccatttgaattggtgaacgaatggacaaaggaaaagctgacattggccaaagcaaatgaaaatgaattggacaaaagttggataatgaaacgctgcaaaattattggggagaccgcgacggtttattggaaagacggaaattgggacaacaattgcaacaatgtgttcatttggctttttagtggcactaattgcatcgggttagcaattaaaaaaaacatttgatttttatccgaatttgaattttgcgcttaatttaggcctttgtctccgccaccaccagcgagaagacgaagaagcgggacaaagcatcacaaagggcgaaaccaacgcattgaaacgtggcgaaagaagtgccaatttgaggccgagttgaggacggtcaaaactggggaaaatgtccatccaaacgtcgttgcaaatccaactgaaatggaaaaacagtttagttaaataaatgatgaatagggatcggatttttagtgataaaaaatcccaaaataattaactaaatagtgagaaaaaaattccaaaatagtggcaaaaatagtggcgaaaaagttccaaatttaggggtgcaatttttaaataggctgttttttaatttgaaaataatttaaaatt

SEQ ID NO: 23907 - DNA, 1624 bp, Heterodera glycines
ggggggggggggggtggatcagtcggtgtccaatggggggaaggcgccattgacaaggacgacgacgacgggcaatgaatgcccagcaaaacgagcgatgggtccattcatcatccgacagaccacaaatttctccacttccgaggtggtcgcccacccaaaatgtggaagaaaggagacggactggcgcgggaagtaaggacgacgggaaaggagggatttgaattttatcatcataaatggggaagggatcacccgccgaccgacggcgaaagtcgcgccaaatgaattggcgcgaggaatttttggcagaatttatcaaaaagaaaaaaatgggcttaataaattgagaatggacaatcaaagtggagagatcggtttgtgttgtgctgttctgttctgcgggtcaatcactgctcatccgccgttggtcgtctcccgcctcattagcaccgcttttgccattttggcacaacttttctcccatttcatttgacggcattttatgccgttctttgtgttcgacgatgtctttcattcatatcgagcagtacaacctgaacaagtgctttgtgaccatttaaatgtaattagctcgcgactttcgtgggtcaaatggctcagcttttggaatttctatccgaattccggaaaaattcatcattagaccactaattgctgcctaattagtctctttctatccaattcagtgacgtcacctctttgggcaactcccaacgcaatttcttatgtcccctccagggatgcttctgccgacgatgatgcgttgtgctgctgtacagatcttggcggatgagcggagtcagcgctgatcgcgtcagtttgaaatttaaccccaccgtaaaagtatttccaggcccaagagccgacgcgggtctttgagtgaccgaacccatccaaaacggtgctctgaagggactgatcagtgatcagtgaaaagtgctctgatcaatcctaaatgactcactccgtccgttttgctgttgttgttcggcgtctccacaatgacaaaatgcgacgacttttgccgtcttcggctgtgccgtcctcgtcgctgttgcccgttccgtcgcaatgcgacaaaccacggacttcgcgcacttccgtagacgcaagacgagtacaaattgtagtaattgtgcactaaaaactcatatcgttagtctgcacagtttttatctcggtcctccttctctcccccgtctctcattttgtattctctctcatccccctttttctttctcgtctctctcttttttgtattctctctcatccgtcatttcttttccgtctctctctcttttgtattctctctcatccccgtttcctttctcttactcatttcctccatgaacacacagtcggctgagtatcggctggcaggtgcggcatacagctgtcccgaggagtccatgcacagaaagtggcggttggtcactgaccgaatggacaccaggccaaaagcgactgccagaaattcgagcagagctgaacccaaagtgatttgttgtttgggagttaataattcgtttaatgcactctttcatctttgccaatgtccctaaaaaccctcccccttggacccatcccttattaaggtctg

SEQ ID NO: 23908 - DNA, 1241 bp, Heterodera glycines
  unsure (1)..(1241): unsure at all n locations
gcctatcggcaccgccggacccactcccatcccctgttctccaaaattccttggaaaaatgcgccgcaaaaaatttgtttttttagattaaaaatgcactgaatttgctaatttacttcccaaaatagttaaatatgataattggaggcgaaaaatacaaaagttgatgctatattaattgtataaagtgttatacaagcgatttaagtattttttgttaaatgttcttatttttgaccctaaaatcttattttatggcctggatgttcttattttgaaattttttcgatggaagccctgcattagaataaaaaataaataatataaatcacaattttttatttttaaaaatattttttcagagctctaagattattttaatgttttgtagtttgtttaaacagaaaatttttgcataaataaatacccatcaataataaaaatcattctttttaaaaaaatatccaatttgagaatatttttaaagaaatgaaattattaccactattctttttaattgtaattttaattatcaaaattgaccaatttggagcagagaagaaaaaattgaaacaaaagtcatttgacgtaatttttggagaaaaatgggaagaaaaggaagaagaaaggcgaaatgaactcaaaaaaagagaaataattgcaaaattttataaaataaaagagaaaatcaagcaaaaaggaagaaaatattcaagaaaagaatggagtaaaattgaaataaaaataacgaaaaaattggggacaaatcgccaatatatttataaatggattaaagaatttggcctctataaattcaaatcaaaaactgatgaagaaaaaatagaaattatacaaaaattcattggaatggcaaatgaatataagcaaaaaagaaaatattcgccaaaagaatggcaaaaaattcatgccgaaatttgcaagaaaattggagttagcctttcagtaattaagaaatggaagaaacaatttggaatgagtaaatttataacggagaaggaaaaattggaaaaaatgaaaatttactggaaaatanaaagagaanatccgaaatgagtgacaaagaaattggaaaatgatgaaaaatgataagaagagcatttcaagatggaagaaactgttggnataaaaaatcatttgagattgaaaagatgattataagaaaaattggataaatttgccgaaaaattatcagaaaactatgcaattttttagtttttttt

SEQ ID NO: 23909 - DNA, 1946 bp, Heterodera glycines
  unsure (1)..(1946): unsure at all n locations
tagaaattttatgaatttagatataattaacattcgcaagtctttttattttcaaaattcaggacaaacagattaatttagttttgtgttttgcgaagacggaaataaaaaggattaaaaagaacaaattgatcagttttagtgaatatttctttatcatcagagagttgccaaatcgaacttgacattggatccaaagttcgcctcaattttgtcatcagagttgcgcaaagaaacgaatgggaacaattggccaacaaaagatggagcaacgaaaaaatcggagaaacctgtgaaaaagttaaaggtttctcaataagtttaaatataaaaaataattaatgtaaaataggcaattaaatagctcatttataagacaataattcaattagtaactgtttgtttaccaacccaaacgttgtccattctttgtgaaaatgatctgtcgagtggccgaattgatgccaattcctacggtatcaccgtaggcatatttggcatttgattccttttgttttccgttaatgaaaatattgccataattgtcatatgcataagtgcccttttcatctccatacagtggttttttctgctgtttgacggcgaatccgaataacaaaacactggaaatttattattaataataataaaaataattaaatttttatattcctaataaatttattcaaaaaataaaaaatctcttactttttcttatttccgattgaaatttcgtagtaaaaaatgtcggacgaattattgaacagcaaaatcggatgtttagcgaaaacagaacacataccatcttttaaggagaatatataatataactaagtaaattatgataaaataccattctcatttctcttataatggacaatgagacttttgtcgccaatgatttcgagtttctcatgacaagcattggcatcccaataattctggcggaaatttaaaagtgcctaaaaataaaaaaacatattaattttcacctttctctgctggatgtgcaatttttcgagaaaaaaataatttttttgggggggggggggggaggattccacacgaaaaaaaataaaaaagttttttcagcgatttgttgaaaattaaaaaaaacttattgttagtaaatcttgaaaattggtcgtaattccatcaaatttttcatttgttttgcatttgtaaataaaaaaccagtaataaaagtaagaaaagagttaatataaaaaatcaaccataaatttgaaaaatagctaaaaaaattgtaatttttttttgaaatttaaaaaaatttaagttataaaaaattacaatcgagtatgctctacatgataaaattggttttaaaaatgatttttgaacaatacccacctcaacggtgccgtcaaattgcgagtcgctaaatggaagttcggcctcgagcaatgcctggggcggcgacacattttggcactgtttctgttgggtttggatttgtgggccggaaatgttggtggtgatgatggaagagaaggacggatgaacaccgccaacatgatgatgatgatgcggattcagggaggaggaggaagaggaggcagcagaagcggaggcacagttttgttgggcccgttggtgatcgaggagcggcggtggaagagcgggcggcggatgggcgagaaggggcggcgattggtggcgccgaagagtgccaccacctccatcagcagcaccggcattggtcccagcagcatggaaagatgatgatggggaatgggtggtgccgatgaccgcggaagagcacgaggagggcatcatggcggaagaagcggcagccacagcacaggcgggagcggatgaggaggacgcaaatgggtggtcgaactgaaattgggtccaaagtcgccctcattttgtgccngcactcaccactttttcacaagccttctcatgctgcaccatcttct

SEQ ID NO: 23910 - DNA, 1510 bp, Heterodera glycines
aatgagtttttattttttataagtaagaactgtcagtcgacatgcgggcgatgatgggcgggggggggggatgaagtgccacaccccccaagagcgctcaaggccaagcatttacttcgccaaaaatggctgcaccataaattcgaccgcaactttattcagttgcccatttgactcatttccaccattttttagtgtttaaattacagaaaaataattttttatttttgaaatgtcatccaattttctcgaaaatgacattgatgaggaaatcatcgatagcagtttcgatttttcccgtccctatggcccaatgcatttcccggattccgacttgaccgccccaatctcgaacgaagcattggcggagtttaggtttttagagggatcattatttttgtatttataagaatgagtagggcatatttatacaaatatctattatttttattttaaccattaaatttacagcgcatggcttagcgaaaaccgggagggtcgaggtggcttgacaccactatctgatcttgtgcggtttgagacctcgaacgcagagactgagacataccccgaccagccgatgccgataccaattcatatgggtaatgtaaaaatggtcttttttaagtaatctgtatatggtagcaattttgatgacaatttcaggaaatcgtgaatggaatgtccagggacctcgcatgaatcagggatatcgcggggattattggcgcgggcagcgtcgaatgccattcccggttggtggtcgtcgtggggggcgtcattggcgcggacaaagtggcaacaatcgatacgcagcccaaaatggtgggtttgaagaaattgtggtatgcaaaattcggtttgtagaaggtgcggaatgcatttttggtgtgcaagtcggtattcagggggtgcaaaatgcctttgtggtatgcaaatgtgagtgtgtagggggtgcagaatgaatttgtggtatgcaaatgtgagtgtgtagggggaggatacggtataatatgtttttgcaaatttataccaaaatagttctaacttttctttattaagcgaactttgaaccaatcggaccaactccgctaaaccaaggtagaaaattccccactccttcaccatacacatatttaaaaacttttagttcgctcacatttatatgggagtaagtaatattttttcaattataaatcaaatgactaatcatatacagtaccagatggcatgagacaactgttcaacccggctcccccacctccggtgttttatgtgtttagagggcccgcccacctactgaatgaccctcgcctgtttgagcgcgttaacgggggtagtgttatttttatgccgcctcaaaacacaaccttaaaaaacatgattttagcgagtcctcaaatgccgatgggtctccaatatgaccgaaatggagttgcgattttcaacccggccgttccaccccccggatacgagaaccttcgccccccgggaacataaatgccaatca

SEQ ID NO: 23911 - DNA, 2010 bp, Heterodera glycines
  unsure (1)..(2010): unsure at all n locations
tcattattgccttcattaattattacccttccctttccattctctccccaggactatgtggtggttgagttggaattcgccgccaccttttccccgctcaattggtactgtttcgtcgtcgatgccgcgtcccccgcgctgtttaagcgccgcgtgcgcgcgttggccaaatgctttccgaatgtaattatgggagacgagcgcccgatgaaaagtgacggggagggcatgatggaagcggtgttggactgttttgagcgattggacgcgccacaacgcaaatgggaatatgtcactctgttgcaagtgagtgaatggggcgtaacaaatctaatttttgtaatacggtatatgagcaatgtacggtatacagacaattagcacagggtttcaacgtttacagaagattattgtacattttaatgattttttgacccaaaaacagaaggcattatcaaattaccgacacagaaaactcaattttattaatcattattttgttattttcttaatagaatcacgacacggcaatcaaaacgcgtgttcaaatggcacaaattttcacttggatggacggagcaaacgatgttgaagttgtagtcccaccacatggacgagtagacaaaattacaggaatggactggagttttgaggcattgaatttgttcaaaaatggtacataaattcttaagaatacaatgcttttttaattttcaatttagcctaattaacaatttttgagcaatttttggtcaaatttaggataaaagaaaattttcatttggtagagatgctaaaatttagaaatatctattttctttcaaacagctttatttcgtgggggatgtggattccgtctctggtactctcatttttggggggggggcagatttaaatacatatttaacaacggttctatgggcatagctggcgtttgtgcgcgaaattttcgcgcccaaactacgcaccggggcggttaactactaatgagccattgaaaaaatttcttaaaatgcatctgaccagggattgcactgaattccgattacgaaaattttgataaaaactgtaaattttcggaattttttcattattttggacggattccgatttcccaaaaatttttgggcctcgggcacttggatttccgaaaattttttgacacctcggaattccatccctgatctgcacgtgattctgcctccataataattttgcgaggcttttttgcagttacgcgattttcgttgattttttaaaatccgatatcacaaataggaatgtacctcgtctcttccccactcccttgagcatggtctgatcaagacaagggcgtagccagacccttggcttcgggggggngggggggggggggggggagggcttaagtcaaaaattcgatttttgggggtgtatttctcgtttttcagtcgattttgaggggtgtatttttatttttttgaaatcccgaattctggggtgtattttacaaaatttttcgccgttcgctaaaaaattaatattttttgccattttggtcccaaattttcaaaaatatggtaaattgagggtccggcggtgccgataggcgtcgccgggaaaatttttgagtatttcaatgcaattttgttaagaaaattgcttaaaatttcaaaaaaatttactgaaaatttttacttttttgggtttcgggcggggctttagccccctcaggccccccccctgcctacgcccttggatcaagagccttttcaataccaaattggccaattaaagtcttaaaacctaatctcaataaataaataactaacaaataaatttttttacccttcaattatttacaaaaaaagccactctgaatactgctgttccgtctgctgctgctgtccatggcttttcgccacatttgctgctttcaaaaggctatttcgaaatcagtctgacccgtgccatggtccgcttcattcgaaaggagctgaacctgaccgaacttgtccgacgaatgaatct

SEQ ID NO: 23912 - DNA, 1329 bp, Heterodera glycines
acaaaaaaaatagggagccaggctcgaataatatttataatgtttaattggttgataaaaaaaagttataggccaaaacaatttgggaccgaccgctaatggtcgatccgctaattttctctaccaaaaaaatcacctttttctggtccgggaatatttgggaaattgtataaattaataaaacagtttttttcacaataggaagccgaattcgcttcgctattgttagtgaacaggccagcaatactcctcaattcgctcgtagtcgtcctcccaaaaatgcctttccgattaacaaccgccggcgcagtcgccggtcaaatagcggacgttcttctcgcacttattcaaggtgaaaaccaatttatgttattttatctaattattgttataatatcttttaaaagacacataaaaatataaaactaattgatagtgtcaatgaattcaactctataggtctattcaaaatcccgttaggtctcgttctcctcttgctcgtgatcgccctgctactggtagagccatgtctgttggtggtgctaacaataagaaagcacaaaaggagaaaactactgaagaattggaccgggagttggagcagtacatgcgtgggaataaggtttctgtccctctttgtattttggaaattctcacctcttattttcagcatcctcgcatcaaattggattcttgaactcttttggatctatgaccgtatcgtaagcatcggatgtttcactaaaaactgatctgccgtttatttcatcatattacaaattcaagaacgtatttctatccattatcggttttaaggagtttgattttgttttgtttttcttttgataaatgtatgtgctgtaaacaatttgtttgttcctgaaatgtattaaaacataaaaaataattagattaatttttgtcatctaatatttgaacataaattagggtaggaaatggagcagagtgaaggaatctcggtcggtgagcagcagtcattggatttcacaggtggacaaagtttggcatgaaatgccattgcctttccatttttaaggtgtgcactcaattgggagcgaatgttcttttgccgccccatccgatgatatttctgtccgaataaattctgcggaagctgaacttgccggtgggatgggagatgaggatggtcagtgtcactttgacgaccctctcgagccaatcggtggcagtggagtgacggagtcggacgatggacgcaatgggattggcgagtcaatgttctggactcaatccattacgccagggaaattttacagaagagtatttccagtttatgccttttattaa

SEQ ID NO: 23913 - DNA, 1284 bp, Heterodera glycines
agagacactgtgctgatgaggaacggtctctttcggttaaatttgcacgtttcgcgaagtgcccatttttgcactgtcgcgaaacgccccatttttacaccatttttgcactgtcgcgaagtgcccatttttgcactgtcgcgaagtgcccaattttattgatttttatttttgcacttgtcgcgaaatgacctagcaccattatagtttacttttataaatttatgattaaaatttctaaaaattaatgaagagtaaattaatttattttttcctaatgtccttgtacgacggtttttcttccttgcaggtcttcaaacgacttaccaggaaattgatattatttgaaaagatactataatctattaattaatattcttgtaaaggtcagcttgtacctcgcatgtatcatattttgcttattgtcagttaattcaattttaaaattaaaatcttaccagaggtttttattctctataaaatgaatttttaattttatcattaggttaaaaaaatttctaaaaatatgcaattttttgtttttaattttattcattgaattgattacgtgtaattaatataattaaattgttctataacagttcatcattaattaggtataagtaaatttcattatattaaattattataattattgtactataaatttttcttattttatttttggaatttttagattgttaaaaaatttttatatactttaaaaatatcattttttaatttttatttcactttcggtacttcaattttggtgactaacaaataggcgtttgattctgtatcaattgatttattacttaaaaaaatcaaaaagattggaattgaaggaaaaattttttaaatttttaactaactttttaaaaaatcggagttttaaggttaaaatcggcgaagtattgtcagaaagtttcagcatattttcgggagtgccccagggaagtgtcgtgtcttagggccattactctttttaatttttataaatgatctgccgtcctttattgcaaatgaagcatcatcagttggcataaaaatgtatgtcgatgatgttaaattataaaacaaatcatttagataaagcaattgaggcttttgaaaaatggtcaaaaataaatgggttaaaaattcaactggaaaatgttttgactttatttaagaaaaaataataatgaaaaaagaatatttattaactccaaaatgatttcaaaagtctggaaaatgcacgtggatttgggaataataattgattcaaaacttcctttttca

SEQ ID NO: 23914 - DNA, 1900 bp, Heterodera glycines
atcagtcaaacccaagcaaattgttagcggttgaagttcgttctatcgaggaaaggggccgagtttcggatgatggtcggttgagggttggagaccaactcgtcgaggtcaacgaaacttcgtgtgatatggtaaaaatggcgtcaaatggtttatttactaagtaaaagtcccacttcagatttcttttgcgcgtgttcagcttcgtctccgtgaacttcagtccatcccaaatccatcatttgcattttttcgtcgcatttcgcaaccaaaacattcgcagaaactcacgcaaaggattttgccggtcactacagctttacaaattgggaacacttctcaaattggagaaacaaaaagtgttcatttgaggaaaggttcgtggcattgtgtttaaataacttttcaaatcttttccaatttaggtgaagatgggttcggtttcacttatgcgggacgcgaatctttcgcaaataatcgcaaggaaaacctttactatgtgaagggtttgcgcaaagagtgtggaggaattgccattggcgacagaattttgcaggcatttaaagaaacttttaaagaaatgttttgatctttcagattgatcaaatgtccctgtcagaaaaaagtcagttcgaagtaacggcgttgttgaagagcaaatcggttggggatgtcattgagctgctgatcagtcggaatgttgctgaagagccaaaacaaatgaacgcaaagaatgaaaaagaggacactttggaacatcatcagtcgtccgatttgatttttgacagtttaaatgcacacttttcgggaagcaccgatttggaattgcattgtttggaaattcctctcaatgacacgcccggtgctggcttgggactctcactgaaagcacagcgagttggcgccacggatgcgggccttttcattcgtagtgtgagttaatagtcatgaataaaaggaatacaaatttgattacgatatcccattcttattgttagatcctccacggttccgcagccttcaaagacgggcgcttgcaagtcaacgaccgtttggttggcatcgaaacccaaaatttgcttaactatgaactgaatggggaagctttggaggcatttatgcggaccatttctcagttgcctcaatcgaaacattcactacggtgagataatgctaattttttgatttatttatttttgcattatgtaagactattcgtgctgcgtaaaatgcatcaatcgcgcgattcgaagccattcggtggtggcgcaagacgtggcagtgacagtgatttgagtcagctgtcaaatttcgaccgtgaagcgccttcacggaggtctttaaattaaaaaacgatcgattcatggacgaatccttttcaatcataatcctaattactttggcacatttactctattagttttcctttttttcgtttaggtcgatctctgaaaaacggtcgctggtcacccgcagggacccctctcagctcagaacctatcaaggaattgtccatcaacgccaaatcagcggtaagcaatgagaaaaccttctttttcactctgttacttctcagctcctgcactgtcctcaacggcggttgccaattcgactcgctctcgacgttcactttacgatgaacttcgaagggtccgttccacgcattccgggccaagcgccaaaaaacaacggccaaaaacaatgttttatgtggacgagtcgggcgctgcagtgacatcggaatcgagtctgataccaaactttatcgtcacaaattaatgctttactattaatagcgttttcctcaacttttccaccacacactgtcagtagcgccgtcacaagcgattccattaacaccacaatggcactattaatgcctatgctcacaatctttcgg

SEQ ID NO: 23915 - DNA, 1867 bp, Heterodera glycines
ctcgcgtataatccgtgcttttatactcggtttcattttctcgactcaaaaagccacgaaccattcttttaaggacttcgatccaacaaagttttggatttgcttgtctcatgtctcggctcgagaaaattcccttgtctttgaagtctcggggttttaattgggtcgagagtgtagaacttgagaacagtcttggattgtttgctctatttcgagtctcgtctccaacaacactactagtgttcaatgatcagatcgggacaccactttattcatgctattttgtttccatactgtatcattttatgtgtttaactacggtattgcgttgattgtacatattacacttttgtatttgcataaatggtacaccacattttgatttttgaatttttttatcattcagtattgaattacaatattccttgaattgtgtaacttatgaaattccgctacgaatattaacatatttaaaattttttagttaacaattgctatacttctaggacctttgtacgatttcgagtttctaggttgagtctcggtccgtccgtcctgttctttgtgcggaacagtaaaagaccaagccggggtgggacttgaagccacaccccagtaatccgtgccgtactcttccaattactatgtaggcaaaatttcgtttaatagcactagaagtgaccaaatgatcatagcattgctggaacattcctaagtctgccaaggggggaaaaagtcctaaaattgcttacaataaattttttatttctcttgaatatgatttatccaagtattctcatattctctaccataattttaattttttttaagttttttattgtattttctggtttaggaatcgcttttttcttgacaccagcgggctatcactgtattgaagcgaaatccactggttactgtttttgatttgtatggttgaactacggtattgcgcttttgtgtaagtgtcataccttttttcattctgttttaccgtttaatattacatacattacaatattacatataaaaataattttacagtatgcattgttcggaaatcacaaaaatattcttagaaaatgtattatattcgctttggcgttttttgccgagaaggaatcacattctgaagtcccttttacgaaatgaacatcaaaaaatggaattctgttgacaattaattggtgtttattctaaggcccggatgaactcctaaaatagtaaatttattagtgatcaaacaaaggcctagaaaaagctggtcagaaaatttaaaaaaatcaccaagcccaaacactcctccagctcctacaaaataaacaaagttaaattcatttttaactgttagaatatttatgcttactcgtcggagtccattggtccaattttttttgcggtactttaataactccttaaataaattaaataaatattaatgagcaaaatatatatttttttttattaccgtaattaagcgcttgtcctgaatttttataaaattaaaattgtccgagctgaaatatctgattgcttatttttttaccatatctcatcgtaccatctgatttggttcgtctctcatcctctaaacataaaattaaataattaaagattttagaatttagaatttaatttaaggtcgctatgagattatgaaatgattgattaattgtttcattattgtttggatttccaatcaagtcaaaaatcctcaattttaatgatcaaatgcaggagaaaaatttgggcaccctattaaggattaaaaaaaatcgaatattttaatttgggcaccctattaaggattaaaaaaatcgaatatatagtttgggcaccctattaaggattaaaaaaatcgaatatt

SEQ ID NO: 23916 - DNA, 1830 bp, Heterodera glycines
tgttcgcgccctttgtctgccccaattggacaggccaattcggccgtgtcagtccctttgtaaagctgtcgaacaagtcccaaaacggcacaagacccaaatggttttgaacaccattttaagggttgtgccgaacggatggccaagtacggctttccgtggccttcgatgctcaactgcagccaatttccggtggaccacgacatgtgcataaaacccccgccgatggcccaagcgaccgaaaaaaccaccgaaaaacgcatccgttggcactttttaacttataaattgtgccgaattttaaacggatttttgccaataaattaaaataatcaattactcgtgtacatgtaactaattgttgttatttttggacagaaagcaactgcaaagcgtgttctcaagttgcgactttcgaaaatttgatggacaacttttgccgttcctccgtcggtgggcattcatttccttcccatccttttatttatttaattcgctttaatgcttaattttgccaattctcagcatttgtttctctcaccgctctcttttccgtctctctctttgcccaattatttgccctcccaaatttcagtgttaaaagtgcgtcttcgtcctctgaatgcgtctcacattgaaattttgcgtcgaatgcgcgtcttcaaagatagcgccggcggagttcgaaatcgaagttcagccgtcgcctcgggcgacaggccaacgcaagtgattcggttggcagagatcggagagcgaaggtgccaatgccgacaatgggacacaaacaaacgaaaccagcaattgccaggtggaaaaacaaaaatagcagttggagaaacaattcattttaaaaggcaatttcttattaatggcatccgaagagcgaaggaacggagccgagtttcaggcagcaaagctaatcgtgccatggaaacaggaaaaggtgaagcaattgccaaaattgacttaaatctttgacaccgattcaaaaaatagtcgagaatttagtcaaaatagaaatttattttctaaataaaattttcaaggcgttcaaaacggcaattcggagattcaaaagggtgaactgcaacacattgggacgagaaattcgggaaagtgtgctaagtcaaatgttcagaaagtcatgaggaggcaaagaaagaaagggaatagaataggaggagaacaaaaacacagcagcagagagaagaaaagagcttcaaacacctcacaaagtcaattaaaatttagtaatcaattttaaaatgaattaaaatataaaaataaaattttgcgtcgccaaaattgttccaaagcaaattgtgaatgatggccacccgttaatgcacttgtttaaatgctttcactgtcgtccatttcgataacttccgattgaaatgcgtccgcttgtctctgtaactcggctaatccggtgatttgctccaactcggcaggacattggaagattcggttcaaaaattcaaatccctcagtccggtagaactgtttgacctgagagaatgtaaggataaaatgaagcatttttaaaaattaaatggagaaaaatacaaagacagtaaaccaaacagtaccgtatgcccacacgctgtgcatcggtcgtaccgtcgtacggtgggcatcatcagatgaaagcgtgacataaaaccgcggatttggtgcggagtggcgcccaattgactcgcgttttcgtccacttcggccaaaagggcgggcgcttctgcgcccaattcgtgttgaaggacagaagccaacagttcggtggcaattcctaacaaataaaataatattaaataatgtaattgataa

SEQ ID NO: 23917 - DNA, 1809 bp, Heterodera glycines
ctgctcgagcgctcaccatgggaactgtcgatgagtcacttttacaatcaattgagtttgaacgaataattctggcgccttttcacgtcttccagggcattggaaatgctctgatcaaagagctcgaagcatcgacggaaaacgcggaaattgcgaacgaatttttccggagcatcagggcctggagggaagcgttcaggaaaaaggacatgacggggaactcaataagaaaagttctgattcatgcggaccaattggagaggtgttactcagctgaatggccgcaaatcatttgtcaaaccttgggaaaatttgcaaaaatacaaacttttacaaaagtgcatttttatttgggttttttgaaaatcaaaaataaatttaaggcccagccattgtcgccacgggatttggacgaattggaaacgtcgattgatcaatttcggacatttctcgacgatcagtcacggatgcgcactttgctcgccttaaaaccaaaggtccacttggtgttgaaccattttgtgccgttcgccagacagcacaaatttttggcacttttggacgagcagggtcagggtcataaagccttttgaaatttaagccctaaatttttttaggtgatgaagcattgcattcagtgtggaggcggttggaacagctttggaagacaatgcccgatgaagaacaaatgcgtcaattattggaacatcattttgtgtcaaattggcttctcgacacaggaaaaattgacgaaatgaagcgggtcagtttggcgaaaaatgggttcaaaatgaaatcccatgcttttggaccttgaagaacaacaaggagaaatcggtgaccggcgggagacggacgaagaaagcgatgcagaagaacaattcgatttcgaataaacccagttggatttaaacttttttttctttgattttacagaaaatagctatgaataaaattttaaaaaattctgagcttctttaaaaattgtgttatcacttcacatatatttatttgctttaaaaacctcaaaatacagctacaacatgcattggattcgaacctgagaccccccattttttgaccaactcacagaccactgcgacgaaaaatccaacttaattgtacaaggagcccaaaattgaatcgccgtgtttaccttttaaattttttagtaaattaaatctcggttttttgttcaagtcagggtcgagtttcgaatttggtcaaaatgcatgtcataatcgttttcagcgacctctaaaaccccaaaaatatgttttccttgtaatttatgaatttagaatttttgttcgaattcgggttcgggattcggaattttgaaaaaaaatgtcatattcgtgatcagcgccccaaattaccctagaaatgactttttatttgaaaatttcatgagggtcacaaaaccgaaaagaaccaaatgcaagagccgatctcgagttaataacttcgagtcgcagggggtcaaaatatggaactatgcaaaattaaaaaaataaacaataggagaaaatttttgcaagggcaagtcttttctttttctctcattttgacgcactttttctatctctctaactaacatattgttcaaatccataattaatagttgtaattttttcttttagtgttctgttttttatttattgtaattttttcttttagtgttctgttttttatttattgtttctttatttgctttaaatgaattgaaatttacacacaacataaggcgggacttgaacctagaacccccttttggtgactaactcacagaccactgagacaaaaaat

SEQ ID NO: 23918 - DNA, 2621 bp, Heterodera glycines
  unsure (1)..(2621): unsure at all n locations
aattttcaaacagtgggagccttacaattttcagtcgacccattcatttctgatttgccaacttcgtccaattcttttaccgttcaaaatgtgaatatttcgtcgcccaaaggtaagaaaaattgctagtcacgttaaaaacccagcaaatagctttacacactattagttaatttttttgaaaaatggaatggaaaaggatatattacaattattgctcagtgttgaattttggttcgtggcttgcgattgacccaaatggacattaatccgtgatcagaaaatcgaaacccatccgaaaagtctttatttttaactactacttttgttaaaaagggttgtgtgaaaaatttaaaaaatggttattccgaagatagattttcctggaatcaccgtagaaatatttaattttccttttttttttgcgcagtgctaaacagattccgagtgccctctccaacgacagtcggacttgacgaggatgtctctgccccggtgattgcagcggcgacaccctcccccggagagaatgtcctgccgaggccttcgcttccaattccatcgccgccccttcggcctctttccccttctccgcccgcttcaccgccacaacaactgaaaagaaaggacgccgacgtccattcgcccgaagggtcggaaagtcgacgcgcgaaagtggcgcgagtggagtcgccggatgtactcaaattctttttcatcgacgcttatgaggacgccttcagaaatccgggcacgaatttgcctaagttttcgaattatctgtcccttttttacaggcaaagtttatttgtttggtcgggcgaaggaggaacccagcggcactttctcgagttgctgtttggcgctcaaagacatttcacggaaattgtttttcattaaacgggaaaaggtcgcctattcctttgcgttgtgctaattgtcttttcccattaattgtaagattctttcctcgggtattccggcgacggtggaagacttggaaaacgaagtgcgaacggtgttcaagacgaaattcggaattcgcaacatcaaatgcaaaccggaagtaaatgatggacataaaacacatttctcaataatatttgtcgatttgtttagctaattaccaagaaatttatctgcgctgatgaatctgtgcccaaagagtgccaaacgatggaagtttgtgtaaatgtgagcaaacaatttaaatgtgtgcaaaaatccaatgtttggccatttcagtggaaccccgaacgaatntccgtccgacctttctggtgattgctttagtcatgtgatgaacacgacggcaacggcattcgaacgactgatggtcgaatgtgaaatatacggaccatgttggcttagcgtaagaaacgcgggtataaacaaacattcaaattggttagacttattctacaaaagttccgcttctaagttctcgctgagtcgccagtttcgtactgtccattggaatacaatgtcgacatgagcgaaatgaagtcaatctcaatggcactgaactgtgccgatccgctccctccaataagcattatttctgtgaatgttttgacggcattgaacccggaaaccaaagagagtcaagtcggtcgtcccgttttggagtttttttgtttggtcaattttccaccttttcagatcgtaatggtttctctcattgagcacaattgtaacttggaaaagagcaccaatttcgacgcaaaaatgatgctgaacaaacgcttttgtgtggttgcgaagcttaaaaaggggctgaccttaccattcgattggacagccaattgaaggccaatggaaatgacaaattggtgcgcaaagtcggcaacgaaatttcgctgttgaacattttcctcatgaaaatggaggagattaacccggatttgattttggtgtgtttataaaaagaggtgatggacagtatcgtgagaatcgtcttacaattgtcagggtcatgatctgaatgctcagttggtgctgatccaaggggcgattgaacggcacaaattgcaacgttgggaccgacttggtcggctgaagcgcagaaatcacatccaaagagtgggccattccaagtcggcgagttgggatctgaccacgggaagactttgtctggactcaaagtaattaatggactaatgagaggaaatttgaccttgtcagcccttttcagaacagcggcgatggaattggtccgtgcacggagctacggaatggaggaattagtcgcgcgtctgctcaaagttggaaaccgcggcaatctttccattgaccaaatttctgagccctttttgtacgaaagcgggattatgttttaaacagtagttgttactttttagggaaacaaatccaaaaataaaattgattgaattgatcaaatggaattggaacgagaattttttcgcgatgaaaattgtagagcatttgaatgccattcctctttttgtgcaaatcactcaaattgttggcggtgtaatggtgattttgtcttttaaaaattgtttcttattcaaatgcttactgaatttgtttatttcaaattccctttttttagtcccgtaagggtatgggtggacgtgccgagcgcaatgagtatttgc

SEQ ID NO: 23919 - DNA, 1161 bp, Heterodera glycines
agaaaaaccgcgaaatatgtaaataaaatatgtataaaatgctaaaatatgtacgaatatgtacaaaaaacccaaaatatgtaccaaaaatataattaaaaaattttttaatggttattttttggaaaaaaattcctagtaaagggtgaaacatgcacaaaatgccttaaaaattacctaaattggcttagaatcacttttaattattttaaaaattattttaatatctcatttttgaaaaaaatagattttttaagggttatattttcaaaaaaaaaattttaatttttcacaaaaaattttctataaattctctaaaatcctcaaaatatgcaaaaaataaaaatatatacgaaaaattgcgaaatatgtacgaaaaagtccaaaatatgtacatatatgtaatatgaagaaaaatccaaaaaatataaaaatcccaacttttgttcgcaaacacaaaaaagaaaatgttttcctactaattagagcattgagaatccaaaaaaaaacgtatttatatatgtctaccctagtaataaccgcagcgctgcctccagctcgatgtgcgggattgtggtcgagaatcctgcgaaggaaaatataaaattatgggcaagcaaactcgacagttacccctttcggcgtcttcaaagtgcgggcagttgtagtcagcgtccaccagacccttggggtacgtctccgcgcacttcaggcagagtgagaagagggtcctgttgttccaccgcattgggatgaccggaatgtcgtagaggcaatggcgtggaggcacaacgaagcacttgatgattctctccattttcacgccttcgtcgacaatgtgttcaggcgctgtccagtggacgttcttgtccattaggatgacttttggatgaccgacgggggagttggtgaacatgttccttaattattgattattttattttcttttttacctggacgggtacagactgttgaagtctttcactttcatggtttgcccagactctccctccctctccgggatgtgccaatagcatctgaatgggaagaaaattagcataatttggtattgtttccttacccattgacttcgatcgccaagtttttgtcctcgccgatccgcttgagcatgccgtctaggaggaagttgccgtgcttgta

SEQ ID NO: 23920 - DNA, 1489 bp, Heterodera glycines
cggcaatctttggggacgcactcagcactcgggaggtcaaagtaacgtcacaatgttaaaataaacttttcaaaattatcatgaaaaaattctctgtcacacggtaaaaagtaataaatttttgagtgggaactaattatggcttcgtgcaaaatttaatttggtttttgttcgaatttggggttcagattgtcggcatggatttctatgtataatcaccgaccctgaaaaattcctgacttttgttattttatttttttatccaaaaaatacaattttaaaaccatttctggcgattttgaccatcaaagtggaaatcttggtatccttcgaaaactctttccatagtgtaaaatatcaggatggtaattctcaaagagcaggatggtgttagatgtgttaatttaatgacaaaacagcaattgataggcaaaattcaaaataattccggtggcgctaccatcttgttggcaacaggttgtagacagtcagggcaattactttgttaagtagctttttgatcggctttgttatgattgttatttttcattttttgttcataaatttttttccttcaaaaagcgcccttttttatgcaacgacctagtattttttttctgttttggcgtttcgtctctccatttttttttcacttagaaagtcccttttttgcacgacaaattgctcgacttatacgtgcatttcatccgcagtgataaaaatggacaaaaagaaagggacgatggcactgatctgttgacggaaaacgaatgtcggcagaaattgcgtcattttttgctcttctccgaccatttaaatagcaaaaaagttgcggaaacattcgtgaaggaaaaaagcggaaaatttcacattgaagcgattttggcagaagcaaatgttagtcggtgttttctttgaaaaaggcgacaaaaaatgaaaaaaaggagaggaaaaacaattaatgatcaatttttaaacaattttgccttttgaggagcacaacgccgtggactgtcttcaaaaactgatgggctccgctgccgaaactgacttttccccctccatgaaagaactcttttccgccggccaacttctctgcacgcgcttcccaagccccgaaatgttgacgacgatgctcactttgcatttgcgtctttcctcgtactcttttattttcattctctaatttccattcgctgtcagtgccgacccgacactccgtgccaacattgtgcaaattttggctctgttggacagtgccactgacgcagccgcggtgctgcgcaatttgccggacgaccttcgctcgtctgctttggtgtgcagttttcttcgtcgccatgtcgcccaccggacaaataccaaacaatgggaaaaaatgcgtatggaaaaaaacgccgcatttttacaatgcgactgatctgaaaatgcacaggtcgagaatttggtgcccgagaacaaagccgcacagaacgcgagttgggcacgc

SEQ ID NO: 23921 - DNA, 1478 bp, Heterodera glycines
actacaataggcacctatcttttttttctggtagcctacagtacccttttggggggcgtgcgccggaggggacgcgggcggccgtcttcgtcgtcgtcgcggggtcgggggggacgcgggcggcggcgctcgtcgtgtcggtgcccaccttcatttcaaaaatcattttttgcccacagaccattttaaatcgatttaatttttgtataatttcagctttttgtacctgaattaaaaatggatgcgacaaagactggcggtaacaacaaaaaaagtcgtgccataagcagcacagacccagcgaaagccgggggcaagaagcgccggaacatgcacccggttgtggccctccaaaaaattaggaaaacagaaaaaagccccattacaccccacgaaaaaaagaagcaaattttgggtctcgatttcctccttataccgggggtggaggtaatatggaaaatttgctaacccaattcatttgtttttgcatttttagcaaattgttgacatcactccgcagcagcagcaaaatgtcgccgaatttcgtccaatttcaacctggagtgttcagcagcagcagcaatcggacccgcgtgcaatattgaacgtaatttgggaggcggggggctgcccttttgacaggctttaatttgtaagcctatgttcagcagggacatgttgtggttggcgaattcgccatggccggcgacccctcagcacaacagcaacagcagcaaccgaattttcctgcgtcgcgcatttccatttcggttggtttatctgtttccctcaatccattcattcccctactaatttaccccccccccccattttcagtatagtaaaccgtttgagcaacagcagcagacaattatgagccaacaacacgagcaacggcaggccatcatggagaggattcggcgccggctgctctccgagctgtccttaatgtaagcggccaagccgctaccggaagacatcgaacattgcgcagatacaacgcgcatggattgacggacgtcggctggcttctgcttggttggaaggagcaaatgctgataaggtgatcagcatttggacggttccgggggggcataactttcaaattgctttttggtggtcaacagcgaataattttttccgccctttttcagccgattgaccggcgtggtcgcccagtcgtgcgtgatgggcggaccaaacgccaaatttcgaggacggaaattggtgctgtagttcgatcgcgacgcatcacagcttttgtccgtcaaggaatgggagcggaatgatgggcgtcccagcgaattggcacgggcgcaaccgggtgaccgcgtgttgctacaacgactgacacgcaaagcaagggcgcggccgtcacttcgctcgacaacacctttttattttcttgctcatttggacagttttccgtgttgcagatattggcgcacaccggaaatggtaataaaatgccggggggt

SEQ ID NO: 23922 - DNA, 1363 bp, Heterodera glycines
  unsure (1)..(1363): unsure at all n locations
tttattattgaaagtatatttactttaggcgatatttttcatattatttttatcttctcactaattgttgtttttatcattatcaatgatattattaaattcataggttgaacataacgaaaatgccaaaattggaaagccggtgataaaatgtgaaccgcaaagtcgctgcttggccaaatcagaagttgacaattatttgggttcacacaatttataatttatattaattttcatttccatggcaacatttcttttttcatttatgtcattttaatcattccaatttttaaattttttgtttgaataaaaattgcaatttttgaaatatattttatttttaggtgttttgcaatttgcttattatcaaaattaaaataaaaaaagattaaactcaaaattaattcaagaagaaattcaaattcaaaataatattttaaattatccaatcattttttataacaaaatgttttaggtctactgaattgaagagatttatgtttttgtaagtagaagaaaattccaggtatcaaagctatgctcactgaatacaaaataaattctatttaatcatcttattccaaaaatattaaaattccatgaaataaatatttattattctttaatttctatgataaaaatgaaattttgtgtcatttgtctcgttttgttccgttagccatttgtccaatttgcctcattttgtccatcaaagagccatttgctcaaacaaaaaatattcactcgcgcaaataaaaaaacagaaaataacacataaaaatgattattttatttatttatactattaaattacttgtaatgaggcaataaaaaatataaaactcgaaatgttagaaaatcggttaaagtaagttttcgtaaaatagttatgctctctgacctaatagtctttttcagccaagttcaatcaaagtatttcagttcagtttatttccatttcttttaaaaatttctattttgagttaaaacgccaaaaatttaaaaaaaattgaaatttttgatagaataaaaagaaggcttcggtttatgaaagtggggtaaaaaggtgggaaaggaaacaaaacaaaaaactatccttttttaaattttattattcttcgtgattaatctttttaaaatgtttcaatatgataaaataaagattttaaactanagttgaccagcagcacttttttgatttatttttgtacaaatataaaactcagatattttttaactggtctattatttaggaacaaatctcttattcccaaaaatattaaaattcccatgaaataatatttattattctttaattctatgataaaaataatatttttgtgtcatttgtcccgttttgttc

SEQ ID NO: 23923 - DNA, 1119 bp, Heterodera glycines
  unsure (1)..(1119): unsure at all n locations
tcgcctctctggcattcccctcccatcccttctctttccctctttcttacccccccccccccccccgccatcccttctttctctttttgtcccttttgccgatttggaaagggcaaaaatcgtcggcccaaagaacgaacaacgaaataaatgcattgacaaaaaaatgtcctctggggacgaacgaccgttttcgtttctcaaatttattcgtcgttggccgggcggagaagaaaaacaagaaagagagagagagagaaagagagacaaggaaaagacgcaaaaaaagagaggaaagataagaaaagagggaaagggaagagaagagagaggaaaagaagctattcgtaattcgtgaaatgaagaatggtaagcaataaaagtcacgaaggcgcgagagaaggacacgaacagagagagagaacaaacataaatttcttctctccctttcccctctctctctctcgtcatggggatatgaaaattgaatgtaatgcttatgatgatgataatgatgaatgacatttatgtaatttacatttcgggaacatcaaaacacgtgagcggggagaaaagccgcgcaggatttgggaatagtcagcagcagtcagaaagaacgtcggaagaggaagcaacggtttctccttccctccccttcccattccatctcaaaccaaacaaattcacttgtacaacactttttccttccaccatttgtggcttcgtattaacgcattgaaaggattagcaaagggagagaaaattaggatgaacgaatgcatgaaaatggagaggagagttggaaagtgaagatgcagcagcagttagagcagggtagccagatctgaggcattagcctccattttgtgggtttttgataggtcaatgaggctaaatttgcaaaatgaggctttttgtgttttttttgagaaaaaccgcaaaataaagaattttttaatgaaaatatgctaaaaatatggtcaaaattcttaatttttccccccggcggcgcctatcggcaccgccggaccccgtgtcccccaaaagttttttgggaaaagcgccgcaaaaaagtcaacttcgtttttcatgttcagaatcccanaaaaatgcttattt

SEQ ID NO: 23924 - DNA, 1037 bp, Heterodera glycines
catgggcgacattgacgcgaagaagttggctgatctgtacaccaagaagtcccaccacaacaacttttcggtgatattcctcacccaaaacctgtttgacaaggcgatgagagtgccaaggtccaatgcgcagtacatctttctgatgcgtgcgcccagcgatatgttgagcattcgtaatttggccagccaaatgtttcctcgcgagcaagggtttctgatggacgcgtataagcaggcgtgtgccgatccgtacgggtatctgttggtgaccctacacgcaaacacagacaacctcttacgactgaggacaaacattttcccagacgacgaagaaaagattgtctttgtacccaaaaatggttaagaagcaaatggttggacagcgggtgttggacaactacgagtatctgaagtcccttgggaggacgacatctcacaagaagaggcgtcatttgttgagcagtgcaggttgtgaggagctgctgactctggtggagatttgcttaaacctacttaacggatccttctgtttgacgcggaaacagaaacaaaaattgttgccttttgctaacaccattcgacggttggcacgcgtgagaagtgagcagagtgcgagaaagctgatcttacaacaacaacaaccacagcaggagggaggttcactgtttgcccctttgttggcacctatactgttagaggcagcacgttatctgctacgcaaagatggccaataagctcattcttctgccttttgagcattaccgaggattagttgcagcgagagagggtgtcggcgttgcgaaaggagacgaggatgtggcagggcagacaaatttgggattcgtcaaacgacagctggagaccgcgaagaggaaacggacagcgaatgtcagcgaacgaaatgtattgtacaaccagcagctgaggagatatttgaagctgagaaaggaggtgaaggacaggcccctcaaggtacagctaagcaacggtgcgcaactgctgaataagacggtggagacgggcgtacaggtacg

SEQ ID NO: 23925 - DNA, 1085 bp, Heterodera glycines
ttctgctgccttgcatatcggacaaatgccgtactgttcaggcaaattgactgtgatggcaccggtgccggtggaatttgaaacggccctttgcgacgcgacgtgccgcgaaggggacacgctgaagctgaaggcggtgcttcttggcgagccgatgcccgacgtcacctggttcatcaacggcaagaagttggaagagtctcagaacatcaaaattcacgccgacgccggcacgtacacagtgacaataaaggtactaaggggcagacgaattgtgacagaatgccaacaaacaatttattgtgccaaggacatcaccatcgactactcggggctggtcgtgtgcgaggcgctcaatgagttcggcaaggcgtcgtcgcaggcgacgctgaaggtgctgccgcgcggggagccgccggactttttggaatggctgagtaatgttagggcccgtcccggctcacaggttggaggaggggaagcatgcatatttgaaatattcattttatttttattctctgcctcataggtgcaccacaaagtcgtgtacacgggcgacccgcgtccgtccatcgcttggttcatcaacgggcacgaggtgcgcgactcgagcgaaataagcatccaaacggacagcaacacgtccgcgctggtgatcaacagcttcagcccggacaaacacgtgggagagatcatttgcaaggcggagaatgacgcggggtgagaagcattttgaaatggagggaaaagccattaaatggtaaataatgagttaatgactaatgcataaatgaaaataagtttaaaattaaaattttagtcattttatcaaaatctcacataaaatttaaaagatttctcggaagtgtgaattggaaaatcagaacacttttctttaaaataaataaataaattaattaatatatttttatttagcgaagtttcctgcaccgcaaatatggcagtacgttaatcggccttttaaatgcatttgtttgaggagtaatttttgtaaatttgatcatcagacgtacacatcggacatgttcaccgagtcggaaagcggctcaatggtggaggaccag

SEQ ID NO: 23926 - DNA, 1436 bp, Heterodera glycines
atttatcattcgattcctattttctttttgttctgccttctcttttgactccgatcacttctcagaatatcccaaatttgccattgatcgctaactccgatcagttcctctcattcgtccattatgactttgtctctgatggtcgaattggaacagcaccaccaccagcagcagtacagtcagctgtttggcactgacgacacttcggtgccaacagtcgtctcatccaatggcattttgactcaatcggcgccaatgtttggcaccgccggtgacgccaatcaaacgttgaccaccgatggaatttcaattgcaacaaccgcaacgggcaatgccgatgactgcgccaccggcgattcgtcgtcgtcgaccccctctctgcccgacgacagttgcggcgacgcgcgacgaccgtcggcgatggcaaaacgcgtcgacgacggcccttccgcgccctataaaatgggctatttcggcgcaacatcgtgggcaatttcaaattcacttttgtgggcttttcaagccaagactttccaaaatatttaattgatttcccccccccccccattttcagttatgtcattggcaatatcatcggttccggcattttcatcactccgtccaccgtcgtccgttgcactgattcggtggcactttccctcttagtttgggtggtcggtgctctgatcgcttttctcggttccctctgttacattgagcttggcaccagcataagagaagcgggttgtgactttgcctacatttgctacgtgaaatggtgattaaatgccgggcccatttattcacaataattcatttattttttattcaattattattatttttacatttttcattttattttctattttccctctcttcccccaggcattccattgccttctctttcatgtgggtgtccgttctgatgacttaccccgccacaattgccgtcatcgccgaaacgttcggccaatatttaatggagggccttcgccacttttacgccgtccccgccgaatgggcgcccgtggcacagaaatgttttggcattgcgcttctctgtaggtgctaatttcaaagcaaaccaaaggcatttgccgacaattctcccagggcttatcacttggatgaattttttcgcaattggcaaattcgccgcacgttttcaaattgcggcaacagtggccaaattggtgcgcatttccatttttgggaaatatttattttttattaatttaatttatattaataatttaattgatttccaattcacagctctcttgcgctttaattattgtgatgggcttttatcatttgttcttcaaaggggcggcatttgagcagacaatggaccaaaacacaaagtgagaaaaggaggacagaaaaggaaaaaacagattaattaattataattaagatggaatgttggcgaa

SEQ ID NO: 23927 - DNA, 858 bp, Heterodera glycines
caaaattttgcgattttgagcaaattttgcaagaaaaatagggatttttagggacggccgtgccgataggcgccgccaggaaaatttcacaaattttgaatgaaatttgcgatgaaaaatgagttaactttaattaaatttattatttaatttatttaaaaatatttggcattctgtcttagaaaatttttcaaaaaaatcaataaaatcccgcataatcccgcacaaaaaaacaaatttgcggatcccgctgcgggattggaactcaaatttctttggcgggacgggatcccgcgggattaatcccgcaaatcccgcattttccaaaaaattcgggattgcggaatgggatcccgcaaaatcccgcgcgggatcccgtcccgcgccgggctctatttatcaccacttttcacctgtttgagcaaatttggcattaaaagaaaataattgtgaacatttaggcacggaatatttgaattgaatttgattgaaattagtgagtttaacaaaggcatgccaatactgttcctctcgtccgttttgatgttcttcagaacagaaaagactgattcacaaaaggcattggaatggaaaattgatagaatagcagagactagtgatttgagcaggacaaaattggggtttatgaaaatagccacccatttttgatccacatttttcctattgaaccggtcgccctcgagctccttcagtgtctgtttcaactcagcgatctcagcaaacaaatcattcatttcatcagcggtcgtcccacaaaaatgcctatacgcctttcgaactttttctgatgttggttcagactcgaaaatgacccagtctccgatcacttcatccatc

SEQ ID NO: 23928 - DNA, 1085 bp, Heterodera glycines
attgatttcaacaggagacaattgaaaaaagcaaggttttggcacaattctttttttggcaacactatacaagcaggggaaagtgtcaaacattggccctgcactctgatcaggcccaaggatggaagagaatttcatatttcaccgaaaagaactaaaatgaattgattttttccaaaatttcctaattttggaagcaaatgaggatggcacggggacgggttagcaaaaaaacaatattgaaccgtaaatgcaaaagttaaaaaattttttttttgccaaaagggtggcctttcaaattaatttctagcgaaatttaaaaaagcgttagaaaacacaaaaatatttcgaaaacttttcaagaagggtatttgtttatgcaaagtaggtgccgccggaattttggaattgaggagggcgaaaattataagaaaacaattttgacttcaaaccctaattatttcccggcgatgcctgctggtgcctaccctaaattcctttaaatgttttttcacaacaaaacccataaaaatagaaattttgtggggaaaaattttcttatcaattaaagccaaactttttcttaatttccatcagcgcacttatctgcgccgctgggaatcatcttcaactttaaataaattaaggcgctgatgggaggaataagcggaaaataacgcgccaattcgagtggagagaaatttcattgtcagcgcaagtattgcgggaaataattgagtaattcgaaagaagggtatttttaaaggtcgatgaaatgaatgaaccgttggcattgaaattggtgaaataaaaccgaacggagaaaaaggaagcgatcggagagaatcaaaagtggggaagcggggatttcaaccgagattataaatgaattcgaattttcagcaaaaacaacgccaaattgacgaggcgcccaccgacagtttgggcagagaaacagacgaaggccaaagaaagcgaagcgcaagaaaaacaatgagaaaagtgccacactttctttgttttgccctatttgacggaaagggcataattaaatggaaagctttaataaaccaattatgcaaatg

SEQ ID NO: 23929 - DNA, 2033 bp, Heterodera glycines
tgatgagcggcaccacacctttatttggtggatgatcagctcgttcacttggtggtctttgaggctcgtgatcagtgacaccgtcggcggagtgcctttgtggtgggcgaagcgtttctcattctcaggcgcaattgcgaatccctccaatcggctctcgaaacacacttggcaccaacgcatccaatcattctgaaagaaagggacaatgaccaaagagggcattaccattcaccatggggggcaattggacgtctttgagggggtcatcatcaggcactttgacgcactcaaactcggatctgctctgagagaattcgttgctctgaaaaaaggccaaccgataattactaattaagcatgaaatatttttagaaaaatgcaaatggttaaaatcaaccaacagtttgccacaatacttttcgaaaaagatacgatgttccgggatgggtgccaatttaatatgttcactttaatgtgtccaatttaatgtatccccgggctgtgagttttcacgcacccccaccattgttgaagcattctgagccattcaaacgcaccttcgctacacaccactccttgttcggcccgaacctggaggtgaaggttcgtgagtcatcgcaaatgcccggaagatttgtgagagactttcttaagggagtggcgctgaaccgtttgagcacttcgggagaagcgacggcgacgtcgggcaaaagctcacggccaacgacaacctttgggaaggaataaaaacattataaaaagccaacaaacaagctgacaatgatcgcatttgctaccgacaaataaatttccatgccgcaaaagccgaacaaaaataatacaaaaacggaaacaataataaattcggcaaacctatatcagcaaaaattatagtagttgcaaatcagcaactttttcagcttgttcttgccaaaaaggcctttttgatattttttagaaaaggcggacgctatgagagacaaaacggtacaccgtttgcccaactccgttcctctctctttattcagtgttatacaattcgtacaaaagtcaactcctaatccctccgcccacctgttgcatgtattcttcgacagtcatcgccggcttgttaaggtcaattttgcttctgtcgaactcccccaccgtgtaaaatgcctcttgttccattcgatttttttgatcctttctttgtattttatatttcggtcattaaataatgagaaattcaaggtaataaaagtatccaaaacaaaagaaaaagatgacaaaatccaaacaaaataatgacgttttttattgtcggaacaaatcaaataaatttaaattaaaatgtttttgacgttcggcgctaaacaaataaatcctcctttatcatgtgcagctcaagcagtttccaagctgttgccgggttgaactcctccatgtctcggcatattacctaaacaatcactgcttcgtctccctcttccgttcgccccacccattaattactcacccaaatgtgtctcactcgaaccgctttttcagggtcaccttggacaattttcccctcgctgttcttcaccacatttgtcatgaatacttggaattggatgaccaaagtcggcccttggtcggtcatattccccgtgaccaactaaaactcgacgaaaaggttgaagaagacatccctaaaaagtacctccactttgctaacatcgataatgcgagaatccctcgtgttgaagccaatcttttcgtattctttgatagaatttgcgattaaattgaacgccttttgaagcatgaataaattacaaattgattatgattcaacgaatcactcactttctcgtaacaccaatcacgaaggatttcgaagttcatttggtaagttgattcaagaatgttcgggatcatttctttttcgcaaaaacggagccattccgacttgtcgaattcggggtcgattttggatatttgcgttagcacttccgacacattgtctttggattctgaagtttttaatcattcagcaaataaatata

SEQ ID NO: 23930 - DNA, 2493 bp, Heterodera glycines
tgaaaaaagtcgcacggcggtaaataatttttgtgacaaaatttctcaaaatcctaaaatttttttacctttttatgaaaatctaatattaaaatcacttagtatcatcaaaatttctttggtcggcatctataggccccgacggcaattatcgcactcaaaaatttaaaaaatagacaaaaaataataatgctttgaatccgaaaaatctcagaaaactgtggcgagacaattaagcctcaaaaagttgtttgttttaaaaattggtcaaaaattacttttgtttttagtcgccctaatcaaattttaaaatttcttactttaaaatattttcttgtcattaaattatagcggaggttatgcaggttttatagttttattaaaattgtcgaacgactgatccgtctgctgcccccccccccctccattgtccgcttggaacggcttcgtgtgctcgatttgtgcgacaattatctgaccaaattggtcggtttttgaatactttttttcatttttatttatttgtttttttattagactgctcaaatgatttttttggaaaataaataactgaaaataattcacacatttatgagctttttttagccccgttccaggtcttagccccaaaatggaataaatgcctaaacctatttccattttttgtttaaaataatttcggagggaggaatccgaagactttttttgctcttctggcaaaaaaaaaacgggaatttgtgccgtccaaaaaaaggactaacaataaggactattttttgccattttgtggccaaattttcaaaaaataacgcagaatgaaggcccggcggtgccgatataagccgcctggaaaaaatttttttttttgaaattttaatgtattccgttaagaaattttgtggattgactctcgaaccggcacagcacgacgaatgccgaaggactacgtccacgaattgtacgaaacaacgatcaaccaaacgaacagcaatttggaacttcatccgttgatcttccacgcttggcaactcgacaatgagtctgacgcgacacgcttcccgcacatcaatgaattcatcaactcgtagcagttcaaggacaagctggaacagcacattacagcaaggactgaagctttgggcgcgttgaagggcggaatagaaggattcaccatgcgctggctaaaaggcctgatcgacgaagcaatcacatggtggattcgagtcgcctgcgtttattcgaccttcctcatgctgcgcgacattgtactcccatgcactctggcgtatttgctcaatcctatccgagtgactcttctcagcctcttggagtacgcccgcattcgacattccgacccaccgtttccaaaccactcgggatcgaagagggaatgccgctgcgtgaactgccacgaacccccaaaccaccagcgcgcagggcagagcaccgatccatgtcaccaatcaaattggacatgattgccagaacggctcggtaccaacaaccacgaacacagagccatctcgaccccacagaagactcgccctttgggaggccgagacgaaaagaattctgacggccccatcctttttcgcgccggaatgtcggaatttttattcctatcgccgatcaatgatcggcggaattaagagggaggaggcccttcaccaatcccccgcccgccgcgcgacatgttttcgccgttccatccctctgtccccctttccttcaaattgtcaattgtttttgtgtgttcctcccccgccccgcgcacaaattaatgaccaatttgtcaaaccgcaacttttcgccccccgtccccaacttggcgaatcgactccaaagaacgatgaacccccaaatttcccgttttccgcccattttgttcatctgttcatttttgtcccccgtttttcatttcgtgcccaattttcggcccattttgttctgctcacatttgccactttttatttaactttattgttatttaagcggccaaaaatgtcccccaatttcacaaccaaatttcatttggcaattttgccgtttctctccccgcccctccatttgcctttaactgtgatggccccccaattttgatcattctttgaaccccccgattgttgatctttgatctatggcccggtgccctccatttctgtttctcccggtcccattcattgatttctgtgatttcccatttgccccagtaccgaatgcttcctttctgaaaattttcctgtcccatcccggtccccaattcatttgtgattaatcccccggtgatgacattttatctgtgatcaattttgtgatattttgttcaccatttttaaatttttgtttaattacccaagtttgaggctttttcccggaataaattttgcttaatcaattctcggcatttgatttggccggtcttcgtccctgcctgtccctgactcccgcaccgtggaattcatttgacccgaccccagagcaagtcgggacatt

SEQ ID NO: 23931 - DNA, 1153 bp, Heterodera glycines
  unsure (1)..(1153): unsure at all n locations
aaaagaaattacaaaatggggaaaaatgatgggaatgagacaatggaggaggaaaggtcaaaaagcgggctattatggacgaggggagagacagagataggggggacgagggaaacatacaaaataaataaagtgaggcggacatttgggtaccggcctaacagtttccttcttcttttttgaatactagcggggtcagcgccttcggcgcatcccccgctaggcagtacgattgtgttatagaattatgaatgataaaatcgactggctcggccgcttcgcgccctcgcatcattttcttggcttttctccaatctctgggactcaacccaccagcaattcaatctctgggactcaattctccggcattccaaacactgggacttaacccaccaactttcaattacattccaatcgctgggactcaacccaccagcatttcaatctctgggactcaaatctccggcattccaaacacggactcaacccactaactttcaatgacattccaatctctaggattcaacccatcagcatttcaatcactgggactcaattctcctgcatttcaatcactgggactcaattctcctgcatttcaatcaccggaactcaacctcagcaacggaatacagaactatttaaaaggaatccagaaattgaaatataacccataataaatcaaagcactatggtgtataattattgcccccacctcataaattcaaaaaactgacctgtttaaaactttccacctaaatttgatcccgcaagtggcacgtcaatatcccaattgcatataaatattccactcgaacacaggcaaaacatgagatgtagcatttatattgctttttctatccatcaaaggctttttctttcattttttattactatcataacatgctttttattcaaaacaaatatcaaaaaccaaatcagattcttttcatattataaagcagggaaagtacaaaaaacgtttttaagtaacaaacctttttcatttcagcgaatttatatgcatttttttnaatcaaacattctccattatcgnttacatnaagcaaacaaaagctttcatatcaaaatcacatcatttacaaaaaaaaatttagacaaaaaaatatgataaaccccaattttttcttac

SEQ ID NO: 23932 - DNA, 1230 bp, Heterodera glycines
tataaaaaattacctattttcccataaaaagtccaaaatttccaccccccccccccctcaattttcagtcaatggggcgactcgctgttcgtcgtcctccaaacaatgggcattgttgtcccaatgttgtactttgctgaccgcctgagctccgcccttgtgtttgtgtccagcaccggatggctttaattgttcagttattaagttgtgaaaatgaacagaggggactaacgtcttttttggtgttggtgcatttcgtgaaattaggcaaaaattgcttttaatgacaaatcaattcaaattgggacccaccaatgcaaattaatagtgaaagcaaacttttgactctaaaacaacaatttaaccactgacaatgagcaaacgctcctttggtctgtcgtcggaaaggttcgccgcttaatgtgacacggatgaaaaataggtgtaatatgttgcccccccttccccaagtcttaacaaaaaaattttttctaaatttcttcgagcttggttatttctagtaaaaataaatcaattgaaagattttttatacaacacattgggaatcgggggaacaatacatacaatacattggcaattatatacacacattaggaatcgggggagcaattattttgtttcataagtcggctccttcaatgtttcgtagtataatgcgacgtttcactttttccaacggctggcttctgggccactgtttcttcgccttctccgcatctgtgccacttccggaggccaactttgtctccttctccgggtcaatgccacttccggccgtcatctcccctttcccagcctctgtgcctcctccgaccgtcatcttcttcgccttctccgggtcaatgccacttccggccgccaacttcgtctcctccgggtcaatgccacctccggccgccaacttcgtctccttctcctgatcagtgccacctccgaccgtcatcttcgccttctccgggtcaatgccacttccggccgccaacttcgtctccttctcctgatcagtgccacctccgaccgtcatctcccctttcccagcctctgtgcctcctccggccgtcatcttcttcgccttctccgcatctgtggcacttccggccgccaacttcgtctccttctccgggtcaatgccacttccggccgccaacttcgtctccttctcctgatcagtgccacctccgaccgtcatctcccctttcccagcctctg

SEQ ID NO: 23933 - DNA, 1580 bp, Heterodera glycines
  unsure (1)..(1580): unsure at all n locations
ttttcccccctttctctccagtgtcggtcgttcgtttccttctttctctggtcgctccatcgctttcctctgtttatgtgtaaattctctatttccttatnaatcgcgcacaatgcccctataaatgcatttgtccctttttctttctcagtttgactcacttccgttcgtnnccgntnggaatgtttaaatttcgtccacttttttctgctcattggccacttttcnccctgctgatctctgccattgtaaagtcctttcgccncctttgccctntaaagtccaattttcccctaattagcttccaattgctttactttgccacacattgtgctgaacggcggcacttatgacgagttcaatgcttctgagataaagcattgttgcattgcgtgtgcgcgtgacccgtgttgcattgcgtaaggtccgtctcgcatttggcccaccgaatgattgcgttaaggtacacttacgacaaggaattgggccggtgtttcatgaagtcggccatctccgattcatacaaacactcgggaatgacttccggactgaaggcgaacactcacgcgggacagggcgcactgctgaggaacattcgaattgcgggaggaactgcgtcagctgttgtgcacttgcccaacacggaggactgcatgcagtactgcacaggtgggcagagggtcaaactggggaagagaggggaggggagcgaacggaggggtaattgggtgccaatgccatcgttagttgggcaaagcatttgcattttcaattggttttttcaatgatacattaaatgctaaaatccattccccttatagcctatggcattttctcgtggagtcctttgcctccctcatcaacaacaacaacggcttcgtccaacgtcggtcggtcggcctcgtccattgttccgacttcctctcaacagcaacaacaaggcaagtggccaaatgccaattgggccatccgcgccgtgcgcttttcctacccaaaatggactcttttcaggggaatgctcgtgcatgtcgcgcatctcttccttggagtactctttcggctcgcgctcggccatttttccgcccgtttcgaatctctgacaatgagccaattgcaagcaaatgaatgaagacgaaaattcgagacaaataatcccatccaaatccgtccaaattaggtgtcgccactaatccgtccgatatcccttcaatccgtcactctgtcttaatgatctcatcttttttattttttgaaaaataaaacatccgattatgtacagtagtgttttgttttccaaattaatgtccgtttattcgttcgtttgctgcggttgaagtggcgcagaacggactgcccgaaatgtattggacctaaattttgagtgattaactcatttcgctaaaactatcacaataatagtcttaatcattcattgttttttatgcttttccgtgccgtgttctgctcttttcgcgcattcacctcgtacacattttgcggagggtttgtccaattgacccctaatttgattggtgcgcattaaaggagggaagaagcgattgttggtcatcggagtggtc

SEQ ID NO: 23934 - DNA, 1249 bp, Heterodera glycines
tttttgtgggacaaatccaataaataatttcgaaggattattgttttttattgggtaattaatccagtcaattcccagcaatttcagatcaccacagataagaatattattataattaaattccataatatactcgaataattttttaaaatttggtgttgaacattgaggcggcttatacaatgcaaaaaggtgaatcacttttactagacagagtttaatgtgaattatttcacactgaaattttgtcccagaaaaaacttcaagcataggaatatcagtgcttattagtagggttgtaaattatatggattaacatattttttctgcgcatatgctataaagaaaggggcccaaaaatagcatttctgcgttaaaattttttggtttgctgaaggtttttagtccatataaatccatattttgggggttttcgggaataaatccatatttagccatttttgtgtttttagtccatatttcggccatttttggcaaattttcacaagaaaatgcaagaaaagggaaaaatacaccccctaaagattgattttttggaaattttaaaatttacagcccaaaaaatatgaaaaatttgaattttcgtcgtcattttggcatttttaataaatcttttcatcattttttgcgaacttttcttttttttaaataataatttttttaaaattttggcaaacttgaaaatatttttatacaatggacgacaataaatttttttgcatttttatgttttaaatccattttttgattgtttattgttttttttttaatttctttaagcaaatattgaattcatacaccttttttggaatttttgagggtttaaaacacatattttggcagtttttagtccatattttggtccatatttggctatttttgagctttttagtccatatttcgtgcttttttagtccatattttatgtccatattttgggttttttagtccatataatttacaaccctaatcatcatcatcatcatccatcatgtcttttgtcagccacatacataataaaggcacagcacataagcagaaagaagcaaccacgagcggcgtcgccatttttggtgacccgcgcccaattgggcgggcgaagcacaactccgccacataaatgtacacactcatgcactcaaatttggtgcgcttttaagctgtactccccgcaacgctgggcgaggggttggggcaaaaatatattggcgatcacgacgactctttt

SEQ ID NO: 23935 - DNA, 1928 bp, Heterodera glycines
gatgaaaagtggaagtgcaagtgcaaattcggcaattcctcacaacccatgccatttccatttccccttggtgaaggtgagctgttcagttctgcatgagaccgaacacttcccgagactgaggcccaaaaacacttcacatagttgaggctcaagaattttttcaacaatttgttattcacttaaaaaatttaaaaacaaaaaattactattttattttcaattattaaatataattaccatgctgatgggaacagtggtcattagtacacagaagccaaatggtttttaccaatgagaaaatattaaataaaattaaatttttttttgtcctttttaggtccaaccactgcaaaatccaccatcattcatagtaatgaataaaatcagttttataaatttcctttgtatgcagaatttttaatttgttatgtattttttagtttcattcaatgggacaaaatcaagtaaagaattttcttaattttattttatgaaaattttcatttacttttaaatcagaaaatgggacttcaaaatcaggtaactgtacgtacataaagcagacccgtgcatcagcaggccttacaacgcgttcatagttttggcccgagccaaatgagttcgggccggtcagggctctttagaagcgggcttttgcctaaaatctcgaggctaaaatttcaaaaataaatcaaatcaatcagagccaactattactgtgacccttttctgtacacccattaccgtatagaaaccacgcgaatacgaatcaatcagcaaaaataaacgtggaccattctttttagacagtccaattgtccccagtttcttttcgccgatgactctttttgtttggtcgtttgtttttggtaaattggttttaccttcttttaattctttattttgaattttcagctcattttattgtggtgccgcttttctaggccactcttacggcacagtttggacgaatttgccaaattgacgaacatttttgtgtgtaaagaagaaatataagacagaaaaatgatgaattatttattcctaattaaaattttaattattgtaatttcaaattgcattaatgttcatattttcgaattttgaataaagctcggcaaaaccaataaaatagtttatgaaaaacgccatttgtggttttaggtttggctaatcttgaaggaaagaaagttgcaacattcgctagtctttgagagttttatttatgtaacaatttaataactgtcaaattaacatgaaaattcactgtttaaactcggcaaattgcactcttcgccccattccttcgacattcattccgctcgtttctctttttcccttcaattcttcttaaatcgccttcctttgtcgcttttccaatattttttttaagtctgaaatttcaattttatccagtctaaatatcacggaaaaccgtgaattgagcccgtgaatagtgaccgtgacagaaaaaaccgtgaaattcaggtaaccatgacagtgattccgtgaatcatggcacaaaataagcaaatcagcatgaaaatgaccattttgtggcacttaagcgttcaatcgaagactatccaaattttcttagtacatgactttttgggtattactgatcaccgattcagcacccatcccgatcaaattcggacccctagtccgaattcaaacagtcaaaaactttgggacacaaattcgaaaaaatggctttttaaccggttttctgcggaatgtgcttgaaaaaagctgaaccagcgacgcattggcgtgcagtggctttcacaaagtgaaaaatgtcggctcctccctcctccattctttttttgattcctttttttgtttaaagtgaatatgagtagtgcaacgtttaatcgagctggtcgccctcatttatcgttattggtagtttgtaaaaa

SEQ ID NO: 23936 - DNA, 1564 bp, Heterodera glycines
  unsure (1)..(1564): unsure at all n locations
aagtgagtgaatcncggtaaaagtacggtcggccgactgtcgtagcaggtgggcaccagcttattgttgtacacagttgtgcgaaggtatttcactgttactggaaagccttctgaaagaaaatgaaaaattaaaaaatatataaaatatacaaattttaatttttttaaatttaattatttactaattttttgttaaattttaaaaagtgtaataatttataacagcgctcgatattttgaaaaaagtaatacagattaaataaatgcccactgcttatgtccgattgtccctccacaatgttttgttttccgtcttcacattttgtcgtcacattttttgcgcattgttttgccaccgttccatcaaacgcagcaaaaatcaaaagggtgccgaatattgcaacgaatgtttttgccattcaatttaattcacttttaaattaaaagttttaatttaaaatacttttttttattggaaccaatacaaaatgaacggcggttaaactgttggcattccaaaaaattacaaaatttaattcggcccatttttattttcgttttgtttgggttccgtccgcctccttcgacggaagacaaatcaaatggttttgaattaaaatggcaataaatcactgacaaaaagattgattgatcggtgtctatactcaacttaattatttcaaaaattatttttaattagtgaaatttctctcaaatttcagaattttaacctttcatttgacgaattgttttgtttcaattagcgacgcattttaaattgttttttttccaaactgataaaagttaaatctttttggcgtcagtttaattctttaaaaaaaattcataaattctgaattatttttgtgcaatttgttaatcataaatggacgcaaattccctttatttttaaatttaccacaaattaaagaaagtctttggccataatacgtttataattaaattcatttttaaatttttttacacaatttttacattatttggctttccatgcaaattaagcccaaaatctcgggcttttaaaagaaaatgttgccctaattgaagaagattcgaaactgtttgttttttgttacaaatgactttagtattttttgtaattatttggcaattttttcaattttcttttaatcaatggacaaaatgtgccaagatttgcttcatggccatttttaaacaagtaaaaaatgagaattaatataaaacattatgtgcagtttgttcatgtttttagcagtgatcatcttccgcttcttcttcttcctggaggccaagcggcacaaatggcacatttattggcatttccaaatttgtgatcattttgccctccgtttccaccgaaaatataaaatgaaattcgccctaaattaataaaaattgtttttagatattcgatttttatttttggttttggcgcacagcaaaaatgtcgagcagtgaaatgccgagaatgcgtggtgcgtccggcaaaatcagggtggagttgaagtcgatcttctgctccatctcgcggattgtgtgcgtgccgggccgttgcaaaa

SEQ ID NO: 23937 - DNA, 1722 bp, Heterodera glycines
agccaaaatatgcaagatatgcataaaggcccaaaatatgcaaaaatatgcaaataaaagtcccgatttttatacgcaaacacaaaaaagaaagtgtttttcgtactatttagagcatggagaagccaggaaaaaaaaatgcatttgcatacttttggcagccctattaataaaatgtaattggtaataggaatatttataataaatattttttggttgactggtcagatttacgcatcctattatcattcattaaatggttaattacatggacttttttcgaaaaccctctccatgagattttttgacaaaatgtttcctaatttgtcatgaaagaaacctaagtaaaattcttcttttacaattcaataaacctgataatatttcattggatattaaaatttaattagtaaacaaatccatgcttcatcaatatgaagccattaaaatttttgagatttccattctttcaggaaacacattctaatatgccagctattaagtttatttaattgtaaataatttaaagaaaattattaccaattattggatcaaaaaattcaattgcctacaaatttatatgagtaaattccaaggttgatgatctacagtaaagattagaaaattgaatgcgtaaataaatcaaccagcagaaccgtttttatgattggtcagattgttgccgatctcagaattagcctccacgtatcatattgcattgtgttcttactttttcgtcgagttgaacttcttgtagaattcctcaaaaccgtggtgttcgttgcacatttcacgacttttaatgtcgcagagttcgcaatggcacttccaaacattttcatcttcataatgatcagggtacatgggacgacagccttcgtatgttttatttatcggcgctgggtcacagccccattcggcaaagtgttgggtcccaagtttcactgtaaaaatttggaaatttataattaaaaacttgaaaataataaatataatatagatccaaatgttcctcatcgttaaaacaaatgaatttgtaaaaatctcaaaattaattttggaaaaaattcgatacatcataaaacaagccattttcatagggccacacacctatatcataattatcagggctgtaaaaaatatacacgaaaaatggccaaaatatgcgcaaaaatatacaaataaattcgtgcaatatgcaccaaatatgcataaagtcgcaaaatatgcatattttttttcttatggggtattcaaatcgtaaaatatttgacgaaaaatggcaaaatatgcaaaaatatgcaaataaaagcaaataccaaaaagaagctgtttttcctagtaattagactacgtagaatccaggaaaaatatgcatttgcatatttttgacagccctaataattataatttttgaatatttttgttccttttcacaattctcaattaaataaatcaaataaaacactcattaccaaccatcataacaaaacacaaaataacagccaattgcattgaaaaggcattggtttccagtgagcacaaactgtttagtacttttgcgtccccggagacatgcatgaaacgtaattccttctgcctgaaataatgtatatgtaatataataataatgacaaatgagcattattaaaacataacggaaaataaaaaagacaaaaaaaaggggtaatacggcagcagaattgtggttgttcccaatgg

SEQ ID NO: 23938 - DNA, 618 bp, Heterodera glycines
ttctacatctacaataaatatttttataattttttctaagaattattatatttatcataatttttagaataatgtttgtctttttttaatttaaatcatggctcctgagttagattaatattgtactgtcagaatcagaaataaaaattgagttttatattttggctattcggaattcattgaacaataatttttataaacgacattgattattgatttattttagtgtattttgcatatatgtaaataaatgtaaatttagtaattttaataaaaaattatatttattggatttattatttaccttgtgatacaattgtctacatttttattaatgttaaacaacttttaaattataaaatttatatttgtttttcagtgctcgtaagttattttttatttaaatttttttttgaaaaatcaaagaatttaagttaaactctttaaaaaatattttagttactataaaagcaaggttctatgaatcacatcagggtcggggtcggtttagtacggcaggtttagtacggctgttttagtacggccgttttagtgctagggtcggtttagtacggccggtttagtacgagggtcggtttagtacggcaagctgttttt

SEQ ID NO: 23939 - DNA, 1877 bp, Heterodera glycines
ttgatgacaattaatgctttttttaatgtttttgactttaaggacaagtaaaaattttctaagctttaaggcattaaatttccatcccaaaatcattggtcgaaatgggatttgattaaaaattattaatggaattgggccaaggaaaaagataatgtaaaataattgaagatatttgttagagaaaatataattagtataaaaattaaatttattttatgcttttttagatgataaaaatgattattatttctttggacaaatcctttttctgagctcttcccctttgtcttgaacgtgtgaaatccttgttttttgggtgtgattttatcgagttttatgcctatttttaggccttttagcctaaaaatgagagagagactagccaggattctttaaacaaaaacataataaaaaaactaaccccctagactttaaaaaaaaaactaaagaatttatgatagaaaactcatacataaattaatgtttttaaattatctattttctatgaatgattttttgatgaaattggtagctgaaaataagtgatagacaggttcagaccgaaaaaatattttttttgactaaaagcaaccaataaatttttattgttttactttagttgttttgctcttttttgatttttgccttttccgaataatataaaaataagcaactgaaaaattctttccgatttgatgcaatttctttttcaaggtcaattttctgcaaatttataatttttaaagatgtaaaagggacaattctctttgcaattcccaattttaccaaatttggaaatcacgcgctatttcttccgtaattaaattataattttgaccctataaaaagaatgaagcaaaaatgaaaaaagcggaaatctgtttcattaatctttctaaaatgaatccgacttttctttatattttgcttcttctgctgattattttgctgtttttgagtgctttcaccgaaactcgtccccaatttcactacgccgatccgctaacgatcgcttacagccgcgggacaatttttgaaaatttggtcggatggaagcgatgagaacgaacgagcgaatggaagaagggattgaaagacatttatttataaatagcgaataaaaaataattatgattccatccttagagtaaattacaaataaattaaagtggcagtgataaaaagggtctctctctcactaattaactatttagtaggtgataattagttctatattaaataatgaatttggttattaatttgtttggttagtttcttttaatggctgtgatgacggcgttctgtccattctcttcagtcgtacgcaatttcgatgtccatttcgtacggcctaaaggcaaagaaaattcactgaagtgcatatgtataaagtaaaataaaactgcccgataaaattgtaaattgttttacaattaaaatttcctgggctgaactctccgcctttttcccttttttcaaaggattaattccaaaaatgctttaaactttatgaattgtgtgattaccgttcgtccataattgggctgttctcgtccatcttttgaccattgaaatcgcgcatcttaaaataatgaggggataattggataaatgagtaccaggacatttaataattaacagtgctgccacttttaggcacaaaaaaccgccaaacaggcatttcttaaagtgtattatgtgaaatgtttttgggtcatttcttaggttatatttttcttttttattgcatttttgtaaaggattttttcgaaaacctaaaaaagacgtcaaaaatggcgaaataggcaaaaaagggcattataaaagtcatcgtagacaatccaaaccaggatcaaaatgcgtttttcgtgctt

SEQ ID NO: 23940 - DNA, 1985 bp, Heterodera glycines
attaaatttgactgtcttccgcttccaattgccttcttcaggcgatgttcgtcccgccgcctcccccttcgggcggatgttccgccgtcagtcgtaagcatgtccgcttcgtgtcgccgctgatcggcgactgccgaaagatttctgccgctccgtcgccgtctgtgcccgtccgttggccgcaacgaagtcacttctttcccaatcgttccctcaattcgttgccaaattctccaaagcgtcaaatcgctttttcggctggacgaagggatggcacacattcgacttcgttcgtttcgcgtttgctgaatgcggtgcttctgcgcacttcgcatagtgccgattcgctgctgtttgccgctcctttcccgacgcgttcttcgccctcttccgcttccctttcgctgtgttcctcgcccccctccgcttctccaacggcgtccactacgctttgtccgtgtgaaaaatgttggcatcgccattcgaaagggcgcatcacaaagggcgattctcaagggaccgcagcaaaaagttgggaagcgcattactcaacggcagaggcacctttggttccggcggtgtgccccttctcgacaaaaagccttcaaggccatcattccctttgtgtgctgtccgcccacgggggcggcggtggcaacggccaaagggcgggcgcccaagtggccactctttctatgcccacaacggccattgtcgtttattcccgtggcccctatcgtctgccaccaagccattcgttcccacccccgaccatggctaaacactccccgcaacaccaccacccaaatcaacggcagaacacgctcgaggagttgggcgagttcgacgagagggactttgtcccacgttctgagatgctcagacagaacagagtaagtgcaagctgacaaagtccggtgaagaattgagtggggttgcctttaacttcccccccccccttctcaatgcttttccgttccgttctttcgccgttcaccggaaaaaaggaaagtggaaaatgtgtcagtgaatcagttcttatacaattttgaccttttgtactacaattcttaatgctacagaactttattttcaatacactgtattactgccgcattttcctttagccgttcaatgccaatgcattttacgcaaaataaaagcgtattgcccattttcagatggacattattcatgaattgaactgtcgaattaaaaaaaatgggaagttttttttaataatttccaatgaaacggcattttctttctgtccgcagtgtctctttcacttccaattcgaattttcggataaaaaataatcgttggcattggtgggatgggacggaagggagggcaaccgcggctgagtttgttgtctccgagggagtcctccctctgccgtttgtccccaatataattcacttcccattgccaaattgggtccaattccgtctttctgagctcgggaggatggccaattgggccgctggggggggggggggacgtggcgtggcactgtcatttctcacttttctctctttttctttcttcctttggcctgtttctgctttgaccctcaactttgttaatctgttggttgcatgaaactttcatcaatttgctgccaattttattgttggcatcaaaaaaggacttctcggaagaacattaatcccccgggagattctcatttctccactgcccttacttatattgccggggggggggaggggggcaattgtcggtcggactgcttttcccagtggaattctatccgctggcacaatgcacctaaaccttttgcccaagggcataatggaagcaaaatggtgtgctttgctgggggacggacggccttcacatcgctcgttccgctgcttttgcttttctaatggttttacaggaaaatagggcgaagagagaaacaaaaagatgggaattttaatctttgagaatggaagaatgggcgagagaagggacaaatg

SEQ ID NO: 23941 - DNA, 1413 bp, Heterodera glycines
  unsure (1)..(1413): unsure at all n locations
ggcccccgacattttgccccccgagggctccaaagagcaaccctactttcaantatggnaaatagnnttcttgncttgnaaattnntttgggtggaataagagggatnnnnaaaaatggnaaatattnaanagaaaatnggnatttgttnannattgatatgnnnaatnaanatatttgtnngttttnntggnctaaacttaaaacgatcaaccaaattaagaaagttattacggcccaataaactgagtatggttttactgattgggtcaatgaaatgctggagcaaaatatgtacatttatttcaaccaatgaatgaaaagggcggcccctctcatcgtgccgcatttgtcgtgattatgctttgtacgttgtcatatcggctgatgtccaatgggatggactcgacgctgtcccttctgctgctggtgtcccccctccccctgcctttgtactgctccgtctccttttgctgctctccgtcgcttccgtccccaaaattcacccttttctccgccgctcctttcgccgtttcttcccgtgccattctttcctcctcccctttattttcttgttctgtttttgcccattttgtggtgatgacactcagtgcgtcgcatgaggcgaatgagcggcttaatgcgggcgaagtcgacgacgaaatccttaaaaaggaaaagcaaaatgaaaattccgcgcacgaggtcaatcggcaaattcccttgggctggggggtgaccaaaaaatggcagtgagtaaaaaagtcgtcgcccggggggcttttcccggactttccgtccccctggggatggtcctccctacccgccttaacttgtaacgaattgtaattccctgtctctcttttgtccgccgcgtgtcatctcacctcgacgaactacacgcgtcgtccgcgaaaggaatggccaaaagggcggaggagggcgaacatggccccgtgctgttgccgccgttgcgtgctgtttttttttgctccgtcgccgccgccggacatttttccgccacaacgaaatcggcggcggacggaggaaatgccaaaggatggcccaattggtggcaactttttgacaatttcggcggcgactctttgaaaaactgagggcacattgtgcgtttgtccctccttttctgttgtgccgcccattttcccacttttcttcgcacactgtgccgcattgagcgcacgcgacggaacatcgaattgcccattccgtccaaacttttgccaagcggcgaaaacaatcgctgaccgagcggaggcgagcggacgcactgatcgaccgattcgtttcttgtccgttagaattggcaatcatttagcaattatttgttgactaataatggcacttttcaaggagggggcaacccaatgtttttcccattgatcaaaaatcc

SEQ ID NO: 23942 - DNA, 911 bp, Heterodera glycines
  unsure (1)..(911): unsure at all n locations
ttgcgaaaaggtcgaaattatggttttttcttaataaaatttttttccgggctagaaaatcatttcgttttttgtaaggctaatagagcatatgaagagctttcgaatgatactaacaatcttggatttggatgccaaagaaaaaagttatagcgaaaaacataaattttttgaaaatctgcccacagataacacacaagtacccaaatttttattcaaataaaattcaaatgaaagaacaagttgactaggtatatgtattccatcaaattttcaatttcgaaaacaatttcttcgcattctcagttgtcactcggataacttcgtccgtggaaacctttcaatttttaaattaatttaaaaaagtaaaaaaaagagtaaattccgacattcttaattctggcgatgaactcggcactgagtttaatgtttttgggttcatttcgctcctcggcaactggcccaagcacgggcgaatcgctctctaaacaaagttgactcaacgggattttctggatcagtgcttcctgaaactttttcaatgttgtttttatatttcttagtgattctttcactgccttttcttttgagagagtaaaggatggaggaatggaaaagaagaagcccttttcgatgcccttttgagcatttttcacattgccactgaaggcgtgcaacagcacattttgcgccccatgcgcggccaaccattcaattacaggcgtaccagccgaacgagaatgcacgtttctaaacaaaaacaaacactcaaatcacaaaaattaccaatactatatttccaaaaatagaaccctcgggggctttgtttttttttcaaccctcctcctagcnaatacggcatttaaatcctgaaaatttcgaaattccgagatacatacaggngcaactgc

SEQ ID NO: 23943 - DNA, 666 bp, Heterodera glycines
agctcggccgagtagccgttcagccacgcctgcacccgcgaagtgtccgagatggactcggagggctaaaagggggaggcattaatgtatgggcatgagacgggatgatcatttaggggtaatcagtataatagccaaaatgagggaactaagagtcggtcttaaaacatttttaataacaaaaaacatagtattcttttaattactgtcacagtaactccccgaagtttacagtaaccctgtttatggttaattaggtccgtgtgtctctttaatggtcagtcattagtttaattcaatgattggttgtacttctaaatttgtcgttctccaaaagtcgctcgagttgaccagtgcctgcgcctctttgttcagcttcaatggttctgcaacagtcttttcgggctgttcgagtccaactgggggcggcactccgtcgacgacagtgcctttattcagaaagttgtcgaccaatgattgaattacctgagtaggaatagttcgaaattttaaatgacaaaatatttaaatatcaaacttattttaatttacagtataatattttttaaaataaaaatctgcgttacgttaatatgtccgaagtgatcagcagcagtttttgttattaattgtccatacgctctctgcttgatcggacctgcttcc

SEQ ID NO: 23944 - DNA, 564 bp, Heterodera glycines
gggatgaatacacctttagggataaaaggtgaaggggggagggcgcggtgggagaagaaggatgacggatggatgaagtggtgaaatgggggagggcggaaaaagcggaggaggagggcatttccatggcggaggagagggagggcaacggatgagtggcggggcggggcgaagggggagagggaatttgacgagcggtgaccagtggggttggattgggcggatcatcgcatgccccccccccccccgaggggtcctcccggaatcgccgttggcgacgcggctgacacttcgccgcactttcaccccaaaaggcaatgaagcggacccatccttcccctgctgatgctgcggctgtctctgctgctgatggagttgtcagctaaacgaacgcccaaatgaccaccgttgggggcgctaattttgtgatccgaaaatgattatgacctttctttctttgagtctttgcagcgactaatgcttttgcattaaggttcaaattaaaaatgacaaagaaccattggtttttaacaacgcaaaaactaacgaaacgaacgaaaaggg

SEQ ID NO: 23945 - DNA, 1176 bp, Heterodera glycines
ttcggtctccccaaaatctgggcgcatcggttcggggggactgccccaaaacaaaaaaatcgattttttcaagtgtccgttggggtactcaaacaatatggggagcaaaatccaacgcagaattaaagtacaggctatagggaagctattccggaaggattcggtctccccataaatctgggcgcatcggctcggggggactgccccgaaaacaaaaaaatcgattttttcaagtgtccgtttggggtactcaaacaattatggggagcaaaaatccaacgcagaattaaagtacaggctatagggaagctattccggaaggattcggtctccccataaatctgggcgcatcggctcggggggactgccccgaaaacaaaaaaatcgattttttcaagtgtccgtttggggtactcaaacaattatggggagcaaaaatccaacgcagaattaaagtacaggctatagggaagctattcccgaaggattcggtctccccataaatctgggcgcatcggttcggggggactgccccgaaaacaaaaaaatcgattttttcaagtgtccgtttggggtactcaaacaattatggggagcaaaaatccaacgcagaattaaagtacaggctatagggaagctattcccgaaggattcggtctccccataaatctgggcgcatcggttcggggggactgccccgaaaacaaaaataaatcgattttttcaagtgtccgtttggggtactcaaacaattatggggagcaaaaatccaacgcagaattaaagtacaggctatagtgaagctattccggaaggattcggtctccccataaatctgggcgcatcggttcagggggactgccccgaaaacccaaaaaaaattttttggataaaaattatttaaatgaactgactagataatatttaaaataggttatttctcttcctttcagtatccctgcaaagtttggtgcgcttctgatcagtttctgaaaaaaaagttaagcctaaactttttggcctgtttaaaaaggaattaaaaatttttaaaaattttattcatctccctttttgatagaaaaagcatcagagtgcctaaactaacatgtaaataaaatttggtgcgtttcagaaccctttctgaaaaaatatttaagaattaatttgcaaaaaata

SEQ ID NO: 23946 - DNA, 1775 bp, Heterodera glycines
  unsure (1)..(1775): unsure at all n locations
gaccgttttgacatgtggatgcgtgtctggagcagtaaatcgctgagttccgagaagaactttatgacaaaaagttcttcggaacaatccttggttacggcgaatcaatggagttccaaggccgaggaggcccacatgcccacattgtggcgcaaacagacctggacgcagttccatatgtcattcaggaatacatatgggcgcacattccatctttgcctgataaagatgacgacacccccattgcaaaaatgcatcgcgaaatccgcgaaacaatacatatgcaactgcacagatgcagtgacagttggtgtggtcctagcgacccaatttacgggcggtgcaagaaggggttcccagccccttactcaaaatgtacgattttgcgcccggacaggcccgcaatgtatttccggccttcaccaactgatggtggtgcccaattagaggtaaacggcctgatatacgacaactcacatgtcgtgccgtataatccttatattctgctgcgttaccgagtacaccataatgtactgtttgcatatggtaacaaagcaaatattaaatacgcactcaagtacccttttaaaggcccaggacattgttatgtcgagtgcaaacaagagtccggcaataaaatcggaattgatgagccggctcaatatgccaagatgaacttccgtggtgcaacggaagcatatgccattgttcattcactgccatttgccaaactttcacatcaggttgtcaaacttagcatccatatgcctaatcaacaaccgattgtgtacagggcttttcagctggtgagcaaagctcaacaaatccagcaaggcaaactgccagagacgcaatgttctgcctattggaaacaatggcaaaatgaatggaagcatgatccgaagctcaaggacatgctttttgaaaaagtccctgagcattttatatgggcaaaggacaaatggaacaaaaggaaatataacctaacaaagagaccaccaatcggtcgaattgttcctgtacccccatcggacccggaaaggttcgcgctctattcacttatgcgtcactttcctggagacccagaccatcttaagatggttaatgggttgctttgtacctcattcactgaggctgcaataatgcatggtcttcttgaagacgacaaaatttgggacaaaactctggcggaggcagctctatcgcgctggcctgatcaaatgaggtggctcttcatgagcatcctcgtttatggccagcccagtaatgccgtcgaattatggaacaagtacaaagaccaaatgtactttcctcaaggcattaccacaccggcacaacgccaagcagcagagcttgaagccctagccgacattgattggcggctgcacagctgctttaacttaagctgtgtgcattttagcctgccagacccgccaaactcaattgccaaaaatacaaatgcggcaattaatgagtttttctttggcgatgatgatttgaatttaccgcctggccaaccaaatcctcggcctaagcaaatcactcctccgccactcaacagcgaccaacaaacggtctttgatgctgttgttaaggctattcagtcggacccaagggattcgactgtcccccgccgtttcttcatatacggcgatggtggcacaggaaagacattcctgtttggccaaattattaggcgcttgcgaaaggccccatacacctacaaagtgcttgctacngcatccactgggtgtgcagccattttgctgccatat

SEQ ID NO: 23947 - DNA, 1578 bp, Heterodera glycines
tgtttaacaattttgcagaacttcgactgacctattttaccgaatcggaactctctgaggagtccaattttttgcgtgcgagaattgcggaattggaacgtatcaaacgaacaaaaccatctgcagccaatggtgagttcgattgattcaaaatgaagtaaattataaaatatgattaataaaaatattaaaaataatatattttttatccttcctttggaagtttggagtattttatatatttattttcaactgctgaaccccttgacagggataacaaatgccgacagtttggagaacagtttcgacgaatttgcgcaattggtcgttcaaaatgagaaaaaaccaaaggtttgttggaattcgtttaaaccaattaaaacatttaacggtcacagaactgcccacaaatggatgacaatttgttggagaattcacttgcttcactcaaaaagcaattggacggaaacggtggaaaaatgaaaaaataataacggaataattaatgtcccaattaacaaacagagtccaaggtcaataatcttgaaaatcagctgaaggaattgatgcaaaagcaaacggacacttctgagcagcaagaaatggacaaagcgcaactgttggcaaaaattgacgaggtgggagagatatggggacaccggacaaaagggcgacagaaaaagtcgcgactccgttcatttcttttcataaatgaacaaagaaaaactgacaaacatttagaagaagcatcattcattcaatattgtcaagcgattcgcttgcttttaatgttcttttccgtaaattttttattgaaatggttcaaatatcaaccgttaatttaaagaaaaaaaaattggatattttttttacaaatcgttacacgctggcttttgttcttgtccgtaaatttgttgaagtcgttaaaatatgaacgtcaatttaggcgctcgaagtgcagaaaaatgcccagcaaaagacgatggaatatctgaacaaaacgaatgaaagactgaaggcgacgggtaaagaaaaaaaatgaaaataaataaaaataataaaaatgacaaaatattttagcatattattaccgccattcaaagactgctttggacgaagttcagaagagaatcgccgtaatggaagtcatcgtgggcctgctcatctttctgattttcatttcgccatttgcttattatttttcgttttagccatttaatttatcacttttatggcaatttccttaaatttgctaccttaacaaatcacttttcttttgtctctcttttttatgtaactcattcagctaaaaattgaaaaaaatgaaatagtctctccaagtgttttttaattaaattaatatatcgaaagaattctgagtaatttaaaaaaaaatcgtgaggtctattttaaaaattggtatttttaagaaaaatctgttaacaaatttcaaattttcaaaaaaaattttcctcgcggctcctaacaccaccgacctcatcacccctttgttccccaaaagtttttctgaaaaagagcgcaaaaatggtggtcaaattcgatcttgagacgggttcg

SEQ ID NO: 23948 - DNA, 2408 bp, Heterodera glycines
  unsure (1)..(2408): unsure at all n locations
gttggctctcggcttcttcttcgtcgccattgaaatgaacgcgatgccctctgccaaaccaccggacgggcctgccttgctgcttccatcaaccttaaaaagagcataaacaggttttttccttggaaaatccatttttttgatttgagaaccaggatttatttgagattttaaaatttgtaaaaaaaattttttgactaattgccatttttatatttgtcttggaaaaaaagctcaaagaaagtttaaaattatcagatggagaaaaattttcttgtaagttttggaccgaagataaaaaatttttcaggaagagcaacgatgcggggtaaacctatccgggaagggatttataattccccacctgcactgttttcatttttctgtttcagaacttgatttaaaaaagttaaaaagctttttggggcaacagttaaaacaaaccgtggacacgatgttcaagtggaggttggccctatccaaataactattttgttgctcacgcataatttttttggcggcacagcgggcaatgatgatggagtcagttgccagtgtgtccagcgtgccacctccggcagtgatgacaattgagtttcttctcgaattggcgtcgaaggggtctgtttcagccacttcaaagtaagaggcccccagagctgccacttcttgaaaggccgacggtgacgccgaccattggggcgtcgtaaacttttccatcatcgccgtgagccattgactataattggggagtttttcctagtttctagctttttaattttcttcctttccatattaaaggcttgcaaacaatatttttttaaacaagaaacatttttcctctccacattgttctaaatataggcgcgagctggatgttgttggcgctgatggcctgctgctggttttgctgtgtctgggtgcaacctgtttttgtgccattttttttacaattgttctgtatacgagttcagggctgaaacagatttttttctagaaagagagacctcgtactgacgaagccactctctcaagcactttttttgcctgtnntaatatagcaattttagcacatcaaaaccgaatgagaaattgtctgttgacttatgagggtccgattcttcaagcaatcgaagagcagacaaggttttaagcggagcgcacttcattatccattttatttttttcaaaatttcgatttttttcaatctcgtaatgaaatttcgtttgcaagccttttcactcattttttcatatggactacctgtttgtagtgccacggcgtcgaagaaaacgcctcatgaagtgcaggaaatttccgccaagcctacggcgaaggcgtgctgcaaaaacagaagaattttcagattttcccgaaaagttagagataaatcagtattttatatggtaatcaagggtgagaggactacacgaggaaatagggccgtgattatgaagcggggaaatcctccaaattttttaaaggaaaatgggtgtatttaaaaaaaatcttattactgttaacaaaattcgtaatctttttaaaacaataggcagaaaaggaaaaaaaaatttttttgtggttatggttatgtgtttctaattagaatcatgaaaaagtatccattttgtttaatcaattttcacataattaccctccaactggcgaatgcgcgatgtttgcttgaaaggcctccgatggcgaagatctgcgatcttcaatctgttaaaaaaagaaatgaggaagaggaagaaaaagagcggagcaggaagtatatatattttttaattttcggggaggtgaggggggggggattgcggcgggaccggaaaagggaaaaaaaatgtagagggtttcagccaaaaagtgacaaattttgccccttttttgggccaaaatttcaaaaaataatgataccatgagtattggaatttttttattatttgaggggggggggggcggcaccggcgcatttcccactcaccaggtgtacggttcgcatttgttgctggtccttgtcaatcacgacgtcaaagttcaggcccagggtcggcgactcttggagtgctttgctcgagtttgacggcaattctggctgaaaatactttcacaattttaggccattcttttgtgcatttcgcatggttttgttaggccctattcccccctctccccctgatcaacatactcccattttaagtggcggatcgattactaggtaccaaggtttgtgccatcgaatttttatgtccgatttataagaccaaaaactcaataaaaaagcatgtcaattccgtccatttgggtggttacagtcctaaagagggccatttggggtgggcaaacaaaaatataaacaaaagaaatcagtgatcagtcaattcaaaggcaaaaaatatattcaact

SEQ ID NO: 23949 - DNA, 1859 bp, Heterodera glycines
tcaattcttagacatttaaaatgctttcaatccaaaattatatttttgaaagccaataattattacgtacaactctcagtttttttctgttaaagcgcttctgctggtggcacaaacagctgctctccaaacggacccctccgcgtcggacattgattacgaaatcgttttgccggttgcgtcgttgccgtcgctggactcgccccgggggacgacgttaaattggcaggacgaatgggtgcgacgcttttcgccacggcttgttgttgtgcaaaacggcggatggaagcacaggtaaagaatggacaagcaaacaacaaaagtgaagagacctcaattctgatcagtgctgatcaaagtgaccaaaactgtaccaatgaggagagaaaaatggcactatagaatttcgagaaaaaaaagcagcgatttttggtgtcatgacaactcgtacaaaaggcaactcgtaaaattttttagattaggcctagggttcaggcttaggcttaggcctaagctttaggctaagcctagccgtaggcttgcttgggcttaggcttaagctaaggctttattttgtaaaatacgagatcaattatgttaactacttcagaaattaaaatatttaatactaaaggtgattttgcttaactcattcgttgtccctttttaggacattgccccgaaatgacgacgacgcccaccaacggattgtgctgcataaaaagtggtccgccttggagccgtccattcgctttttatgatcgctttttttgatctgaaaatgggcacggatttcggtcgacgcatgaccaacctaaagcttgttttgctttattgcccctgctttacatattgttttgttatttctgctttttggttattggaacctttgcggtgagaccaccacaaaattcacctgccaattttcgtattaccaaaacattcctcaccactcaaatgaaaaattaattatttgatgaataagcccattcccattttatttggagcatagcaacaaattgggtaatttaaaaactcattttattcataaacaacaatcaaaacataaaaaggcagattcaacgaaaattaaaaataaataatttaattattgaagaacactccaaaattggtttggccaaccgttgcttttgtttaccgctttttggccaattttcccgcttttccctattttctgttggtgccattggtgcgcatggccaactgtgccttcagtttgccaatattcgccctgaggctgtcctgttcggctcgcattttggcgttctgttccaccaattgtccaatttcgatcttttcccgttccatttggcgctgcattcggtgccgataacgccgtgccgctactcggttctgttccctctttcggcacagcaattgctcaaagtcaatgccggacgatgcgcaaccgacaaaagcacaattgttcggcatgcaagccgaagagggaggcatcattgagggacggccaatgcaaatcagctaaaggggtgccattggcagtgatcactacttagcatgaatgttgacaattggtgcaaaatctgttattaaatagcacaaaaattcaaaattatgcccggcggcacctatcggcaccgccaaaacaactcccccatattcccaaaaattttttttggaaagagcgcgccgcaaaaagtggtgtgaaaagtaaaaatggtcgtcgccattgtctcaaaatcggaacctttttttggtaaaacagctgttaacaaattacactctagttttcaaatttttccacacgcccgacccccctgttctcctcatattttttaggaaaaaagcgcagcaaaaaaatgcatatgcgatgaaat

SEQ ID NO: 23950 - DNA, 1736 bp, Heterodera glycines
ataactcaacacactctttttggatgacaaaaataaaacgattaattgtacgcccctcccatacaaacaaatcaatcggaccgatgggcttttgcaagtgaatgaaagcataattgtgatgatggagttgaggggatttaaccccggggaaaagcaagaagtgggcgtgttcttctacaaccaggcaattggctaccacgacctcagtgagtggtgacaaaagctcaaacattgtaaaaaaaataattaattattactttaaataatttattagccaaaaagtgtcgacttttgttctttcgtttgaatttaaaaatattttagtatgtaaaaaatcaattaatgaaagtaaattactgtttaaaatcttagttggcaagaatgtgctgaagattatattgaacaaccaaaacatcagcttaagcagcacttatgtgagttttagcttggtatttacttgtaccatattcttactaaatgtgcttaattactttatcaatatgactttagcggtgcttaaaaatgggtttcaaatttatatttccaataaaggctccactttatatgatataagcttgcactaacaatttttaatgtgtactttgcattaatttttgttataattaaatttgagtccgcttttcgacaaggcgctcaaatttgtcatgaatatttatttagccaaaacaatggggcattgatgtacaagaagacaatcgtacaatgcatggagctctaagagcgaataccgtactgaacttcacaattacggtgaaggcgatcagcgattttgagttgattttgagcaggaagggcaaaaaagacgcggaagaaaaagcacttttaaagcatttattcaaacaaattatggtctcggaacaaaaacagcctttgcccgcgtgggccactcaatacgttacggtaagtgttactgtaacaaatcagttgaagttattaagaaaaatttaaaaaatatttaagataacttacaaagggatggcaactccaaaagcgcaagtgttttgtgtgccggaaaatcgttgtaccatgaaaaatggagaaatggcgtacgaatatgtttttaataaagcaaattccaccaattaatagcaattaaattatgttatcgtttttttcattttcattccctaaaattgcacattttgaaatttgaataaaaatgattatactgtaatatatacatgcgggcacttaaagcaaaattggatttcgctgatcggtatttatctgtatgaagaatttgaaaatttttccaaaaaaaaaaatctttctcgagttcttaaaactgaaataacattttttaaaataaaaatctgtaaaaagaatcgtccaaactttttccggcatctatcgaccccattccgaaactcatattctctcatattttgataaataaaattcttataatagtgttatttttagtgaaaaaaatctgttaacaaaatgcgccaatttcttgaaaattcgcgtatggttacatctcgaatttattttttgtctttccacgataaattgattcatttctctggctgagatttacgtcaaatacatggtaatttgggacaaaataattaattatatgatgattagggctcggatttatagttgctaaaatctgccaaaataattagtttttagtttctgaaaaacctccaaaatagttgctaaaaatgggtaaatagttgctaaaaagttccgaatttatgaggtgtaaa

SEQ ID NO: 23951 - DNA, 437 bp, Heterodera glycines
aaaattttaaataaaagacatttcgccaaaaataattattaaatttttcaaatttggggcagtttcactggtgaaatttagtcccgtttttccgacccaaagacagggaccgggggtcccggcggggccccggtcccgtccggtctcacatatatatagggggttttgaggttgctgaacacggttatgacatccattttgatcaaattcgaaccccgaaccctaattatgaagcatgttggtcctcaaaatcgttaaaactatttttaaaccagcagtcagaaaatggtaaaagaacgtcaaatataaaagattgaatttagcttattgcgctaaaaaaccgccgcacactcgactacggcggccagtaggtggggcgagactacgggctatggaagaagtccgcgcgtgatccgcaggcggttgactgattggcg

SEQ ID NO: 23952 - DNA, 1873 bp, Heterodera glycines
acaatactttttcacacttttctttttaattttaattatttgtatttaattaattgatttttgtccactttgaattttcttttattttaattatttatttttttttctccaattttcacttttcgatttgctattgacgaatggccaagcaccgcgttcagtccgcctttgttcagcttcagtacgttcgggttggatgagctcggcacgaacagttggacgggcttcaacccaaaaatggcattggttttgtcttttccgcccgcttttgcccacccttattcggtttctgttctccatttggcactgtgttccgcgttcgatcgccccaaagttcggcttgtaataaatgaactgttgcggttggctgttacagttgtcctgcgcgtactgctccgccgcgtcttcgtcgtccccgcgcgcctcttccgttcgctgccgcgtccaattcccgcgcggcgccgctgctgccttttcgaatgcgcttgcggttgttgtgcttgtcggagttttggtggcggtcgcctgtcgactcacagcacacgcgttcaaagccgggataaaacaaaacttcaacggcacgccgagaccagccgccgcgccccgcgttggctggtccggcgccgctcgccgctgcgctgccgcgtactgcgcgcgttcggccgcaccacgcgccctccgcaccgacgcgggcggtgtctttcgccttttgcgccgggtgcacgacaaactgagcatttggccaacgctttcttttcgcgttttgcgtagatttttaagcggactttttggccatttttttcgaatttttgaattaccactgggctttccggtgcttttgccatttcactgttccgtttcacattttccgcgaggaacacttggccaaaagaggcaaaaagccgcggaaagccatgggaaatccaaaaccaaaaaccactttaaatttggcatttgcttaaaaagataaaaatgaaaacaaattttgccaatgttaaggctttttcacgtgccaatgtgaaaatcgcaaatttaaaaaatgaatttgtgagaaaaagcgacggattcattcaaattaattgaattaaattggtattattagcattttttattgaatccatgatttaaacatcaatttgctttggaaataaaaaacaaatttgagcgcgcaaattcacttaaaattcaacgaaaagatgggaaaaactgcgaaatttgacacccaaaaaccttttggggaaagtgacgggtgaacaaaaagccatttttgctggggggcgggggcgggggaattggtaaaatgtgaacgaattttcaaaaattaagcaaaaatttaagttattatttaaagggaaaataaaactgtaatcttataaattaatagttgcttaattaaacggcacatttttaaatttcgctgttttttcttaggaatttttttccttcggtggaattatggccaaagggaattcgcaggcgaagggccaaacgatggccaagccaacttagtttatggggtctgaaggtgacaattttggcccggggggagggcattcattctctgctggcgacggctgtaactcattaaaaagtgcgccgggggggggggcgagggattgaattggcgtcggcactcagtgaccattttcgcatgtcaaaagccaaacgggcggaaagaaagtgagggaggcaccaaatcgctttatttaattaaatgagttaacaaaaagccgctttaaaacaaaagtcattgttctaaaaaggtaattggcctaaatatgcaagactaataattatctaagtgcaaattggcactttttgcaccttccgacctcccaaattcagggtttttttctgaaatatgttattgcat

SEQ ID NO: 23953 - DNA, 1873 bp, Heterodera glycines
atctgtgtccgtacgattaaaaatatttcatagtttgataaattggaaaggtattattaatttttaaaaatatttcgaattttcattgcttctaccgtatcacttactcttctattgtttttctacagtatctgactgccattctcttctcctggtccctgtgctggctaatgaccgtctttgagctgatccccaaggacagtgtggcacggacggacaaaaatgccacccaaatggccattcaaaatgcgccatgggcgcgcgtcccactcccgggtaaaatttcgaaaaaaaatcgaatactttggaaatttaggccaattcggcactcccaatttcaacattgggcttttcgtcggatttttggtgtccgcccaaacgacgcttttcgaggcggtcggcaatttccacgcggtggcaagtgtttcggaggttttgtttagggatggcacaccaaaatatgcaagaatttaaattgaaaggaacggccacccccgtcgcatgcgatcaatcgcggcataatggccgaagggttgggctgcttcgtctccggattggtcggcgccggcgttggcatcacaacgcatgccgaaaatgttggggtgcgaatttctccacgaaaatttcgtttccgacgctttgaataattttccaatttgcaggtggtcggcatcactcgggtggccagtcgagtcacaatgcttttcggcggaatcacaatgatcgctttcggggtctgttaattgcctcacttttattttaattgctcctaatggccaattaacttttcatcagttgttcatttcgtccatccattagcacattaattggttcaggtggtcaccaaattgggtgccgttctgtccgccattcccgaccctctcgtcggcgtcgttctttccacttccatggccatggtaattaatgtcatgccgttctcatttatcacaaatgtttgggccctttttgcttctgtttcccttaggtcggtggtgtggcaattgccaatgttcagtcggtggacttgaacagcacgcgaaatgtggccattctcggcttctccataatgatgggcatggtcgggcgggaacaattaaattccataagaaactaattgcctgattaaatctcaggtggtgcccgagttttatacccgtaaccctgacgtcatcagcacaggccattccacggtggaccaagtgcttaaagtgtaagtgacaagcgaataatgggaaaatgagttgaaaaaaaacaaaaaattggttaaaactaatttaattaaaaaataagaaatgaatttaaaaatttaattgaataaacttttttaagaattattgtttagtcttttgaatcttccaatgtttgtcggcgctttcactgcttggttttattatattttttaattattttattatattcaattattttattaattatatttttaattttaatttatttatttttgcttttcagcgttttggacaattccgtcggcggtgccacgcgcgcccaacgcggcctccgcgagagaggcgtcgtgtgggagagaccggcggacggaaggggtcggacaatggaaaatccataaaattaaaacagatatttcattattttaattatttgttttttttatattacactaattaatgtacaaatcaaaaaaagattatttaatttatttaaattgaattttagatttaattaatttattttaattatttccaaatatgcttctccctcccttcccttttccattcttttattttccattttcagatgtttacgcttttcccgagcctttgcagcgctttttgtccgcccttccgatcgttcgctctttgccatttcgttcgcgcgaaaagccaaaaaaggg

SEQ ID NO: 23954 - DNA, 1532 bp, Heterodera glycines
  unsure (1)..(1532): unsure at all n locations
aattttattccattcttttcttggatattttcttcctttttgctttattttttcttttattttataatatttttcaattatttctcttttttcttccaaattttcattttcttctttttcttccaatttttctccaaatatttcatcaaatgatttttgttgtaattttttattttccgttttaatttgatgaagttcgatcatcaaaaatataattaaaactaataaaaggtggattttcatttttttcataaatttcgaatataaacaagcaattatttttacaaaaatgtaattttatattaaattaatttttataaatgaataaattctccggaaaaaataaaatcgtaatctcaaatcaattcattaagttgatttataatcttttcggcattattaaaaatatttggtaaatatttttccaaaatcagcaccaaatggtaaaaaaagaaaaacaagcgggtgtgtgatttggactgatgcgatttggaattttttttaatttttaataatcattctactgagcattaattttaattaaaaataatttaaaaatattgaaatggtccaggaataatttcaaaatttcaaataatgctgatgtacccattaacaaaaagcaaaaaattaggtgtgtatatcgttgtgatatattttttgcatttcttttaatttctcttttgttgttgcacagcattttgagtaaaatccatttaacaaccttttgctgggtaaattttgaaatttaaatatttttctaagatttgtatcggaatttgttaattgataattagtagtccttcaaaaatttcttttaggtctattaaacgcgataacattttgatcgaaaacgacaaaaaatttgcacacctatgttagccatgagcagaagaatcatcattagtataaacagacggatgacacggcggatgatgctgtctcctgctggggacatctgattgattccatttatttatttttatacaatattattcagttcgagaaacaaaatgccaaatatttcacgattttttttttgcaatttttctcacatattttgccattttattaaatgagttaaactaaataacttaagtcgcttctttttaaccagatgtcaaaatattactaaatttatgtaagcttattcttgctatataaaaaaatattattatttaaatttttaccaaaatttattcaattaaataatattaattatttaaaaaggaaatggaaatcgatccgtccgtttttccgtcacattaattacaaaatgtgtaatttgtttcgtttatgcttcactccaacagcggaagaagcaggtgcctttctttctcccctcttaagacatattaattggccatttaaatgaatcccccccccctcccactttaatttattccataaattatattttaataaaaatttataatgatggaagctaatgaaatcgcctgcgggattgtgggattttggaaatttcgaaaaatttttccanataaattgcgggaggtaatccccaggagatt

SEQ ID NO: 23955 - DNA, 1102 bp, Heterodera glycines
aaatttattaatttttttcgcagaaaccacaaaaacgcacctttgcccattcttctaaaacttttttgatttctaataaaataattaaaattaccttattaaataaagcattagccagagtagtttgaactttttttaaattttgaagtttcaaataaagtataagcttaagcccaagcaatttagcttgagtttaagcggatacatttccatataaatatttccattttttctataatttgagttcattttttaatttttaggatttttaggtactaaaaatcgcgaaatcggtgcctaaatagatgctaaaaacttaaaaatgccaaaatagtggcttaaatagtttttataacaaattttttgtttataagcaaaaatagttgctaaaaaagtcgctctaaatcgaaaattgttcgaaagcattaatttaattaaatttaaaatatttaaatttaaaatttttttaaaaatcataggaaaaatcatatttttgatttttgcacttttttgtgaagcgcctcaaataggaaagagcagacatttttagatttttatcttttgtcgaaaaaataataatagaaaatggcttttttcaaaaaattgaatgtacctgagaaaagtttttgctttaaaagcgcttataagagtttttctattacagctccgaatttgccatttttacaaccatttggctattcaataatgtttctgctgttcctttcccattttttgggtcatcgttttgccgtgaattattttatgcctccgcccctccattaatataagtgacccatccatcggcaacagcacattcattttttttgttcatttttctttactatactaatagtaaattactttttccaataaattataaaaaaaaattaaaattaaattaatttggaattcatataatgttcggcttgtttcatttgatctttatttagacaataaaaaatgtctttttcatccaattcatcagatgacgaatttacaataattgacaagggtaattgaaaacaaagaaattaaaataaattaaaagaatattaaatgattttgagaattaaattaattatttttatagcactaatttgaa

SEQ ID NO: 23956 - DNA, 1614 bp, Heterodera glycines
  unsure (1)..(1614): unsure at all n locations
agtatttctatatgtcatatttccataccacacggtccattgattaaaaaaatgagtgacttagttaaaagtttgatttaaatttggagcacaacccactctggaccacgcatatgacttagtcaattaatcaaaaagttaccaaaatatattaattttaggtttgcaaaaacnccaatccattagggggtgtaaaaaagtaccggtctcgagtctcgaaaaccgtaccgagactgaaacccgagaccaagactcgagaacgagaccaaaaaaaaactcgagacttttctcgagtcgagactcgagaccgagagtctcgaacatcataatcatttgaaagctcaacatgtttagaaacttttcccgattgcttcgcgattaaaagattactaaaaaaagttatgcatgaaaatttaaaaaaatcgaaatttttgaagttttttcagaatattttttcataggctatcaatcttttctttctaaggctaatatagcctgtaaagagctttcgaatgtacaaagattgttaagtttgtttgacaaagaaaaaagttataaggccagaagcacaaatgactttttattcgaagcatgtggcaatatcaataaaaacattcatgaatttaaaagtttatataagcagaaatgacttttttgtcggtgttcgttacctaaaaagtaattataaaaatatttaatactttaattcaatttttgattgaatgttgataaaaataaaataaaattattcttaaaactcgtcattcttaagactgaaaatccgagaaatagtttatcgtttgttgtagaagttgagcgggaccgcaaattttggcaaatccgggaccggcacttgcatggacaaatttattaatttcaaaataattttggatttttttatctattatctttgaattcaattaaattttaatcagctatgctgaatgttttaaaattaaaaatttaatcatacttttcgcaaaagttgataaggttttttttttaaataaaaccaaaatgcttcagacataagatttgcacatcaaaaaatttctttaaaatctatttaattttattttatttagcctaaattaaatgataactatatgtaaaaataaataaaatcttactggattgtagaagtgaaaatttaattaataattgcagcaaattaatgaattttacagtaaaattaattattaaattcaatttaaatataaaattgaaaaatgaataataaattaggattgaaaaaaaaaactttttcaaaagtaagtcatctgcaagaatttcgggaccgtctcaataaataaaaaatttttatcgtctcattaaattcttttgagcaattttcaaataggggagaatatgatgatacatttcctcaatttcagaattgtttttagttcccgtaattacgactttatcggtccagaaaattaacgctgtcatgcttttaccccgcttgaaatttaaaccgcaaaatatttccggttcataaaatgcacgacgattttttcgaaactcgttcagttcaatttcacgtccgaatttaaaggtcgaaacaatattttcaaccgtgtgtccggtgtaagaagcccccggacaccccga

SEQ ID NO: 23957 - DNA, 1101 bp, Heterodera glycines
attcagaaaatggcccctaaaccagtcataaagttcaaccctttcaaaatactggtcctgatcctatataatttctttaaccttaccattctctagaataaactaccacatgaactgaggctttatgccacgataaagaatttcatctaagtaaatatttttgtcggtttgaccccttaagccctcaaaatctatgaaatttgaacaattttgaaaatcgcccgaaatcttatgaaataaaaatattttttaatagcagtcattcacatctgctgaaagagcagattctgttagctatgttatatagttttcgttaaaatagaccattattacttttgtaaattaatgcctgaaaaaatattttcaaaattgcgtgcctgaggctgggacattacttatttgtcaccctgtattggcgaattgacagcacaaaatttaaaaatttactcaatttcaccttaaaaacgccaaaaaaaataattatacggaacatgacttggatacggattacggacttacggattaaaaatccggaaaatccgtatcggcccaaaaaaatatggattacgaactacggatccgtaaaaatccgtatacagatccgccggtccgtacccgctctctattttaaacaatgttgtttttcatttgaagacgcataaaaaaagtgtgcgtctctaccgcccacagaagggacgggacagtggaagcagagaaattagtgaattagggtcggggtcactttggcgcgggccattttggcgccgcgaactttcaagtgttataacttttttcttatccaaccaaataaaataattttgataccattaaataggcctaagtgttctttattagcctgcaaaatattagaaaaaataaattctgtttgacaaaagatatagcgtgcggcgccaaaatggccagaaaaagtcagttttttgaggttttttggccataacttttttgtgtttcaattaaattttttgaaattttgcaggctattagggactatcaagcgctttaaaatgatatcaagcttatttatttgaatgagaaataaaaatgttatagcgtttggcgccaaagtggccggttcccatc

SEQ ID NO: 23958 - DNA, 1605 bp, Heterodera glycines
caaattcagtgcaatttttatctaaaaagtcaatttttatcaaattttttgcggcgcatttttccaaggaactttggagagcgggggtgggcagtgggtacggcggtcccgatagccgccgccggggaaatttttttttaaatttataggtaaaataagaacatttatgccataaatttctaaatttatgaataattttaataaataagaacaaatggaagccctggattaattggacaggtggtgaaaagtggacgaaaacgctggagaaaagcgatggcattgtggtcgatgaaactggaaatggaatgggaaatgttgcctaaatcttacacaatcgctaatttacaatatctcgatgcgtttgaatacactgactttgcgtggcaattgcatttgcggaattggcaatgcttttccacgtaaattggcaatttccattttctttgtgccattcttttcgattttgcttccaattcgaaaagacttcagcgcccatttgcgcgttttgaagtgttcgtccacgtaaaagtcaaatcggtggctgatcagcgcaattccaaggccaagttgagaaggtggcagcaaatcgaagacacaaagccaacaatcgccggagatgaagctgaaaaaaggaaaacaaaatttaaaattcaaaattagcattcattttaatttacattgcttttgccatcttttcctccgcttcttttcggttgtctgacattttggtgaaggtaattattaagacaatttccgacagatgtaaaatagcttagcaaaatgaaaaaaaatatatgtaaaatcagcgattcctattaaataggcccaatttaggtatttgcaaattttgtgataataccgaagtcgttaaaatttgctgtttttagactttctgaatccatgaaaaagtcgtccttatttttgtatataaaggacgtttcttggacagaacaattcatttgtcattttatttattctgtatattcaccaatatccttcctcaaccttctccgattatttcattcattttgtttacgattttaattaattttatttatttcaagtatatcccttccttctgaacgttgtgcaaattgtcaacgcacgtggtcaaccgttgccaatgccaaccgtaccgatgccgaacaatgtggtcgcattcaacggaattttcatcaagtagtgttggagctggaccacaccgtttgcagggcacggcaacaattttgattagtgggactgaaatgtccgattgccaccgacgagattcaggcgtccgtccatccagtctattttttaatgcttgaaaactagttgatgatttgatgatgttgaggcactttgtgcaaaaagggatgccaaccttgtggcattggacgactgagtcccggtggtgacaattagacatttcagtctcaggccaattaatgggtcgaaatcgtttttgttgtcaccatcaaatggcaccattcatcctctatttgtttcccccgttttttcagttacttggactgacaacgacaacggaccaaatcaaagcggtgtgtgcattttttgagcattttaacaatttgttaccaataatttgatttgactttttcc

SEQ ID NO: 23959 - DNA, 2102 bp, Heterodera glycines
  unsure (1)..(2102): unsure at all n locations
aatctcacaacgacttcatacactccaaccgcattatacgctatttgttttatttggctaattgtcaaaaaagtgctggaaggtattggaaatcgaaagacagaaaaagtttcgaattatgaatttgaaaaggaatattcgaaaccaggaaatggttttactataatctctcgatcaaaaaaaaaccttggtttgaatccaggttaatctctagaaatatcagtttggaggcaaaaaaaagataaattggcttagaatgaaaattttgtttatttgacattatccgtcaacgtacaactgttaatgtatctgtaaatggtcatcaacatgaaaagacgccgattcaaacacgacccgccccatagtttttactcactgtcaactttaatgaaaagggtaaaatatagggtgctatgacgttagtcaaaaaaccatcaaatgaaaatattttttgatataactttgttcaagagcatctaaatttttaattcttgatataattaaatagcactaagtgtaaattccaaaaagtttcgttaagtttcaagaaagttatgactaaaaatgttcaaaaaaacttggttttttgagcttctcaggtcataactttttttaaacttaaagaattttttaaaaattttgcaggataatagaaaacacttagggctatcgaattataaaatttgatcctttagacgaaattatgaataattttctgtcaaaaattattcatttgatggttttttgactaacacccattttcatggtttttgactaacgtccccagcaccaaatatagtgccgttcgagagtctcaagtctcgaatcaagaaaagtctcggggcaacacaaacaaattgggactttagagtttttagcaaatttgcgggttgctaaatcctacagtaaatctttttaaatggtccacttttactgtagttggaaatatatacaacacaatatgactgtgtatagataagtcgaaggtatttaatttgaaaaaaatttcgttaattttcagaaaagttatggagatagacttttaaaatctccattttttgaatttaatgactattaagtttcctttaaattttctaaatttttaaatttatatattcggatagagaatatgttgaataatcgaaatgataccaaagatgttaaatttggtcgatgtttttgttttcacttttattacctcaaggcgcatttagtaaacttgactaatgttatgtatctgattacatttttacctatcacaacctttgaaactttaagcaacgccaaagcaaacaaacaaaaaaatatataaaaatatttttccgttttttctgtcatttgtgcgtctttttttctctgttctctctctttctgctgcggttnttgtttgattagggcaaacaatgcgcacaataatcaaagtaaataataataatttataataaatggcgagaattcgttggtttgttcgtacctaaaacaaaataaatgcgcatcattttgaatggaaaatgcacttcataatcataataataatcataataaatgacggagagataaatagaccataaaacaagttattattcttacactttgagcggggcggggcgtcggcctaaaacattcattttgagaggccgacgaccgacaaaagcgtaatttatgggtggaaaaataaccaattttttatgaaaatcctctcgaaactttttcaagaatgaaacaaggcaaagaaaagaacaccacgaaccacttgataatatggccaaaaccgaggaaaaaagtttcaaaaagaccaaactttaacattttcagacacactttaatttggcaatgtttgtttaaaatgatggtttaaagattttctttagcgaaagaaaaatataaatttttatatatttttttattttactagtcaccaaaaatttttcgcgaaagcaccttttgaaaaatatttttgaaattctaatgaaaaccttaacttctcgaatgttggcttaccatttttttaaatatataaattggccatcattatcattaattcttatatcaaaaaccattttcacaatatacattttttaaaaattattaaatataaatgt

SEQ ID NO: 23960 - DNA, 1071 bp, Heterodera glycines
  unsure (1)..(1071): unsure at all n locations
ttcaataattcaaattaatttaattgattgcttattttaattaatttaatttaaaccgaatttggtgaattaaattgattaatttgaatcaaattttgtaaattatattttttatccataaatcagagccctgatcattagcgatgctcgagggtcacggcttcaagtctcgtctcagatttttgaattaacaatgttcgagaatttcggtttcgaatctctgaatattattataatgaaaaaaaaattaggtttattaatgtttttacaagaaaaaaggttaaaaccaagctgcaaagaataatgaattttttggaagtgacgaaattttagaagaaggaattaataatgatgtcgtctcggatttttgagctatcgctttcatgatcactcggtcccgattcttcgactcattaaaaatatttgattagaacatcactaatgatcaggacgcaatttgtaagattaaattaacacagaatggcacgacctgttcactttgttggcgtatgtttccatcatgaatattcttcccaacagctgaacttttttcaatcaattagctagttaattgaattagtgatactcgagagtctcgcaggaccgtgtccccaattaggaaaatccataatgatgctcgagagtctcgagtctttcggtgccccttagtctctctctcggtcattaatcactaaacaaaggcatggcaccaacatccttggatttcccatccaacgattgttgcgtttaagccgtgcaaagagtcgggagcagcaaataatgtgcgtgtcaagcaaattggcgctattccgtacttttgccagtcaatccaatcttccaactgaaatcggaaaacattttcctgcaaaattatttaaaatctgaaaaagttgaactgagttttcaaaaatccagcaaaaaaaaaactttttttttttgtgccgcaaaatcctcttaaaaacgtgccaatgtaattaacaatgtcttggacaaaatattgtataaatttggaagaaattgttcaaatttgtaaaaaataaanataaattctaattttttttatttagaata

SEQ ID NO: 23961 - DNA, 1327 bp, Heterodera glycines
agatcatttagtgctttttttaatcaaatcgattgaaatttcagtcaaaaatgggaaattattttaatttaatttaaattttaaaggcaattccgagcaacggactcaacctccacttgaacctcagcgccgaccactttttgccggaacgaaacgaagtgggaaaagggaaaaagaaatgttggcattttaaaaccttaaaaataacggcgaaaattaatttgatcattaaaatattaattgtccatttatctctcttttttggctcttctcccattttgccgccttttcagctgcatttcgccagtgagcttctgttcaacggtgcacccgtacgccttcgtgggcacatcagcacgcgcactttgcacggcaaagtgcaggtgattttcgctggggttgtcgggattgggagggagttcgatcggaaatggaatccccgactaatccgcgcattgggcaggttgagttggcaccgcagtcactcattgggcaacggcaacagagtgaacgaattggggaacgaatcgctcagctgaggacagccgcgttgagactttgaacaaagtgaaaaccgacaaaattgtcaatttaatattatgcataaatattttcaatattttctattttttgcatattttttaatggattttgtaatttttgtacatatttggaaaaaacatttggggccgcgaagcacggaaaattcgacttaattgaaacttattttataattgtgagagtttttccttatttaccgctagtcaaataccattctttctgtaattattcattaagctttccaattaaaaatttatgtttatttaattttaaaggaaacgtggacaaattgacttttatcgcttggcatatgaatttgtcatgttaaccgatgcttttatgtagcatcttaaaactaattaaattatttaggtaatttcttaagatataatatttattcttaatcggaattcccaaatcccgggggcgcaggcgggaaaatttataaatttgagaggaatttatggaaaattgtccaaaaataaacaattaactcagttttgagtttatttccaaaaataagaacactcttcgggataagtacttttcaaatttctaagattcagcttctccaaaaggacaatcttagaataattacacttgggactcacactcaattcttaatgttaactattttattttattttagattatataaaatgaataaaaaactagtcagccctcaaaagccaactttgtgccgcgatttgcaaattgaaattggcgagaaaattgtcgacccttgcttagggcattatttgcccat

SEQ ID NO: 23962 - DNA, 1770 bp, Heterodera glycines
  unsure (1)..(1770): unsure at all n locations
aaaattttagtggnccatgaaattcaaaaaaaaaatgcccaccattgccatcatttaaaaaatgccattgctcttacccgccgttcattacggcaccgttggccttcttcggctgtgccatgtcgccgttttgttcaagaaatgaactgcagtgatgctgctgctgctgctgaagatgatgtttgtaaggagatgaagccattagggcagggaaaaatgaatttttatataaaattacgatttctgactgaaattttaaaaaatttcattgaaaatatgctttcaagacagaaaataatggtggaaaataatgggctattttcacgggttggccaccaaattgagttggcgtggaatgaatgtgccatcgccggcagcagcagaagataggaggaggaggaggcaaaaatgaaggaaatgatgccgaaaaagatggcaaaaaaaacgaattcattgttttcgagggcattttggtgggataaaaaaaataacagcaaatttggaatttaaaattcaaatatttgtttttgaaacatgttttttgggtgcttaatgatattcccgagctgattagagccttgaccgattgattgaaaggccgggatcagattataaatacataaatatttaacaaaattttggtaggtctgaagttcttaaggtttagaaatttaaatccgactgaatatcccgaaattcggaaaaacctgggaacaagacggacccggattttcgaaatagatgcagacaggatgtgccaaacaaaaagccctgattaacaggacgccgggcactattgtatttttcaaaaatataacgacccgaaaccggattaggactttaataaaatttgaggattggaaatctgttcgttggctgatcacagtaatcccaactgagtgatcggaattctgttcatccatgctcaaatcacaaaattaaaaaaaaggtcggctcagagagtgtcttctcaaattacgtcggttgccgagcaatttttttttgaaattgaaaccgtttgatagcctgaggcattgtaattgaaatttcaacattgcctcaaggggaaatttttgaaattccaaatttaaaaatgtgtctcctttgaaatggcttcttcgcagtcccgctcggcgtggggcacagatattttttgtgccattctttccgcagaattggcccgaagaattgtgtcattgtgacatgccatgccacacattgggttgttgtgttgttttgtgtcagtgtgtcccattgaaatggccttaattaactgtgtgccaatatcggcgaattttttttatcgcttcgggcgcaaacgaaacagaaaaaaaagacagtaaaaaggcatcgcttgagggcatcaatttgctcatgcgaaacaaatttgattgaatgaaagtgaatgaatgccagcagaagcaccactcaattgaggaagaatgaatttgttaaaaaatggcacaaaaattaaaattaatcatttgggattctttagttttttgtgtaaaataaattaattaatgggtcaatattatttaaatatatgatttttattttgcttaaaaaattcaaaaaattctaaatatttagaacaaaaattcgttaaaattttttgaatgtttcagggtttttccaaagaaataatccaggaattttattaccaaatttttgaatattcatttgacagtaattaattatgaattaaatttcaaatttggcaatgatgttattgaagatatcacaatgaaattttttagcacttttatt

SEQ ID NO: 23963 - DNA, 1833 bp, Heterodera glycines
aattaatgtaatttaaattcacttaaaaattatttttcaattttaaataaaaaatttaaccgaacagactccgatgtgtcgactcgcagaattggcccgcgcaaaccatgtaaaaatgcagcaaatgtgcaagataattcaataaataatatgtattttgtacttctttgagggggggggggtgatttgggatttgtctgactttttaaatattatttaaaaaattattttctaaaatatttcttaaaattaaccccccacactcgaaatttttaaaggaaaattttcattttgtctttaaaattttcgatttttcgtttttttccttcaatacctctctcaccaatctttccaaaaaaatttacgttaaatctgccccacccccttgctgcagcttaagcatgagtatgtgctgttggacgaaagtgggccggcccattgcaagcagttcgttgtcaaattggtgctgaggccgggcctcgagttcgacggcagcggcccgtccagcaaaaaggcacagcagtcggccgcccaggcggcgcttgaccgctggtgccagctgccgttgcgccaaccgccgcctgtgccgacggcatccgcgccgccgctgccgctgccaccgtttggcacggcggtgccgtcgtcggttatgtcgcaacagcagcaccagcaacaacaatatcatcttcaaaagcggcacctccggggcggtgccattggtggtagcgcagccgctgtgaggcacaacagcaccagacggggtgacaaaaacaaaaattgctttttcgttttggttttaaggaaatttcatgaactgttttgagccaaaaaaatttttgccgtactattttttttaattattcgattgccattacgcttctctgttttcctcgaaaattttcaaaaaaaaaaattgattatttttgaaaaaagatatggacaaaatatttttgttttagtcgtggcttttttgaaaacatcataaattttcttgatttttgcttgataattgtgaatacattggcattttgtttttggctttttagatgacaccaaaaatcccgtttgtttgctgaacaatgtggcggcccagctgggcatcaatctccattaccgggaggaaagcttttcccctttcaacgacaatttctccaaatcgctacaacagtaaattcaattttttttttgtttgttaatattaaatatttaaattaattaattaatataatcacacaaaattcacgaatgtgccccttggggcattaaaattgaatttgaaaaatattattatatatattcttaattatcttttgttaatgcctaattattcctatcaaaatgcttcagtccctcctttctcacttatttgttgccacaagcgttgtgcccggccgctgcgatacaaagtgtcaatgggtcattagcggcaccgcttttcgctaattttccacaccaacaacagcagcagcaaaacacatcggggtaacaaactttttttttgtttaacgtatttctttgatgatggccaatgcaaagcgcttatcgacagagccattattatgcgcataactaaccgttttttatcatgaactatagatatattttacacgtccgctatgttattccaatactataataccgtgtttactgaattagagccccgggggctctatttttcaaccccctcgaaaggcgggctctaattcagtaaatacggtatatctatgttcacatgttttgtttttattcgctcacatatattttttctctttttccttgttttcatgagtatgcataacaattatattatatttccatgtttatttgtgtttt

SEQ ID NO: 23964 - DNA, 1846 bp, Heterodera glycines
  unsure (1)..(1846): unsure at all n locations
aaaaccagggttgcgatgatggtgatatgattacgggaagcaggtgtgatgaggaacgtgattgttatcgtggcgaatactgtggcgatttggtaatttttgtaaacgctataaacccttaatatggctctgttttcgttaacgatcgcgctcttccgaaaatttcttaaaaaacttaaaatttctaagaatttcaataccaaattttgcgctacataaaaagtggcggccattcaatttttttacatttaattattcatgctttttattaaatttttgtttttacagtttccttaaaaccactcttttcctgttatttttattatcaccatattattcgaacaggtgccacaattcatattcgattactcttaatagaccccctttttgtgccatattaaattgcaaaatttctgtggaattttttttagcaaaaatccatcttaggtttatgaaattaaaaatatttgaatggctgcaactttttaagtagtgccgaaattttattatacaatacattttttagaaactttgttgtcttccacgtcgagctgcacaacctgatgaaccatcacaaccagttcggcctcaaccatcaccaggccaaaggactcgtgaacccagcgctgctggtctcaaaaaatagcgaaaatttccaaaaaaaattcctcaaaattttcacagcctactgttacaatgggcaacaatcctctgtgagatgcgactttcaaagcgattgcctggaaacacaaagttgtataaatgggttgtgctgtgttcggtcgggcagtgaatggaaaagtgagaaaaacgaaaaaaaaaaaatttggaaaattttttgaaaattttttttgaggcgcctgtggtggtgccatggcggtgtccaactgttttcaagatcgtagttgccatgacagtcttgtgtgcacttcatcggattactgttgcgaatgcccatatggacaaacaaccgggcaaatgcacacatgtaagcttttcgtttgcaaaaaaaaattaaaaaaattattttaaacaaattaataaatcccaaaagtccaatttcaatcattaatttttctttataaaaaacccatgttaattttattcaaattttttttcgctttattacccaacatatttatataagtagaaaaatatctctcattttaggaataattaattaatttatttatttagttaaattattcatttattcccacacaaattcttatgtagaaaatattcttaattttcaagaaattattttatttaatataaattttttcatttttttttcacaattttctcaagggttgtcctccaaatttttcctgctcgtccaatggcttttgttgtcctcgctgcacaactggtgaacaaccgttcggctcctgcttcaacacgcgttgcgcgcccgggtacacatgcgttgccggcaacatttgttgcccgaatgaagcgagatcgcgactttgaacttattttacattttattttgttaattttagcaatatgttattaaattaaatgtgccatcaaaaattttccaaaaaatatttagggaaaatttggtattaatttatagaaatttcttgtgagaatccaaaaaaatttttgaaaatgtacccgtaaaaattttttttttttgaaaataatagatattaaaaattagtcaaaatttgctcattttacggacaaatctacaaattttcaatcaaattttgaaaattttctccggcatcgcttttaaagatcttcgatttgaaaaatcttgaaccgaaaantaatttatcttacaccatcttcacatttcactttgcctttaactttttatttttcgacctgc

SEQ ID NO: 23965 - DNA, 757 bp, Heterodera glycines
tatattacttttatataaaaatatccccatcagcatttcgtggtatgattttcggcaccacaaaacgggaagcgagttcgatgtgacaattccacggagacgggaaaaaggatttacatcgagatcggtcagcttttactccctttcttttttattgtgatggcattgtatctttttgattagttgttgtcgatgaaccaatccgtcgtggcaatcgccgatttgaggacactgactgtgccgcgtacactgtccatctgtttccgcccattcacttcatcaacacattgccaatgccagtccaaatttcggtgcccgtccattgcgaattggcaggcggtgacgggctggacattgtgaatttggtcgctggattcccactcattttcacggtaagtgaaatttaatttaattacggcatgtgctaatttgaacccatttgtttcccttgcaggttaatgtcggtactgaagtgtacgagttgcattacatagtgccaagcgttaaaaatccactggaaaccgttcgaatggagggcaaaacgaacaccaatttagaattggttgggcatgcacctttaaagttattcattaaattgaactgaattaagtgccttggtctgaattggagcaccgaattcttacgcacgaatttgatgctttacgcgccctattggatggtcaacgagacgggcaaacaactcgcctattatgtgagacatggcaaacaaaaattgcaattcatttagttttaaatt

SEQ ID NO: 23966 - DNA, 1693 bp, Heterodera glycines
  unsure (1)..(1693): unsure at all n locations
acattttgnnntataaattcagaaatcttgnnttaatgattaataaatgtgattacatatntaaatgcaagtaccaattatgtgggatttttttaggtaatttaacgaattaaattttatttatttagactgaataatagttctgcttaaagaattatttttattaaataaaaaattaagtatagtataagatttatatattttttaaattattcctgcaacttgtttcgtcgataaatgcgaaaatttcaaaaatccataataattggaaaatttttcaaaaaataactatttatttgcttttttaatagtcgaacataagtcaaataaatttaaccaatttttttcgaaataacagatttttaaagaaagaaaaatcaaaaattcaaagaaatgattttttaatattcttttaaattgatgaataattattttcataaccgaattaattaattattaaaatttatttttcagaaaaatttttaattcagtcaagacgtaattgattagcttttttgagttttttgataaataaaacattaaaaaatgaatagacgaaataaaaaatttatttgaaataataattcttttatgtaatgtaaaattttaaataaataaaaaaggccccttctgccatattcgtcttccacttaaaatttttacagtttttgtgtttaataaaatgaccttataatatacatttttcatttttagtgtgattcttaatatttatggggagggtaaatttggtaaaaatttcagctcggttgggacatgggaagtatgataaatgaaaaaatctttagtggccttataatttctttacagactgtacgcgcagctcgactttgaaaacttgatagggtatggccacttaagagtttcagaaattttgtatcagtacaatttttggagagtccggaaccgggatcccggcaagagatggtttttgaaaataccataaaaggtttagcaaaatttagaaaaataaaaatatttagaaacgactaaaatttaatttactttagtttaatcgcttacctttcgtgtgtaaataattaattcattaattaatgtttttggtttttttcttgaaaaattccaagattatcccggtccaggaagaaaaattcccaaatcccggtcacggctattgaaatttcggaaaaccacggtcttggttttcgttcccgtggactctaccacagttcaatcagtcgctttttcatttgaacccttgcaacaaaacaagcaaagggtactatttcccttgcaaaagagtcaaaaatctcttcctcataattaagtttgttaattgagttcaattgggtcattattattcagattttttaaaaactgaaagggccactggaaaataaaaattcgttttataaattcacaaaaataccaaattaaaattacaaatgcatgcgatgcaaaaatgcagtcatattgtaaaatccagtcccaatcgtattgtacaattttgttcaaaataattattattcaattcaattaatcgatgccaaagatattttaataataaaaatgaaaaatcaatcataagattttttatgacgcattgggccgatcatttgagaaattcacattttaatatatgaaaaaagctaataaatgaagcaaaggttctattagtgaaaaagaaaattggaaatattaaattctccaattt

SEQ ID NO: 23967 - DNA, 296 bp, Heterodera glycines
tctaagagtcaataaatatgctttttaaaaattgaataattttaattctttgatcagtgtgtaagttaaataatccagtgtaaaacaacaatcccataatttttagtcttttccaatttagtcaatgcccccgctttaaaaaaatccaatgaaaaatgccaatttattatgcttaatgcaattatttgaagattccatagtaatttttaaaaatgagtaagtgaaatgttgtgctctttttggcaattagcagcagtagaattaggcattttgttgttgggcatttccgttgagct

SEQ ID NO: 23968 - DNA, 1616 bp, Heterodera glycines
  unsure (1)..(1616): unsure at all n locations
tggtactctcatgtcatcaacgtcaacatccaaacggctcactcccgctacggtgaatatgtgttcaagcgcgaaggtcaggtatatcaagtggacagctacatcaaaggcacaaatgggaagcgggacaaaataatagaggtgaatgggtgtctgtggcacggttgcgaggagtgtttttgtaatattgacgaagaaactaaaatgccgaacggaaagacgctgcgggagattagggaaatggaagagaagaaacatgaaattttgagccgctacgtcgagttggaggttgtttgggagcacgagatcaaccagaagctgaagaagaacaagcagatgagggagttttttgataactggaaggaccgctcgccaatcaaaatcagagacgcgtttcatggaggaagaacaggaccaatgaagctactccacacagcgaaaccaggccaaaaaatcagctacaaggacttcaccagcctctacgcgtttaccaactttacgaccgactatcccctcggccaccctaaaatcatcagtattccaccaaatgagcagacggtcaactggcgctctccatccgacaacccctacaaaggccttctcaaagtgctgattctacctccaaacaacaacatcaaagtcactgttatgcccataaaatttgatcaacgtttcctattcccgctctgtgaaaagtgtgccaaacacatcaccgcaaaatatcccaatggcctcaaagacaacgactactcatgcccgcacttcaaccctaacgaagcgccttcgtgtccacttgcacccatcttgagttaaacgcagcattggaggccggctacacagtccgcaaagtcttccacgtcctccaatacgaccaatgaagtcggagcctggaaagcggtacattgccaaactttgcctcaactcactctggcgccgtttctccatgcggaacctccgctccaaagcaataatcaacaacgacccttgtgttctccgacaatacaccgacgacaagaaaattgacattatggacattgagctgatggatgaggacaaaattaatgctcacctacaagccgaaagaggagtttgtcgacgcaaataagtactcaaatgttgtcatctccctcttcactacatcaatggcgcgtctatacctttacgaaatgctcaaaagagtggccgacacccccggatgtgaaattctctactttgacacggacagcatcatctaccttcatcccgaggacaacggcccactcccgacagaaaagggacacctcggttagctgacggacgaaaaaccggaccacaacattttgtaattcatcaatgctggctgcaaaaactacgggctgaagttggaacgtaatggcaatggggaaattaagtacgacttgaaaataagagggataacgttagccgaacaaacagtgcaaacgatccattatgacagtgttaaagaccaaattttgcgttatgatcacgatgacctcgcggaccgcatcattgtaacttatccccattttattcgtcccaaccttatcnaaggcaaactgtatacccaatctctaactaagcattaccaacctatattaancaaaggtattattaat

SEQ ID NO: 23969 - DNA, 1911 bp, Heterodera glycines
ttcttttcaaaatgactttttattattcatttttaaaggtcatttttttactctctaaaaagcaaaacaccgaccaacaatatttttgcctctctgtgaagaaaacggtgctcattaatagaggggtgtaggctatatttgtaaaattgggatacgcaacagcagcccctcggggtttatccgcccatgggcaacgaatggaaaacaccccaaggattagcactcattaattgtacattcataaggcggcatcgctcttgatcgacagattttggggagatggggatgaatgcgaaatagaagctaattgacccccggggcacaaagggagacaatgggagagggattaggacggggattaactgcggaatggacataggacagagagagagagagaaagacagacatattgtgccgatggaaaaagccgaagagacggatcagcggacggaagcggcgcggcaaaaaagggaggagaaaaaggccaggaatactctgctaattgtaaccagtaattaagtcgaatttcggacattaattttaatttgccattgtttcagttttatttcgattcccaaattcagcttctgctgatttgctaattaactttcctccggtcccttacctgctgctgttccctcctccccaatggccaatgaccatgacccgggcaaaataagtcaaaaggacagccgaaagagctgattgacctcaatgatgggctgggctcagagtttattcatcagcagagggatggggcgaaatttgagcacatttgcgttaattaaggataaatttgggaaggcgggaagggaagggacgaacgacacaaaaggggggaaggggaagttcaggatgggaacacaacaggggggatagagcagaagttcaggatggacactccaagggatgggaggaaattaaggatgggaacacagccctgagaatagagcagctgaagtcgaagaaaagcgcacccccccccccccccccgccggcggcaggaattacccgagtaacttaatccgccggttaactcacccccagctacgggttttaactcctactaaatgaatgttacagggttctcgctgggcttacccgcagctacaggttaaattatctttgtaactttattttggaatttttataattttgaatgaatggctaccctggcccaacccagggtaggcaagttcgaaaaagcaattggatggaggaaaagagtactgtacccaccttgctgcatttggtgctgtggcaagaatactgtagacgacaaccgtacgacaataattctactgtacttttaaaatgacaaaaacaaatggaaaagggcgagaaaatggaaatttttgaggaaaacaaatttagtttctgctaattttcggtgcacggaattctgcgctttgacaggaagttgacttttaagaaaggtgggctgtggcactctccgcccataattcacttttcataattctcaccacgcccccccccccccagaaaaattttggtattaccgtaaccggaacagaaggcgagtgctatttgtactcctccaaatttgacaaacaaaagagaacaaaaggcgggccccccaaatccatccaaagcattcacctggatgcattttgggcatgtattagtgggaagcaaatggcaaaaatggattcgtcacgcttgacggactgttcccggggaggaggccaaccgcgggcgggactaaaccatgttcacaaattgccctttccattagaattaggacggctcggaccggacggagcgccgtgggcgctttctcagggtaaattgaagaatactagtacctcaccaaattcgacgaatgataccaataaaatattgatcagtcgattcctcttgatttctaattggaatctatttctgagggca

SEQ ID NO: 23970 - DNA, 1632 bp, Heterodera glycines
  unsure (1)..(1632): unsure at all n locations
ttattttttattaataaattaancattttggaagaatcaatttctttaagagttagaatgttgattattatttactaaaatatcccataaggatagttataaataaatcatcaagataaattttggaaaatttcttgatcaagaattaaatgatataatgggattttctaaatgacgcctgaaaaatttgaatttttactgatttgttaaatagttattaaaatttcgtattaattaaaatcaattaaagagtttaaagaaatctgaaaaatgttccattccactgaagttaatattttaagcttgtttaatttatttaaataatttatttatttttaatgataaataaatttgtaaaaaagaactaaaaaatagcattttagaaaattttaaccgtaaacttaggtagttcaaaaataaaactttataaaaatgctctgcaataaaaaaaattaaaaaatgaaacaaaatgcggtccgcgacgcaatttcacggaatcttgaatgtggtcttggtcaaacgcatgatactaaataaataaattcagtttataaaatactatcattttctataaacctaactaaattcaaagataaatgtaatattaaaaatattaaaaaagtttttttaaaattaaaaaattgcaaaaacttattatctataattaaacataaattataatatagtatttaaaatatgataaaacttttttgaaacttttaaatatttgatgcaggcactaaaattaataatatatttaaatatgaaactttaaaattaataaaataacttgtaacaaatataaaaatataataacaatgaacgatctaaaacaaattaacaacagaaagcaacagcgaacaaggtttcataaaggatggaggatcacgagaaaaataaatatgtaaatttatataaaaaaaattaaagaatgacaacgacagcgccattcccgactacgcaaaactgcttattaagcagttgcactcgctgttggccaccgcttcgtctctagttcaatctcaagtgacggcgaatgacgcgattgaggaagaccgcagacagcgaaccgttgtcatcaccaatgtgccggagttccaatccgggaaagcgtcggagcgtggggaggcggacagagcactggtcaatttgattttggacacagtggacctcgatcaaacgccagtggtgttccgtgtcggcatgcgaacgcccaacagagcgagaccgctcaaaatggaatttcccacgcgacatgcggctcggcatgtgctcagaatgaagggcaaagctttggcgttgaatgctctacatggtgcgcgcatcagggaaagcatgaccaaggagcaattggccgaacgccggaaattaattgagcagtgcgcacagaaaagaaaagaagacgcgggagattggattatctacgcgaatcaggtcatcctgcgcagtgacattgacacaattcgtaaaaatttttaaattttcatgtcaaatcaccaaaaaatcatataaatttttacaaaaaaagtttttgctttttccggttggtagaaaatttttataaaaaaataaacaattttaatttcttacaaacagttaaaggggatgttaattatttaaaaggtctaagct

SEQ ID NO: 23971 - DNA, 1004 bp, Heterodera glycines
  unsure (1)..(1004): unsure at all n locations
aagttacaatttgggtgtcattcctttgtatatcttcagtatagtctccattcatactatatttatacatttaaaactatcatactgtatttacttttatggtttacgcggtgttatattctttaaaagttaattcttgcaatgatgcaaaacaatttatcataggaaaattgaaaataatcaaatgaaaaaaagaaaggaaataatttaaaaaaaacatttgttaaagaaaaaggcacaaaaagatgtaaaaaagatgaaaaatatcgaaacaaaagcttaagacaggacagtgtaaatatgcaaaataaatgcttcaattagtgttttttgttccacaaatgattttcatgtcgtttttattttaaaaattagcatttgaccaatcattaagcattagccaatttgggccccgccccgttcctttttttgtgtcccccgtccctggccagcattcattctgttcgggagagggattggcttagccaatcccccaatctctctccctcctcccactaattatcccgagaccgaactgggagtcccttccccatcccacatttactcatcatttactcatcaaatatatttgtattgtgcgcacattactgaaataaagagcatattcaaatgccgccgctgggatttttggggagggacccgtcgcctatttcacatttataatgaaattaactaattgaagcaaatcaaatcaccactaattatagtgaaacgaatcgactaaaacattgtttggttgacttgtgccgaatcacaaacaaagcacgcaatgtttaatcagcttgacaaaataaatgagaaagccaatcgcacttaagacaaacgtatacatatggtaaatgtaatttggcattgccgaattcatatgatatttcacttgngtggcaattgcacagcctanaattgtgccagaggtaataaacccactaatggcaccagtgcatgttttgccgtcatcatcggcacgttttcgtcgtcttatg

SEQ ID NO: 23972 - DNA, 1782 bp, Heterodera glycines
ggggctttattcccgtcttgcggtaatttcttaaccactgttaaaataagtaaaccatggttaagaaattaaacccgcgatttctcgtcttcccttttttaaccatggttaacgcttaaccacggttttttaaccgcggttatggggcagcttaaccgcggttaacgcctctaaaccacgtattttcattttttggtattctcgttttcccttagttaaccgcggtttaatttttcccttgtaattttaaccacaagtcgtagcagggttaagcccttggttaagagaaaaattaaataatattctaataaaaatggtctaaaaaatttaaaaactgtcaaaactattaaaggaagttaaaaaacataattatctttttataaccagcatttagaaattttttaaattttttgcatcagcgtcgaattgaattctttttgacttcttttcaagtaaaaaacattttttacgaccgtaaacttacatacaaccgacctaaaaattttcaaaatatattcccactaaaatggaattttcaaaaaaatttccccgaatattaattctttctttaaaaaaactttattttattttttacttttattcttttcatgagaacttttttttgaaaacgaattttcgtctaaatagaaagaaaaaaatagtaaataaaaaaaattatttacgatttttgatacctattatttgctgagtaattagcctagatatatattttttaaattttaatcaatgaaaattaattctcacgaattttagaataaaaatttattttttgtatttatttatttaataaattcagtgcttaaccgtggtttacttaaccgtggttcttaaccacggttaaagacgagaatacatattttggttaaaaataaaccgcggttaattaaaccacgattaaggcgttaaccgcgataacctaaccgggaaggaataaggccccctgttcggccataaattattttatgcgccatgaacagatcaagcagatttcgtctatcttgaaatgttggcagttggaggttggtgaaatatttttgacatttttcaatatttgtttgaatagatggattccaaatgttaaaaaatgccaaaatatgtgctaaataggtgctgaagccgaaataagtgcaaacgaaggaaattcatttgacgtttcatggcaaaattttgcaatgaataaaaattcagaaaaaagtcattgccaaaaaatgggggaaactaaaataaaaattaaccaaaatgatgaagaaaatgtagcgaacaaactcgcctcccatcgcggggttcgtcaactcgacgattcgtcaactcattccaaaaattacttcaaaaagcattttccattgcttttcatggcgatgaacaatttttaacactcatttagagcgattcgaatccctaacctcgaagtcgcataaaaccacgatcgcgtaacacaattactttttttaatatttaatatctgttgctgccttatgaaaaattgaaaaagttccaaatgcgttagaatatttattaaaaaagaaattttataattactttaaaacaaatgcattggaaggaaattaatgaagtttatgcaaaatttaattgttacaaaattctcccaataattaacaaactaatattaaataataaatcaaattatataatgatcagtcatatggataaatttgcaaagtcctagaaggcatctcaaattctgttattggttccctaggaagatcacctcttaactgcttcagaataatatgcaacata

SEQ ID NO: 23973 - DNA, 1138 bp, Heterodera glycines
acgacggggtgagcgcctctttttctgttggcttaaataaacaaaaattcgaaattttggggaaaatgaattttaaaatcatctgtcgggaatttggggggggcagtggcgagacagccgggcaaaagccgggaaaagccgacgaaaattggaggaaccaaccgctggacaaattattatcatttttttgttgttttgtaaataataaataataaaattattaaatgaaccaacaaatgtgaatggtttttctactctgaatagaagcttcgagaaattttttttctttgaatggaaatttatttaaatattttaaatttaggctatttaaatgatttatttattttataaaaaattataaaagaccaagaattttttagtagggtaaaaaattttcgaaaaaattttaattgaaattttaattggatttatttgctttattattgaatttttaaaaatccgacaagaaatcaaattagttaagaaattcaatgtttgtgcaagaaatttcgaaaatggcgtaaaccctcttataaatcaaaaattaaaaaaaaaattgtttgtaaatttttgaatttttttgttagtttctacaaaaaatggggtggcctaatgggtaaaagattttctccctaaatgataaatttcataccaattcaaaactgataagaaaataataatcaccataaaaatatggttattgtttgacgaacaattaaatgattttctatgactcatcgctttttttgcgcaaaaatttcgcgcaaattcccatgaaaaaacaacaaaaaacaaagaagaaaacatttgttcattttttgccttaaaacgctccaaaattagcacacacaaacattcgccattcgccccgggggcaattcgaaaggaatttttgggtggcaaaaaggtgagacgttttgtggcgggggaggggggaagaaaatgtgggggggggggtgaaaaagcatttttgtcgtcgtcaagagtggtcgagaatgtgtttggtttggcgcccggcgccccgggcacaaaaaggggccgggccgaggcgacacatcgccattatataacaccagcggcgacggtggcttcggcaggcggctcccgcccccgccccccgggggaacggccccttcca

SEQ ID NO: 23974 - DNA, 1763 bp, Heterodera glycines
aacgtttagaaggattgtatagcctgaacttggctgcgaccaaagcggccgggccgatttggcacacttcattccatcccccccccattccgttcattttttccttctctttcccaaacttttgaccaacatatcacttaaacgttggtgcacatttttttgatcaaaaatgagataagcagaaaaaattgtgtgtgattttaaattgaatgctgaagaaaaagtggctaagatccaccaaaaatggcgtttattaggcagagattaaatgcttattttctaaataaaataaaaatttcaaatttttcacaaattacgcaggctttctcaagagttgatttaatattcaatcaggaaaagcaaacttagaaatgtggataattgactccatcactctcataaatgccctggatttcgatattgtgaatattttcgtgaatgtaattttaaactttttaggcttttttgtgataaattttccaaaaattgcgaaaattttcgtaaaaacaaaaaccaaatcttacaaattaattatctccaattttaattttaattatcattaaaaaatgtcagtttgcctctggctctggcagcgtctaacggcatcatcggatcttatctcgtgaattttcatttttcacatattttgcctaaaagtccctttaaattatgacttactagttaaaatatgttaaaaaattaaaaaataataattttttccggctacacctatcggcaccactgctccccaattttcttaaattacaaaattaaacctataaattagggctgggactctgatttttggctgggaaaatcggggtggtagttgttcaaatctgttggagttataagttctcaatttttgccttatgtaaacaactagtctgaatgaatttttcaaataaaaattatagatcttatttgtcttgtaagaaagccaatatgaaattaaaattgccaaaatgaatttgaacaatgaaaatgttgcattaccttcatcaaaagcattgtttttccatttggttttaacgcaaatcttttcgccaaataaaacttacgaccagtcaaataaattgtatcggtcaatcggtaggcaattagcactgatcaccagtggttcgaattggctgttcatctctcctctgctctctctgatcattcttcgttttcctcgttttgctttggcacttctcatggcaccgacccgaaatccttgggccgagggcacacagtcaggctgcaattttttttcacacagatgcccaagtcgatgcgacagttcagcacgcacccattgtcgttggactaattggtgtagcattcttggaaacaacttttgaatagcttgtagcagtccgtgcaacacttcttttgctcctccctttaaaaatgcaattataatgaaaattaacaaattttatgttaaaaatattcaaaaatttgcactaaaacgggctaattttggctttttgtttacattggcactttttttattccggtcccgctaaaatgggcattaaaaattcttatctttattcagaaagagccaaatttcaaaatttcgtccttggttgtaagccctctaaatatgttctaaaaagtttaaagaaggggtggcaaaaatgctcaaaattatttttttcttttatattaaaaaagattattttttgaaatttataggccaatagaaagactaatgatatcgaagccataccaattgaatttaattttgggttgttttggttaaagttatatctctt

SEQ ID NO: 23975 - DNA, 1611 bp, Heterodera glycines
ccgtctgccctgggttggtcgaaaatacacttaaaaggaatgttaatgaccctccgtcggccctgcgttggtcaaaatgcacttaaaaggaatgttaatgaccctccgtagactttggctactcaataggctttgggtctcagaactgaaatatcccgtgggcactgggagtgaaatggctaaacttaaaaaataactctggggctcaaatggcggcactgtaaaaataactctggggctcaaatggctgcgctgtaaaaataaatctggggctcaaatggcatacgcgagcgtttaaatggcccacacgcgggcgctcaggtggcatgcgtcccttcccttccctataaggcatgacagctgacgcccatcctctgcctccctttccttctctaatacgatttggccttgagttttatccttcagatgttttttcaattatttacctcttctgggattggatatatttattataggtgttttttaaaggtttaaatttggtactgaaacgtccctttccattgggactgaaatggcggggctgaaaattaacgacgaaaatctacatgggtaactacttttttagaaaggatttgtcagtgaataattattttatccttatttttttcattaatatcaaataactgtttgatattttcatgaaattttgtgcgaaaattgttaaaaattttgcaaaataaaaagaatttgacatgccatttttgcgattttctattgctaaatctctctcaaagcattccaatggaaaaaattggcatcgaaagactttatcttctttttcctattataaatgaattgtttttgagatttaaaaaaatataatgtctgatcaaatctgccaatatttgaacatttcaatatctaatactgtacaaaaaaatttggcaacacaattcgtcttttggatcaaaatttgtcatttttcgaatgaatttttagtccaatgcatcatcagtttattgtagcaattagagaccggcgcgggacgggatcccgcgcgggattttgcgggataccagtccgcaatcccgcatgcgggattaatcccgcgggatcccgttccgcaaagaattttgagtccatcattttaatgcatcccgccagcccctaaaaatttatttttcaaaacttcaggtattttttgatttttggatttgaaatttaattaaatttttttcgaattttccaaaatttatgaaccaaagttctgtttattaatttttaatgatattttgacactacaaaagacaaaattcgcattcgcataatttctcttttcatttaaatttcgaaaaatgctactgtttgtttaactggtgtgttaaatgttaaggtttgaagctggcaatttttatgaaccaaatgttttaaaattttatgaaatatggcgcaaagcagacaaaaaattcaaacaatctaacaatttgaatgctaaataaatatttggtcaaactctttaaatcaaattttccatataaaaaggtcttttcagaaaaaaacataaattattcaacatctcttaatagtgcagtttatctaatattaattaaattaattatggctttgcttgggcctgtttagaataataat

SEQ ID NO: 23976 - DNA, 1780 bp, Heterodera glycines
ggggacctctagagtctcaaaattttcgagctaggcctaaaaaacgtttttttggtttttgcattttaagaatttttaacgaattttcccagaaaaacgaagaccacttccaaaacatagtttttcgagctctatcgactggtatttttttcggaaaaatttcgattttttcccggaaatagaaaaaatttttggcctgagcgggacatttgagtcccgggcccataactcgtcaggagttggttttagcgaaaaattgtcttagaacatttttgtagagaattttaaatgctatcgaatggtgtactacatgatataaaattttcaaaaattttcgagctaggccccctagaaattttcgaaatttttttttgggttgaaaaagtgggtgaaaaattattttgtggggtattttgaggtgctgagcacgaatatgatgcttattttttgtttcggaaattttagaattttttaaaaattcgaaaatattttgcaattttttggccctcagaaatttggtcgaatattcgaaaattcatatctagcctaagggttgaccaattttacaggaataaagccttaaaaatagagaaaaatcaggagaattttatgggtttaatttggattttctagcataaatattaaaaaagttattccagaaattctggaaaaattcgaatttccagaaaaaaattcagaactcggttctgaaaagctatttgagaaaagtaaaatactacaaaaatccgcaatttttttctctataatataaattttattttacatttttatcacatttttaaaaaaagatataaaaataaaagtgattttgtgcttcgggtccaaaggggggtgaccaggatttttgagttgaaaaattttttcaccaaaaattttccaaaaacatgtctttaggggttatttgggccgctgatcacgaatacgtgatcagattttacttttgacatcgttaagacctcagaatccctgtgtgattggggattctgagacatcatttgaggggggggggggcaagttcgaatccggacggtgtaacattatttttctgtgcatttttacgttatttacaatgattttaattaatctgaagatttgttgtagattattttaaaaaattttttacattaaagaatttaattatttattttttgaattttctaatctcttttgcacctcttctaatcacttttgtacctcttttatcacttttgtacctcttctaatcacttttgtacctcttctaatcaccattgtacctcttctaatcacttttgtacctcttctaatcacttttgtacctcttttaatcacttttgtacctctttaaatcactgttgtacctctttaaatcacatttgtatctcttcatcaaatttgtacctcttttaatctctgttgtacctcttctaatcactgttacacctcttctaatcacttttgtacctcttctaatcacttttgtaccttttcaccaaaaatcttccaaaaacatgtctttaggggttatttgggccgctgatcatgaatacgtaatcagtttttacttttgacatcgttaagacctcagaatccctgtgtgattggggattctgggacatgttctgagggggggggggcaggttcgaatccggacggtgtaacattatttttctgtgcatttttacgttatttacaatgattttaattaatctgaagatttgttgtagattattttaaaaaattttttacattaaagaatttaattatttattttttgaat

SEQ ID NO: 23977 - DNA, 2252 bp, Heterodera glycines
  unsure (1)..(2252): unsure at all n locations
tataattaaggcatattacaaaaatctttttaataaatgtttttataaaaattattaatttttaaacttaatgataaattacttttttgaatttaactgtttatagaattttttttaatcatttaatccataattttttgtcttagaaataaaacattgcgggtattagccattttatttatcataattttttatttttatcctaaaaattagagtgccacgggaccgggccgggaattcccggtcatccgaggtcccggtcccggtcccgggttttgaaaagctcaggtcccggtccccggtcccgggttttgaaaagctcaggtcccggtcccggtcccgggttttgaaaagctcaggtcccggtcccggtcccggtagggcaaccgggaaccgggaaaaacaagcactggtaagaatggggtctgagtgaaaaattagtgaagaaaattggagtcaaagggaaaaataaaaaataataattaatatattcaaataaaaaattagtaatgaaaaaagccaaaaaaaaattttaattatcagtagtaaagtgattttttagtgatttaactcttttttaaattaaattgaatgaacgaaatgtggaatgaaataaaaggaaattttaatacaaaatttcaattgttattaaatcaaaaatgtaatattatgtaccttgcctgtttagataagacaattaaaaagatgagcattttgaactattttaatgtgcagagtaaattcatttaaattatatacattcgttttaaataaatggatttgattaaatttaaaaatataaaaatttaaaaaaatttcaaaaccaggacaaatagtctcccaggtagtgtttgtatattaaaatagaacataaacaaagatggacaaaatgaaaatgattgattaataaaattttaaaaaagtttattaatacctgaagaatttaattttaataacaaaaatattataaataatcccaaacaaaaataacaatgatagtaatgtcaaaaacaaaaagtgacaaacgataacaacatggtaaatctggacctcaacataaaaatattgcaattaaattaaatgataagcaaataaaaattcaaatttataaaaagtagatttagcaattgaataacattacggcctaatatgcacaaaaaacgagttttcaacttggtttgaagcttctagcttgaactttttggtgctttttttttgccttttttgcaattttgatgccttatgttttattcgtttaagtaaattaaaaattctagcattttttattgtgttttgttcatatcttgttaaataatgtttattgatttttaataataatctttttatctatcatcattcattatttattaatgttcttatgccatttttacaattttagctttttttacaatatatttttattcaaactttgtcactaaaatatatgcgaataaataggaatttgaaataattaacattaaataatttatcaaaaaatttacaacaatttacaaaaactaaaatcaaattatttattctttattttaaaattcatttaatattattatatttcatttaaatttaataaatgaaatttttaagattactaattattattattatggtaaaatataataaaagaatttattatttaaataaactttttaataatccacaattattagtttttatttaatatttcctttaattttttaaatttatatatattaatattaatcatgaaattgcaacatgaactatttttttttaatttcatgtgctcgttcatagtttttgcattcttcaagatgccacattataatataattttttttctctaattactaataattaatttaaaattaataattattaacaataataggaaaatataaatttttagaataaattcagaaaatttatttatattttctttttctaaaatataatataattttaatttataatatgattataggggcgtattttataacccctgacatatttttggtagattttgtgaaaaaaaatttccactcaaaaatcctggtcacacctctttggtcccgaatccaaaagtcatttttatttttttacaattctcaaaaagtgataaaaatataaaataaaataattatgatagagcaaaaaattgcggatttttgtagtattttagtatttttattattttaagcgatataatttaaactttcttttatatgtcgcganttaattgctgaatagttaatatt

SEQ ID NO: 23978 - DNA, 1604 bp, Heterodera glycines
aataattattttttatttggtctatttcaaaacattagatacatccgtgggggggtggccggtaacgacctgccgttgcgtggcattcgatcaccactccgtcttggcggaaggttcaaaggtgggaccacttggggtccgatcaatgctagtggtggcgactgcaacggcagagaaccaaatggtccttgaaattgcatgattgggctgaaatatgataactagttctccttagttattcgaaaaatagattattatcaccgcgaatctgttgcagcgtccaatcgcgaatgttggttccaaacgaatctgatcgttttcttgatcggatgtcaataaaacttctctcccttcatattggtcaggcaagccacattcgatgactttcgtggcccgtggttccaacaccgttttgtagatcacggtgagcgaatcgattttattttggttcactttttcaaaatcaattacagtgtcgctgatggcatcgtacatcttaaagcccaattcattaagcgcattcgtgccaaaaagaaggtcaaatccaatcgacggtttggcgatatgcatcgcgactttgacctcgctcgaattctcatgccgttttatcggcagacaaataactcctaaacattccaaaggattgccattcgcatcggaaatgcgattttccgctttcaaaacactcaaattccgaacgtccaattttttgtcccttatcaaattgtagaggaactttgcctcaattacagaaatttgtgcgcctccgtcgagcattgtcttcgtcttcgttccaaaaacttcaaccaaaactgccattacttttccgacttttgaaaaattcgaatttttgtcttccgtcgcgcatttccttatttcgtcaaaaaaatcttccaggtcctgcttcaattcaccaacaatgaaattgttttgatgaacttgttcctcttgcagaactaagcaattttgcttcaaataattcttttgctggtagtgccgatttggtgggttttcgttgggctcaggcatttgctgccgattataacccatttgttgtttgccttgttgattaattgtcgtagaagagttagttcgctcaattgcgcgaaaaatttttccttggggacaatctctggccaaatgtcctgggctgttacagttgaagcaactccaacttcggtttgattgggttccaaatttttgcatttgctggccccgttcctcaaaattgcttcttgagggcccattattcgtctgggaaaaatgttgcggtgtgttcgttctccaagtcctttctctgttgtccggcctcgaaaatcgttgtgttgccttttgcgtagattcagcacgcgcggcaagtgacacgaagtggtccagggtcatgcctggcgttctcacaagctcgaggtataacgcgagctcaggattgcccatcgctctaaccagaaacttaatggcgtattcgttgctcaaatgctgtggcaaaccgttgtaagctctctgtaccaagcctgaaatacggttcgccaactcgtcaatgctttcgtttggtccccgtctcacgccttgcatcagatcatcaaacgcatttcaaatgcgtgcgt

SEQ ID NO: 23979 - DNA, 2096 bp, Heterodera glycines
tttgttcgagattgagaaaatttgtttctctgtggttcgtctaattcgacccacttcgttcccttcctctactaaatccttgctgctgttgagagcttgatcgttctttatatctaacctgacggttattcacgttattaggataggaaggtacccatgaattaatatttgatgaacgatcaccattatttgtccaagaagcattcgcaggtgcctgatttaaagcatggaccgcgaatttgagaggatcagaaatattggattcattagtattggttaaaagaagctctaattcctgagcttgagagaaaactgcctcaaagtcttggtttttagtgacaccagtaagcctaatcagaaatgttaaattaggtttaaccctttccaaaaattcatctttaagtcgggattgaatttgagtttcatcctgacccgcacagacagaagagacaagtggtgaaagtctagaaagaaattcccgaactgtttcggaatcgcgttgtttacacgtgactaatgcacgttttgacatttccttacgctcgggagagtccaatttttccctaatggcatccaaagctttgtccaccgtatcctttttattgttcggtaatttgtcaaaaattttccgaattgacccttcgagcgaaaatttaagtctacccaatttttctttttcagtccaagttgttccagcatattctatgaggtcccggaatttttgggcccaattatcaaaagcggttaggttctcatccctgcaagccggaagctgactagcaaatgggtctatagtagtgagaacattaagaatttcttcgtcctcttcgggttcgaagacagttcgccttaccatggtgcaattcccttgtagtgatgtcctgttatcattggtgtctgaccattcaagtgtatccactttatcaaccaattgatctaacctagtcgtaattgtgtccatgtttgcattcatatcagctgttgtttggttaatggcatcagtattttgagtcgccctcctattaattacccttaaactgcggttggtagcatcctcaagacgtattacaccttggtgaaccttatcaataagtgagattggggcattagaatttggaggagcgcttatattttggaataaatttctttcaacaattgcaatagttacttggtcttccattctatccagagaatagttcacaaatgacataatttcagtgtattagacttctactatttggcttagattaattagatgaatgagttaaatgagcactcaaaaaaaaaacaaaccaaaaacttttcttatagtcttacgactaatcagtgggaatgagatagatttgcgcagtggtgagtaatacgggaaaggaagcgtgcaatttaggctgcgcggatacttatgtatgaaagttttttggctgtgtgcagtagaagtagtagctgggaaattgttttgcgattagaaagcgcttggaaatgaaaatgatttgtggctggagagacggaatgctttatgcgggttgtaataaattttttacgccccattttcccatcgcgataatatcggccgcggcttagaaatcatcaacattaagtgactgtaatgagcaaagttcatatggaaatgctgctataataatacagtaactttggatacttaattcggaattgaaaatgagtatgtgaataaacgatatttgaagtgaattgaaaaaaaaaaaattagagatcgaatttcagcgaaaaatcgaagagggaaaaaaaaattatgaatttgacttactgcaagggcaatgccattggcatgtgggacacactccgaatgcggggcatgcgttcatgttcgattcggccatttcggcgatgttcagtgcctaaataataactatttcaaattggtcaaacataaaaccgtcgccaaatgcacacaaaaaaatgtgtataattaacgaaaacttgagaagaatggttttttcttaaccacttgttaatttgtaacatgcgtggtacatagcgttagacactttaattgttgaccctatttctgagaatatagtgtgaaaaagtcgaagaatcagtaatatcagcccaaa

SEQ ID NO: 23980 - DNA, 1216 bp, Heterodera glycines
aaaaaaaaaaaatcgatttttttcaaggggccgttgggggtcctccgacaattatggggagcaaacatcccccgcaaaattaaattacaggctatagggaagctattcccgaaggattcggtctcccccataaatctgggcgcatcggttcggggggactcccccgaaaacaaaaaaaatcgattttttcaagggtccgtttggggtactcaaacaattatggggagcaaaaatccaacgcagaattaaagtacaggctatagggaagctattccggaaggattcggtctccccataaatctgggcgcatcggttcggggggactgccccgaaaacaaaaaaatcgattttttcaagtgtccgtttggggtactcaaacaattatggggagcaaaaatccaacgcagaattaaagtacaggctatagggaagctactcccgaaggattcggtctccccataaatctgggcgcatcggttcggggggactgccccgaaaacaaaaaaatcgattttttcaagtgtccgtttggggtactcaaacaattatggggagcaaaaatccaacgcagaattaaagtacaggctatagggaagctactcccgaaggattcggtctccccataaatctgggcgcatcggttcggggggactgccccgaaaacaaaaaaatcgattttttcaagtgtccgtttggggtactcaaacaattatggggagcaaaaatccaacgcagaattaaagtacaggctatagggaagctactcccgaaggattcggtctccccataaatctgggcgcatcggttcggggggactgccccgaaaacaaaaaaatctattttttcaagtgtccgtttggggtactcaaacatttatggggagcaaaaatccaacgcaaaattaaagtacaggctatagggaagctattccggaaggattcggtctccccataaatctgggcgcatcggttcggggggactgccccgaaaacaaaaaaatcgattttttcaagggtccgtttggggtactcaaacaattatggggagcaaaaatccaacgcagaattaaagtacaggctatagggaagctattcccgaaggattcggtctccccataaatctgggcgcatcggttcggggggactgccccgaaaaaaaaaaatcgattttttcaagggtccgtttggggtactcaaacaattatggggagcaaaaa

SEQ ID NO: 23981 - DNA, 1314 bp, Heterodera glycines
  unsure (1)..(1314): unsure at all n locations
aactttattccactaaattntgaccaaaaacgaagagagttatgaattttcaaaatttcactggattttccggggctcaaattttgacgatttttcaaaaaattttaaacacttaccaaaaagtctgaaactaaaaataaagtatattttcgagttcagcaccttaaattaggccataaaaatgcattttggctaatttaggagcaaaaaaatttttcatgaaatgcaaaaccatggggtcccccctttggttttgagtttcaaaatcacaattaattttataactttttttaaactcgtgataaaaacatgagataaagcacattagattgggcttaaaattctctacaaaaaagctcttagacgattttttgataaaatcaactcctgacgagttattgagccagaactgaaattgaggcctagcaaccaaaattttctatttccaaaaaaattttaaaaaatttttctgaaaatgacaccaatcgatagagcatcaaaaacggttgcttgaaagtggtctccgttttccccggaaaaatctgtaaaaaatactaaaattcaaaaacctcaaaagtgatgagggggcctagctcgaaaatttctgaaaatttcagaaatttaaaaaattgacaagatagagctcgccgagctgtacaaaaagttcagcggcgccaacacgctcagcgcaacacccagcgagttattttggaaaaaccgaaaaatggaaaaattggaaaaaaatttttgcgaatttttgcaggccagggctttgatcctagggcctcgcccaagaagaaaaaaatttcccaaacattccaacttagggccctctcagcagacgtttttggctccggcttccctgaaaaaagttttggcccaaaaactgcatgcatttttccccaaaaagccatttcagcgccgctggcgctcagttggcctccggaacggaatgcctatagttttcctggatgcgcctcaaaaagttgcttaagcaatgccacactcgcgagcccctcccgccagcggttcccgagattttagttttagcaatgaaactcactgttgttctaaagtatataaactagcgtgtgggaattgacgggggcggcgtaggccgttaggttttggatgaagagaaaatggacatgctcatttgttattttaaacagacaaacattaattgcattagtgtgaagttttaaagcgctatcgcgctatgggacgcggcttcgccgcgtcgctagaaagtgatgtaatttagcaattcatcgcagcctcaggacgggcgctcgcgcccgtttttaatttttt

SEQ ID NO: 23982 - DNA, 1569 bp, Heterodera glycines
  unsure (1)..(1569): unsure at all n locations
attttttagcgcaaatcacacnnaaaagcgaaatttcgcttttttgcttattttgacataatttattattnntaagaaaattaatttannttcaatattctcgagaaattttgcngaaaaaatgatttttgaaaatttttcngggttttgggctcaaaaaggctaatttagctgctgggggccgttctaatagaggtttttttgaaaaatgccaaaatatggacataaaatatggaccaaaatgccaaaatatggaaaaatatggaaatatggacataaatcgcgaaatatggaaaaatatggatatagaaatccttcctagaagcttcaaaccaagctaaaaacatgtttttcgtgcgtttcaggcctcccacagtccaggaaaaaaatatggatttccatgtaattctattccctagtcatgagagaccccatgtaaagaaagaaagacagacagacagaaaaagccaaaaggggtggactccagtcagggatggcacggtccgatttacaacatttttcggtcggaattacgatttagaattttcaaaaaaatttgggccctcggaatatgaacaaaatttagtaataaaatccaaaaaattcatatttgaatttattttaagccagatttttgttagatgaagtaaacaatttgctaggatttgttagacgtcagaaaatgcttaaaatatcacccaataaagaatgtttaaaatctgtttgcttttgcaagactaataatctcatagcaatggggccgaaagttcgtcatcattttttttcacattctcatcccattcgacagtatagccagacaaatgcgggcatatgggactagtgaattcataattgtgagacatgaatgcattgattttcttcctcaaaattgccacagtgtcctctcttttcacccaaatattgtatgtgtccttattcatttctgccaatttgttatctttttaactgtttgctccgataaataatccacatggatttcaaattcatccaatgccaagaaaattattgttttttttcaaagtagttagtccacggtacccgtcgccgtcgaggtgtgaaatntcacaccctcgacccggggccgggttttcacacctcgacggtccccggttttttgccttttttaccgcaaaaacccaagggtattggctgttttttcgcgcattttctgggggaggggaggggggggggtcatctncgacgtccctggttttcacaccttaaacggtccccgcttttttaccgcaaaaacccaagggtattggctgtttgtttttcgcgcatttttttgttatactgtaaatttttatttttatttaaaataaatttttttattcttcattgcttttcttctcatccttttccctttgcactcgagccgatgggcggccaagggaagagaagaaagggacagagtgttctcgttgtctctgcctttctctcttcccttctccgcacttcctctccaagttgtgtactatctctccacccccgaatattaatatgcatatcgtttccaacggaatcgcaaaatgtggacgaaaggag

SEQ ID NO: 23983 - DNA, 951 bp, Heterodera glycines
ttattaatcaaaaacaacgttggaaattattaattgaatattcatttaatttaaaattaaattaatttttttacaaattcaaaaaataaataatgaaattctttaattaaaaaaataaataaatttaaataatttataaaaaatatttagaattaataaaacatgtaaaagtaatcaaaaaatgcacagaaaaataatgtacaccgatcggattcgaacttcccccccccaaaaaatgatgcctcagaatccccaatcacacagggattctgagggcttaacgatgtcaaaagtaaaatctgatcacgtattcgtgatcagcggcccaaataacccctaatgacatgtttttggatgattttgggtgaaaaaatttttccactcaaaaatactggtcacccccctttggtcccgaatgcaaaaatcacttttatttttataataattcttaaaaaagtgataaaaatatgaattaaaatttatttaatagagcaaaaaattgcggatttttgtagtattttacttttccctaatgacttttcagaaccgaggtataaatttttttctgaaaaatcgaaaatttgcagaaattctggaataactttttttgtttttgtggtataaatttcaaataaatctcataaaattctcccgattttttgctatttttaaagcattaattcacttaaattgaccagtcctccattgagttatgaattttcaaatttaacccaaatttccaaggaccaaaaaaattaataatatttttgaatttttaaaaaattccaaaaaatctgaaacgaaaaacaaacatcatatttgtgctcaggaccccaaataccccagaaatatatttttcaccctcttttttcacccaaaaaaaaaatcccgaaaattctagggggcctagctcgaaaatttttgaaattttcaaacatgtagtacaccatt

SEQ ID NO: 23984 - DNA, 2097 bp, Heterodera glycines
cgaaatagttaactaaaatagtgaataaaaatgccaaaatagtgacaaaaagtccgaaatagtgacgaatattttcagccaaaaattaagcaaaaataatttttattcactgattgcattgcaaatgagtagggctgggatttttaagggcaaaaaaacaaaataggtacataaaaaaataatttttaaaattaaaattcttgccacgaaaatacctttttgagaaatttttttttcatttcataggagtatattttgaaaaattttagctcgattcttaggggtgtattttttgaaaaaatttttaggtcgattcttaggggtgtattttttgaaaaaatttttaggtcgattcttaggggtgcattttttggttttattgcatttttgttaaagaattttccaaaaaatgtcgaaatagtgaaaaaatagtgacaaaactccaaaatagtgaattttcactattttagtgacaaaatcccaaaatagtgatttctagtgaccgataatgacatcagaatcgaaaatttttaacgcagaaatgcgttttttgagctcctttcttcaaaacaattaggcaaaaaaagtttttcactaaaagttgcggccctaattattataaaaataattaattttcttaaggcgtcgctggagaaaataatatgatttttggtccaaaaattttttttcggacattttttgtgccaaattttcaaaaagtcaaaacaaattattaaaatgttcagcagaatgcgtgccattggtggtgtcctcccccgtcgtgccgtcgacgaattccgtcggttgggcccaacaatttgcggacggcacactgaaccggcggttggcacaaattatggtggccaaacggaccaacgtttgcctggcggtcgactgcacacactgtgaccaaattttggaggcaaaaaaaaaactattttaatggcattaaaaataatggaaaatggcaaaaaaaaaaaaataataattttggtaagtcacgaccataaatccagttttaattttcaatctatttttttggtgaaaaatatacaaaaaaattaagtgttttttaaatcgacgttcaaaaacaagcacctttaaaacagacaaatgaatatccaaatttgaggcaggtatatctaaaaaaatttgaaaaattctcgccaatctccccgattcattgcaaattattattattattttttacaaataataatacactgatatgtcatgcatggttcatttttcagattgtttccgccgtcaaagaccatgtctgtgccgtgaaattgcaccacgacattgtggtggactttggcgctgaatttgtggccaaattgcacaaaatggccgatgagcaccaatttctgattgtggaggatcggttggtaaaacatctaaacaaatattaccgggaaaaccatgacaaattcttaccaagaaaaaaaaagtaccattttcccccgaaaaccctggcaaaatattatccccgataatttttttttatagaaaatttgcggacaccggcaaaacgatggaaatgcaattggccggcggtcggttgccggcggtggcggattgggccgacctcgtcaccgcgcacgccctgcccggcatggcgtccattttggcactgaaaccggtacattaaattgctgtaaaaaataaaattcttgccaattttgcgatgtctctcacccaaattttttcattggcaaaatttgtgcccatcgggaaaatttttagattttttttttgaaaaattccgaaaaaatagccgattgccccgaaattgccaatgggtgtcgacagattgtcgcctgtccgtcccgccgtctgtccggccttttgctgattgcccaactcagcaccgacggggcgctgacggacggcgcttacgcggccaaatgtgcgcggattgggcgcgaatgtggggactaaattggtggccggattcatctgtcagcagcggtgcagcggagagagcaacgacgcaacagaacagcaacaatttttgcattggacacccggtgagacgaggggggaggggtggaaattttgaaaaacaaatttgactagggataattttgaaaa

SEQ ID NO: 23985 - DNA, 1642 bp, Heterodera glycines
ctaaaaacccaaaaattaatcaattggtctttttttaccaatttctgttaacaaatcgcattaaaaaatacaaaatttttcccggcggcgcctatcggcaccgccggccctccttgttccccaaaagtcttgagaaaaacgtgccgcgaaaaaagcggtgttgaaagcaaaaaaacttggtcaccctcgatatacatatacttctgaacaattctaatgctaaaaaacaggcacttgcgcgaaaactgaataaaaattttgtatttgaaaaattttgtccaaaaatttttacgttggaaaattaccggtttttaccggtccggtaccggtggaaaaagttggtaccggtaccggtaccggtttttgcattaccggtcagtaccggtaccggtttttgcattaccggtcagtaccggtaccggtttttttgcaattaccgattaccgctcaactctactttaaattaaagtttttccataaaagtttttattcgttacctattgtaagcagggatgggcgtaattacggattcggtttatggattatgggttgcggatttttgcgatttcatgtaacttttaacattaaagaaaaatttagaaaatgcagcattttgttttaagtgctaaaaagttgcattaaatcgaatttttttatctttttaatctgcagattcatttcttcatatacagcaaaaaaattttatcataaagtgacaaaatttgaggctttttgaatttcgttttctaaattaaccaccggtcctgtaaatatttttttttcaaaaaataaataagacgggccctgctggggcagacagtttgtcgtaaaaataccaatttattattttggatacgaataaactaatgttatgtgaattgttaaaaattcttgaaacttttgtcaaaatttcaccatctttcttttttcggctttgattagaaaactcgacggcataataaaaatttgaaactcagacttatgaacagattttcacacatggcacacgatacctgggagacttgaaattttgggacccgatattagggaccaaatgttgtactgatcagaagaaataatacaaaattttattgaataaaaagtatattattattgtcaatagaaaaatttaaatttaaaagaaatttaatattttgaatcgataagcaatatgataacttaaaatacttaaagaatttaaatttcgaagcaataataaaaagaaggaagaaagatgttatacaagggaagaatgctattaatttacataaagaaacgaaaagaaataatttaataaaataaatattgtttaaaaatactaaaaataaataaatattaaaaatcttaattatgcacaaataaaaaataattttattatattcattatgcaaaaaaaatataattaaaaaaaaccttcaactttgatgagaaaatgctaaagaacagagaccatgaaattataccgaaaaatgaattataatttaaaagttcaatttctttaattttttataaatcagcaatatggattaaacaattttgtctttttatctattaagagaaagttatttaaaaggtatcgagttatgcgccctccccaaagaaattgtgttccccgcatgttggatttgccgagaaaatcagt

SEQ ID NO: 23986 - DNA, 1043 bp, Heterodera glycines
  unsure (1)..(1043): unsure at all n locations
aaaaaacctnttccgcaaaaaccttttggttcacttaattgttcacatcctgttgagcaactgcccgtacacagatccacatcccaagaacattcttgcaatgtgccgattgggagcaataaaagcagcaaagccaacagaagaaattgtttggacatttttagtaaaatattttttttgatcgaccaacagcgattggaattaaatggaatggaaaagtgtttgatggaaaattaaaaatttttggaaaaaaatgaaaatttaaaaatttaattttgttatttcggactttgttatacctgaaaaaattaaaaaattttctcaaagttttgatcggaaaaatgccaaatttggtttggaaaattaaaagaaataaagttttgcttttttaggatttcggatgaaatgctccctcccaaaatataggatttaaggctccgtatttaaaatttcattcaattccccaatagttagaaaggcctaggttttttaataaaagaaattaaaaataataattatttatttatttctttttctccgcttaaatacaagacgaattttcatatttttaattgaaaaatgatgaataagcaattttatttttaatttaaattgaacaatgaaggaaacgaaaatttctataggcatttgcattttccagtcaaaaattttaattaaaaattaacgaataacaaaaatggtttttacttaaataaataaataaaaaagtgcaaaatgggcaaagaaggaaaagtgaaaaaataataattttcagcaaaagaaaaaattcatttttaattaaattttattagatattttatttttaaaattataccaataaaaaacaaaaattttcttttaaaatatttaatttaatagtgattaccataattaaaaataataattttcagcaaaagaaaaaattcatttttaattaaattttattagatattttatttttaaaattataccaataaaaaacaaaaattttcttttaaaatatttaatttaatagtgattaccataattaatttaaacaataa

SEQ ID NO: 23987 - DNA, 1267 bp, Heterodera glycines
ctcaccaacatagtttgacataaatccattacctttcccactttgcaacttaattggcttacccatccttaatcggtctcattttgtttttcgctaatgatcaatgatcattttatcactgtctgaccaatcacttaactgatcactcacattttgacattttgttgcatccttcaatttccatttgccaaatgccacaacactcaatcatcaaatcattaccagtgccatccctccccacacccaaaaaaatgccacaaacaataaagcatcgcctgcgtcgtgcactgctcggcccatgttttgccgtcgttctcccaccaccaccaccaccaccaccgaatgctgttggtgccaaatttgtgccacctcctgtgccgctgatgtgcacttgcgacaccgttgtcgcaattgcgttggccccctcccggctgtcgtcgcgcatgttggccggcaaagatacaccggcgttgccacgccgtgcactcagcacgctggtccgtgccactgtctacgactacgagctgggcaaacgccgcaaactgtccgcctcaatgcgaaccgagtaaacaatgatggcggcacaatgccttttatacccataagggggggggggcttttcctttttttgacggcttttcctcatcacccttcagtgtcccctccactagagccttcatttgcaattgtggatttgcattatgggatctgattagactttttgatcattatttagggacatttgatcggaatagctgtttttcgtaacctaaaatttccaaatttcaaaaaaaccttcagttcattagctggcagaagactttgatcactctataattatgtattaattggtcattggtattcgagtaatttttatttgaactttactgagaagaccatttctgatcagtactgaacagatcaacgctgtccctatttgttctgatcaaagatgattaattagtaaggaattgaagcaaattaattacccctctggcccaatgcaagcacactttttatgggctacaaattttggcataatatgcctggtccttcctcctcccatgtccatagtcttggccgtcgttgttcccccgccggcgctatcgtcggcggccccggctgtgtccattcggcacaaaatcgtcacgccatggccatgtgccatcggcttggcccatcaatgctcggcatcggcatgggcaccatgatccttgaacggcaaatagaggttttcctctatcccgtacccttacaattggcataa

SEQ ID NO: 23988 - DNA, 1792 bp, Heterodera glycines
cctttgtttgtgtgtgtgtgtgtgtgtgtgttgtttgtcgtctggctggctggctggtggtggctgtactggaaaattattcccacccaattttcgccctaatcgaatcacgccgacgccacgccagtagcacagtccgccgttttgcactcacttaaaaatttccatccattcccatttttctaaaaatgaaatatgtacataaaaatcaattttaaatggtttgtcatgcattttgacattattttttgtgggatttttgaatcgaaaatattgtcatatggtttataaaaaaaaattttcagcaattttttttaaaattggattaaattttggccaaaatttactaaatttttaagggttttttttttgttttaattttgaaaaagtgagaggaaattagtcgggaaattaggtgaccaaaaataaaaacattgacaaaattgattaaatttgtaccttatgttttttgaaccaaaaaatcaaactttgttgaaccaaaattatataaaaatatataaatttttaataataatttgttcggaagaaatcattctgcgaaattttcttactcgcaacatttaattcactatcataaaatttcatttccctttatcaaatttctaattgaattcttgaccttttctccctctctccgctctcatttcccgttttaattaatgcactaaaattaactggccaagaaattgataagcgtacagataataaaataaattaatgatcgtcgtcgggttcatttttctcattttttgctttttttttgtattgaaatgttcacacaaaattgcgatttcataagtgaacgttttttatatgtgctgtgctgttgtgcactctgatcagagtgccggctgcgttacacaaaaaaagtgatcaattaaattaattgactaatttaattttcctatcgccgaaattcttcgcttacatttttaaaataaatattcaatttaaatacatatttttattttaaatttactttttttcgtatgtcgtcattattcattttcactgaattttggtgtaggaatttggacgtagcgatcagtcatcaatcacatcatttatcataattccttttaccgcactaataaccccataaaacacttcgattttgtgtgagaaaagtgcaaaatttggcatattttttccctaattcgtaattatgaacaaaaatttgaaccggaacagaatcagtacttatcaaggacagtgcccaggactctggaataaaattcattctttcgttatcccgaatcgaataggcttacaaattttcgctaattttaatttaatttatatttattttttaggttttaaaatattttttggcttattgctgttcatcgtcggcattttccagcaaatttttggagcccaaatggcaatgctcaacgggtgctgggacgttagtcaaaaaccatcaaaatgggcgttagtcaaaaaaacatcaaatgaataatttttgacagaaaattattcataatttcgtctaaaatggatcaaattttgtaatattgatatttttcgataatcctaagtgttttctattatcctgcaaattttttaaaaaattctttaagtttaaaaaaagttatgacctgagaagctcaaaaaaaccaagtttttttgaacatttttagtcataactttcttgaaacttaacgaaattttttgaaattttgtaggctaatagaaaacccttaggcctatcgaatgatatcaagaattaaaaatttagatgcttttgagcaaattatatcaaaaaaat

SEQ ID NO: 23989 - DNA, 1688 bp, Heterodera glycines
caaaaacttgaaattgtacaaaaattcattaaaatgaaaaatgaaataaaacaacaaaatagaaaatattcattaaaagaatggcaccaaaattatgatggaatttgtaagaaaattggagttggctatggaactatttgcagatggaagaatcaatttggcattagctgtaaacgaataacggagaaagaaaaaactggaaaaaatgaaaatttattggaaaataaaaatgaaaagccaaaaagaatgatgaaaatattgtaaaaaaccttggatttttagaaagaaattgttgaattttttccgttgataaaaattaccatttattttctttaatttattaatttatacgcaaagcttaagaatatacaaaacaaaaacaatggaaaaaattcaaataaatagccaaaaaattgggggacaaatcgaccagatagattgaagttcgaactagagctgagcgggaccgggaccggggcgggaaatcccagttttttcaggtcccggtcccggtttttggaaaaattgaaatcccggtcccggttttgccagtcccggttccggcgggactaaataagcactggtaagaatggggggtctgtgtgagaaaagagaaggcaattggtggagattgagaaatttttgagaaaaaaattaaattttttatttcttttaaattatttgtttaatattcttatgtggtgtagtgactaaaccttctgaccttaattaattttcgctatggtttaattacccaacagaacagaaaatattttaaatttctttacattatttcaattgaaatttaattaataaaaaatatttcaacttaaaaattattatttttgaaaaaacagcgacacaaaaagaggcattaaagaattgaaaagactattaaaatttctgatttcggttgtggaaacccacaggtgttcaaagcattcaaatattcaagtttctattattttcgtgaacagcaacatttttcggcgctaaaatttcatttttggccattttacaccaattttctgatataatgaaatttcataaatctctttaatttttctaaaatctctttacattgtgaatttattttatttttattgaaaatatgtttattattttcgaatgagctccagtagaaactaataaaattttatttaatcattaatttaccaattggcaattattttgtcattaagataaaattattattattattctttgaaattaaacaggatttccttattttattaagtaaaataatgatttattcagttttttaatcagaaaaaaatcatttaaatgcctcgaaaaatgaattgccatttaattgaagaaaaataaaataaaatcatttcgagacgacaaaaatgaaattatttccgctacttttattaattatattatttttaattgtcaaaattggagcagaaaagaaaaagttacaacaaaagtcatttggcgaaatatttggagaaaaatggcaagaaaaagaagaagaaaaacgaaatgagcagaaaaaaagagaaataattgaaaaatattataaaataaaagaaaaaataaaggaaaaaggaagaaaatactcaaaaaaagaatggggaaaaattgacagaaaaatagcgaagaaattagggacaaatcgaaattacattcaaaaatggatcaaagaattggggcttaat

SEQ ID NO: 23990 - DNA, 983 bp, Heterodera glycines
  unsure (1)..(983): unsure at all n locations
cgaaaaaggcataaaataatgggaaaaggcagtaacaacaacttttttggataaaaatttttttaaattaacaaaaagctgtcaatctttctttatgcattgacaaatcaataaatataaaaatattttcgttcgttttcattttagaaaatttcttttttggtcatcgccgagttatatacagaattagatttagaagcagagtgaaattccaatttcattgacatttataaaaaaattcagggcaatttaagggcatgcccttagaaaattcccatttaaaaaaaaaactatgaaataagtaaaagttttgtaccgttggcattggcaccaccgccttccgccacgttgccattggcacctcttccgtctcccgctaggttggcattggccccgttcgcattgttgccgccttcgcccccctccacgttggcattggcacctcctccgtctcccgccaggttggcattggccccgttggcattggcaccaccgccaccgcccaccacatttcctccattggcaccaccgccaccaccatcacccgccacatttgcattggcaccaccgcccgccacatttgcattggcaccaccgccaccgcccgccacatttgcattggcaccaccgccaccgcccggcacgtttgcattggcacctcctccgtctcccgccaggttggcattggccccgttggcattggcaccaccgcccaccacatttcctccattggcaccaccgccaccaccatcgcccgccacatttgcattggcaccaccgccagcgccaccgcccgccacatttgcattggcaccaccgccaccgcccgccacatttgcattggcaccaccgcccgccacatttgcattggcattggcaccgcctcccgtcctattcttttttggaattttttttggcatgtaaagtttatttaaattntctaaaatttgatcaaaaatatccatctctaaaattagtaaaaa

SEQ ID NO: 23991 - DNA, 1240 bp, Heterodera glycines
ggtctacattcaattcgcagtgtttcgcccagccatcgattaacgttcatttccaactcattttgtctattgtttgcttcagtgtccgccattatccaacagtgacgtggaagaagattagaaatatacaagaaaaatttcaacgcaaaaatacattttatttagtgataatcgcaatcggtgacaatttttattaaaatataagcgttttctttaaacaaattttcattggtctttattctttacgtaaactcgtgcccaaaccaaatgctgattgaaatgcttggctccaacgctgaaaagtttttggtttttcttttttttgaaaaaaattcgaaccgcgaacgtggtgaaaccatccgcggggaatgaacaaacattcaccggcctccacaacagaatcgtagcattggacatttgcaaaatcagggaactgctccaagtcaagacattccacatcgacctaaaatgcggaataaatcataaacgaaaagatttaattttcctaacaaataaaggaatttgcaatataattttttaaatagagcaaaataagcacttggctggtattctgtctcatcaaatcgtcgtacaaataaagtcctttccgattttggggagaaatcagacgaacaaattttcggcctcgaatttgacagaacaaattatgccgtgggtcagtgtgcaacggcgaaactaaaaacacttcagagattatttggaagagaaggtccttcgtttgcgacatggttcgaagaaatagtaaaaaatagcaggtttaattggtccgtcaatgaatggattttggtaaatatcgttaatttagtaacccagacagagtcaacacttactattagtagcaaaaaatttttgtttgtcagattttggaaatctaagtttcaaactttggtgacaacaaagactaaaattgacaaatgccacagaaattaaagcaaccctgaatttggtataaaaaattattcgctgactcacctgttccagcgggtccaataaaagcattgatagtcaattcgtggtccggttcgaaccttgccccatcgccaatctcttccccgaccggttggtcaccaaacacacaataatcaggcacaggcacatccgcgagcagttcgggaatttggtcgagcagtcggtgctgggccatgtagccggactgggacggctaaacgatttaaaaaattcttaaaaaattttgttaaaacttttttagggaaagggg

SEQ ID NO: 23992 - DNA, 996 bp, Heterodera glycines
  unsure (1)..(996): unsure at all n locations
ccctatcntgttaaaaaaatagattcaaattataaaaatttcgtgatttaaataaaaatgaaaaatagttaatcgcagtaccggttagtatcgggcctggtttttccaaaattaccggtcccgaccttctctaatttaaagcgactaaatttatttgccaaattttctttggtggtttatatttatttgataaaaatagcagtttttgtttggatatttaaatatgtcatacctctttctagcatttcagatagtttatagcaactgtgtttttactttttattgaattttttgacttatcaaactatttaagttattaagaacatttttaatttgtccttgcacgctgattgaccgtcatgaaataatagcagattctttttcttttttggtgtttgatttttatttttatttgatttttaattttttagttcatagtttgtttatgtttaataaatcgattttaatttattttccaatttaaaataatgtagatctggaatggctctttcaagagtgaactgtagaggcatgacatttttggaaacttttttttgtctatttgggtctaattcaatatgaacttaaatacaataaggttgatcacaattaaatgccgtagctaggacattttggttatttaaaaactaattatatatgtaaagacaaaatgattttaattaaattttttacattgaattgactacgatcgtttctcctataattaattatattcataaaagctgtgccatttaacaagcagcaatttttaattttatttannaggtgttttttattaaataatattaattttggtattttttaaaaacgttaaatgctttttaagtaagatttttctgagcctttaccaatatttttctaanttattttttattgttgtctttctattntgtatttacatttgattntatgatcttttatttgggtatttaaaaacaaaatacatattgaaaaaatttattagaatttttaaat

SEQ ID NO: 23993 - DNA, 987 bp, Heterodera glycines
ataattattagtacaaataaaaaatttgaatattgcttaatctcatgtttgattgaaatatgtaaaatttttaaaagttttaatctttcacttgtttaaatatattttttctgaattaaatacccaaatgtttatgattaatcattttgacagattaatattttgtttttaatttacctataatttttgtaattgtcatttaattagttttcttaattgtatatgtataagacttttaaatgattcatcagcattatgttacaatataaaacagaataataattatccgggtgctattaacagaaagcctcctattctctttttgaagaaagtattatatggcacaaaatttatctgaataattatttattaaaaaaatatgtgtatttatttatctctaataatttaaatatattaattttagcacggttcggcatatttcgttatggttttttagatgtgtttatattgcatttttcgataaattatattattgtttaggtataaaattaaaaaactgcgtctatgacggagtaatattattaaatcatattatttttctaggaatataaatattcgtttctttaattgtaagaatagttttctaactgtttaaaaaagttcagaacaatattgaacagatatttttctttaaaataatgactttaagttaattaatttgttcgtatttgaattagatttatatattttactagtgcacacgtccctaccaaggtcgccactttcgaaatcggcctggcttattgaaatatttaaatttttataaatatttattttgtagttaataatttgaaatatttgttattgttattgacgaatccttttcctgttgcaaatttcctctatcattttattttttaaattcaatttttctgtaaataaaacttgcacaaaaataattaagatcagaaacgcttcgatcgcttcgtgtaatttattttattttatttctttttggactctaga

SEQ ID NO: 23994 - DNA, 636 bp, Heterodera glycines
ttattaaggtgaacttttttccttttatatattaaattcttttatgaaaatattcgaagcgccttctagtaagttaggtgtggtgaaacacataaatatattgttcgaaagattctgataagaagtatttggcgaaaatatgaagggaatctaaagcgaagcttttttttaaatcgaaataatacacgcatttcaaaaaacgatagatggaccaataaatagagagtgcagagaaatatgcatctctcatttgcataaatttttgaaattcgttatttttaagataaaaattgaaacgctgtgataaatagaatgtgccaaaatgagagggtacagagatttatatttttctgaatatatttattaatttctaataaaattcaacaccataaatgggggggggggaattcgtattggttgggacaaactgtgaaattttttacgaaatgggatttcactttttttataggatatcgtctttttcaatttcatacccattgacctcatttcgtcattaccaaatgtaaattgtcttctttcacttctacccatttgacctctcgtatttccacctcaagtgtaagcggcagcaatgcccttttggttatttttatttttgaataaataaataagtca

SEQ ID NO: 23995 - DNA, 1798 bp, Heterodera glycines
tcctgaatagcttttcagaaggcagctacgaatttttttctgaaaaatcgaaaatttccagaaattctggaataacttttttcttttttgtgataaaaaactcaaataaatcccataaaattctccttatttttctctatttttaaagctttattatagttaaattgatgaaaccatcaccgagttatgaattttccaatattagcccaaattccaaggaccaaaaaaattaaaaatattttcgaatttttaaaaaattccaaaaattctgaaacgtaaaataaacatcatattcgtgctcagcacctcaaaatactccagaaaaatatttttcactccccttttggccccaaaaaaattttggcaacaattccaaaaatggaattacaatccataacgctgggagtgaagttgttaaagtacgtgctccaacatctcaaactcaaaccaacacagacaacgatttggactgacagcttgtgttccgttgaacgaattaaggagcataagaaatgcgatcgatttttttcaaatcgattagcaaaaatacgtggacagtttgaagtcaaacatttggtcagtgcagataatcccgcggacgtggcatcacgcggcacaacaccaagagagttgagcagaaatttgttatggaagcatgacccaaaatggttatcagaagaaaaggccctgtggccaaaaccagcaaaggtttatcacccagatgaagagaagctcaggggaagtgcggaagatgaagaagtgaaaacagccgcagtcatgaatgaggtgcctttccaaccaaccattgatgtgaaccggtactccagctggaaaaaggccaaaaccgtgggtgcctatgtcttacgctggatacattcggtggcaaaaaacggatacaatggaaatttgttgccaattctgagcaaaatgggcccaaaaaagcacgggaaccaagacaagggcgtactgtcagtgcccgaattatgtgcatccgaacatttgctgatatgggaagcacaacaacaatttccaacggaggaaaaaacaaaggaaaatcttcgtgtgttcaaagacaaagaaatctggagatgccgaggacgcattggagaagcaacagtaaaggaggaaacgaaattcccgatcttcttgcctcctgaagcaagggccacaaaactcattgtgctggaagcacattggaaaatgaaacatccaagtcacagtactctgttggggtacataagggaaaagcactggatacccaaaggaagaaggttcatcagaaacacgatattgtctgagcgacacggatgtttgaattgccgcaaagagaggcttaaaccatatgcctatccacaaatgccaaacttgcccagtgaacgagttgcgatgataaggccatttgagaagacgggcgttgactattttggcccattaacaataaaaggcggagttaaagtctacatcgcactttatacctgtctcgtaatacgagcggttcatttggaagtggccgatgattgtacggcaacagaatttttgaggacctttcgaaggttcagctcacgccgcggcctcccaagccttatgtggtcagataatggcaccaattttattgctggagcagagtgcataaaagaggaatggagaagagaaatactggtggaaaccagccactcaggagtgagttggaaattcaacggaccacgagcaccctggcaaggtggcgcatgggaaagactggtgggcatcaccagaagtgcgttacgaagaacagtgggaaaaagcctaatgaaaggca

SEQ ID NO: 23996 - DNA, 1252 bp, Heterodera glycines
  unsure (1)..(1252): unsure at all n locations
atactacaaaaatccgcaatttttttctctataatataaattttatttggcaattttatctcttttttgagagatgttacaaaaataaaagtgtttttaagattcgggaccaaaggggggtgaccaggatttttgagtggaaaaattttttcacccaaaatcatccaaaaacatgtcattagggctattttatgacgctgatcacgaatacgtgatcagattttacttttgacatagtcaagacctcagaatccctgtgtgattggggattctgaggcatcattttgaggggggagggggcaggttcggatccggacggtgtaacattatttttctgtgcatttttacgttattttcaatgattttaattaatttaaaatatttagttgagttaataaataaaaaattatatttaattttttttgataaataaattttataagtttaaattaattatttttttaattgatagaatttcatgtatttttttaattaaatttgttaaaaaatattttcattttaatttaatgaatcactgttgcacctcttctaatcactgttgtacccctaaaaaacgggcgcgaagcgcccgtctggcccaaacaaatttaaaaaacgatcaaacgggcgcgaagcgcccgtctggccccaactaaatttgaaaaacgggcgcgaagcgcccgtctagacctaactaaatttaaaaaacgggcgcgaagcgcccgtctggccccaacaaaatttgaaaaacggtcgcgaagcgcccgcccaagcccaacaaaatttgaaaaacgggcgtgaagcgcccgtctggccccaactaaatttaaaaaacgggcgcgaagcgcccgtctagacctaactaaatttaaaaaacgggcgcgaagcgcccgtctgtccccaacaaaatttgaaaaacgggcgtgaatcgcccgtctggccccaactaaatttaaaaaacaggcgcgaagcgcccgtctggcccaaacaaatttaaaaaaacgggcgcgaagcgcccgtctggcccaataaaatttaaaaacggtcgcgaagccgcccgtccaaggccaaaaattgaaaaacgggcgcgaagcgcccgtctagacccaactaaatttgaaaaacgggcgcgaagcgcccgtccgagcccaacaaaatttgaaaaacggacgcgaagcgcccgactggccacaacaaaatttgaaaaacggccgngaaccccccgtctggccccaactaaatttaaaaaacg

SEQ ID NO: 23997 - DNA, 1232 bp, Heterodera glycines
attaacagctaaaataattttcgtatattttcacaatttattcaaaaagccaaaaagtccggaaccaattttaaaaactaaaatagtgcacaaaaggggagccgccgcacggcggggcttaaaagcattgtacagcataattaaaaccgaaaataattttcgtatatttttcacaatttatttcaaaaagccaaaaaaaatgattcaattttgaaacgaaatagtgcacaaaagggagggatggttagacgaaaagaggaatttttagaaaagagcgcaccccatctgatattcccatttttccgttccacaactggccaaaggcgactgtgctcattgacacgtagttgtccaataaggtacttggactttccacagtaaaatgtggtacaaaattttggaactgtcccgcctcacggcggggcttaaaagcattgtactgcataattaaaagctaaaataattttcgtatatttttcacaatttatttcaaaaagccaaaaaaaatgattcaattttgaaacgaaatagtgcacaaaagggagggatggttagacgaaaagaggaatttttagaaaagagcgcaccccatctgatattcccatttttccgttccacaactggccaaaggcgactgtgctcattgacacgtagttgtccaataaggtacttggactttccacagtaaaatgtggtacaaaattttggaactgtcccgcctcacggcggggcttaaaagcattgtactgcataattaaaagctaaaataattttcgtatatttttcacaatttatttcaaaaagccaaaaagtccggaaccaattttaaaaactaaaatagtgcacaaaaggggagccgccgcacggcggggcttaaaagcattgtacagcataattaaaaccgaaaataatttttcgtatatttttcacaatttatttcaaaagacaaaaaaaaatgattcaattttgaaacgaaatagtgcacaaaagggagggatggttagacgaaaagaggaatttttagaaaagagcgcaccccatctgatatttccattttccgtttcacaactggccaaaggcgactgtgctcattgacacgtaattggccaataaagtacttggactttccacagtaaaatgtggtacaaaatttttggaactgtcccgcctcacggcggggctaaaagcattgtacagcataataaaagctaaaatattttcgtaattttttc

SEQ ID NO: 23998 - DNA, 1252 bp, Heterodera glycines
ctccatcgacagtcttaatgaaatgtttaacaatgagtcaatgccatgaataattgcataataataacgcaggcaatggcacctcttcttccgcttcggtggaaagccgtgcctttttcggaggtggcggatgcttttcctccccattcccatcatcgctctcttcgtcctcttcttcttctcctccctcgtctttttcccttccgttttcatccgtctcttttagaattaacaaaaattttcgtttcattttttctgttaaaaataattattaatcgaagttgttaaaaaaataatatatattttgtaaaaactaaataaaacccaaatgttataagtgatatcaaaatatttttaaataaataaatggaaagtgccaatgtcttcaaaaggaatgcgccatcggttggttggtcattgttctgccgctccgtccgcgattggattcgcatggattgtgacgcttcgaattcgttgctccaccaccgggcgatacctcgcgtccactttggtgttctctaactcttcaagctcatcaaatccgtcaatgaccctgaagacaaacggaacagttggtcaacagaaaaccaatttcttaataattatagaaaatttgacacgactgacttgccgaacagagtgtgctttaggtccaatgtcggctgcttttcgtaagtgatgaaaaattgggaacgatttgtgttcggtccgttgctcgccattccgatcattcctcgggcatcgtactgtggtaaaaaaattaattatttggtggcaaaatgccaaccaactttgaggtcctcatgcaattcgtcttcaaacggtgcgtcccaaatgctttgtccgccggtgccgcgatttgtcgggtcgccagtctggacaataaacgttttgatattgcggtggaaaatgcaattgtcgtaataaccggaagcgcaatgggccaagaagttctgaaaaaacatttaaaatggatgagtgaattgtgcattcccccgcactcacttcgcaagacttgggacaacgttcacaaaacaattccaactttatgtcgcccaccgttgtgtgcaaagtgacggccatcccaaaaattacaaggaaaaaaagatgagtccaaactgctattttcaaaaacaaattatgatttagaaaataacaaccgaattaaaatgctaatattgtataatcttctgtctgctgtgttttcatttatgaaatgtggaaaaacaatcaaacatttgagttcacattt

SEQ ID NO: 23999 - DNA, 1102 bp, Heterodera glycines
cctcggactttgaattgtaaaagtaaattgtttggattttggattcgggatacaattctccatccccatttggctaattgtgtgtgcggtaattgcttcttctcgccaattcaccgccgaagcctttccgtgtgttacgacgtggcgctcctgctaaaagaaggtgagatcaacggcaaatttcgacttttgacagtgcgggaaggagcaacgaaaacagggaaacaaatccctagagtgctgaattgtaaaacggagaaacaaatctctaaatttacgacgtggaaagaaagcgccgaattcgtaaaattgggaaacaaatccctaaaagaaaaacgagaaatttgtgatcaccgaattttgaaaagagggaaacaaatccctttcttcatctcgccgaattcgctggatttgttgaaattgtaaaacgtggaaaacgaatcttgaaagcggaggaaaagctgacaactaagtcaaaagctttgaattgaaaacgggaaaacaaattctcatttgctaatggtgccggttatgcgaagtccgccattaacgcgacaaagagcgttaaacctcggcatacaattgcgaaacgagggcataggagttgcgcaagaacagcagcgagttcagaaacagcactccgacgtcggaaatgctcctttgagcgaaaacgaaaatcgccaaagccgcgtttcatcggtttcatctgttttaggaccagacacaatccaccggcgacttttgcaaatcccaaatccacggaacgatatggacgcgcaacaaaatcgaaacgatttggacgaagatgctcttttggatgaccatggtgactcaatttttggtaacgaaaatccccatgaacaaaatttgggtggagaaaatgttcgaaatgcagttagtgctatgagaagcattgaccaggggagagtgcgcgttgatattgtggatgattttgggtttcacccgggcatgacttccaccccaaacgtggtcgcaaattatcagcgtggtgaaccgaggtttatgctccatcaaccaccgggagtccaccaaaacaaattgatgctggaggaacagcattttcgttttggcgcacggccta

SEQ ID NO: 24000 - DNA, 1125 bp, Heterodera glycines
  unsure (1)..(1125): unsure at all n locations
ctcccctnttggcacattcactcacttgtcacgtaactgctcagtgttgggatgccaaagttacgggcagccgtttgaaacaacggcaccgctatggtgccaagttttgttttggcgccaatccgatgggcaagtgccatgggacacggatcataaagttcggcaaggacgacgtcaaagtgttctgcttgaagacggcggagcagttcaacatcatttacgagttcgaaaagtggtggaatgaaaaattaaatcactaattaatcaattagtatttccactaattacctcggcaaatttcgcatagaattttaccaaattgttcgtttaatttctgtaatttttgtttaattacaaatttttccattttttttcatatgatcacaaaccgtttggaagagaaaagtgttgaaacttttgccgtaaaatggctctttgaggtcgtccaatttgttgatgtctaatttgcccatttgaacaaaatttggcaaaaaattgtgtaaattggtcacattaaacacttccttgggcaatgcctcggcccttttgttcatcaaaacgcgaaaaaggtgctaaattttgtgaaatttctgggaaattgttcacaattagatcatttttcccttcaaaaattatttatttcgcaaaaaattctaattaaaatatatttattgaaatttttgaatatttaatttcagccataaaaaacaaaaagacaaaataggcattatttacggttttccccaaaatatgtcaattatatgcacaattaatgcttgccaataaaatttttcatttcctaaattatatagtccaatttttaattatcgatatgatttaccacgtcatggcctgccccgaccaaagtgtccgcaattgagcccataaattgcatgtgactccatccaattgtgggcgaataaacaaggattttaagacgctttttggctaagcttttttgaggcgtttcttccaatggatttgttgaagccaaaaatgtaatttgacaaattaaaattaatgcacaaaaatttgtcagaagctttggcattttttcaaaaaaaaatatccaatttagtacaaattcgtataatttaattttttgaatttcatgagtattttttt

SEQ ID NO: 24001 - DNA, 1457 bp, Heterodera glycines
  unsure (1)..(1457): unsure at all n locations
aaactcaaatttttctcgatttttggcggcatatttttaaaaaaattcaaaaaaagtacatacatccccctaaagatcttttaaaaatatagaatatcaaaattttatttacatttcggtgccatttatcttgaaaacatttaattgctaccagtggcacttttatttgaggaattcatttcggcgattattttagggaccttttatttttgtttttgtctttcttttttccaaaaatgcttttatgggatatcagtttcattttttgttttagcattaaacaaattccctgtttaaaaggccattttgttttcacggtggtcagaaattccatgttaaatccccttcaaaaaatggttaatttatgggtttttaggctattaaaaatgaaaaaaataataattttaaattaaaatattttttattaattaaattcaattaaaataatggtaaagaaaatataaaaaaattttccgttccatcggggaattgaaccgaagagaccaataatgaaagtaataaagtttagccacttgaccacttatgtatatgaacaaatactataaatgaaaataaataatttaatttatttttatcaaaaatttctgatccctcaccaattcccttctcttttctcacccagacccccattcttaccagtgcttatttagtcccgccgggaccgggactggcaaaaccgggaccgggatttctgtttttccaaaaaccgggatcgggaccgggacctgaaaaacccgggatttcccgccccggtcccggtcccgctcaactctagtattagacaattgtaatttatcattggaaatccggattttcacatgaaaaatacggtgctggtgcatttcctaaaaaccgccacccatgcgcgtttcgtaaatccgccagcgcgtttcgtaaaaccgccagcgtgtttcgtaaatccgccaatgggttctaaacaaaaaatatgtaacaaataaaaattcataacttggcccaagttgagccaaattaatatttcatggtatcttttaatagctatgggtgtattctttagaatataatattacaaaatttttatcttaagtataaaaaagttataaatcattgaacattccaggttttttgcaatggtcaagcatatataattttataaacacaatgttttaaatctataaaatgcaattgagccaaattaatttatatattcgatagctctaagaattctctatttacctttaaaatttcataaaatttaatgaatttcaaaaaagttctgtacaaaaaattcaatgatttataactttttttatacttaatataaaaattttgtaatattatattctgaaagaatacacccaaaaaaggctatttcaaagggaagaaattccatttttaaatatatacagaaatacgatgttaatccctttgaaataccganatttagttttgaaaac

SEQ ID NO: 24002 - DNA, 1762 bp, Heterodera glycines
ctaaatttacagtagaaaagtaccgtagtcccgtcgatactttttttgccaccattagcacagaaaaaagagataaacaaattaatcaaataattcaggctgaacatttgtccgtttttgaccaattttccctttgccttggcatcttcctttcctgccagtggatttttcgtcttctttgtcaacgctcttcccacgtgctgcggaattgcgggccgccctgcttgaactcggcgttatgctgctcctttttgcccaaaaggctttcctcctcctcttcctcctcctcctttctgtgccgcttcttttcctgcttctccgccttctgctgctgcttcttcttcgtcttgcccacttgctctccttctttgcctgcttctcctcctttctttttctccgcttccttttcgcccttctgtgatttcaatttttgagttaattaatgcttctcttctgccgctgttcgcttacttcctccatcattctttgttttggcttttcctttgccgctttctttgtcggcttttccgtcgtctcttctgtgtccgctgcgagtgttgtctccgtcccctgcggctcattctctctgatcgctttccgttctttcgctttttttgtctttggctctgtttaattgtttcttttttgggttttcatggcttgcgcaaaattaacgcgacaacgcacctttaaaggaccgtttctttcttccgcccacccaaagggatgccaattgctgcggtgttgccaatggaggagaagccgccaaagaattcattatgtttgtctcgggcgctgcagcaggcgactgaattgccgtggcgccgttcaaaggttgggaagcgtcgagaggaggcgattctttcggtggagagccttccaaaacaggagaagcgacttgcaatgcgccaaggtcgctttgggctttcgaaatggaaggcaattgcaaaggcgagaaaggcataggaggggcggcgatgacttggggaagaagcggagaatcgccgtaagggaagccatcgtacgtcgacgggcggtgtcccttgccatgcgccggtgggtaacggtggcgtttgccaccaaagcgcccgccatacccgtggcgcttgtacgtcttaaaattggcgttacgcttcaaattctttggaactgttgtgattcatgctcactggctcttcttcactgctgtaactttcgctttcgtcgtatccccgttttttgagcacgtggaaattggaaccgacagaaacaaacacaaaatgccctaacagcaaaatgaaaccgaccaaaggggcaggaagcatttttagctaaaaccaagtgaattaaaatggccaaggtgcctaatcagcccttatttattgaggccatggcagtcgaaaaggccctttttgctgttcgatggttcatcgagctgttcattctgttggaggtggatgagggtgaaagatttgtgtatcacaaaatgacaaatgtcagcataatatttagtgattggatgggttgagtcagccacacctttgatcacctgaattcagtgactaatcccaattgaatttaaagaccaaagcgtaaattgtttttaatgataaaaacgtgtttccagggattttcggagccgctgttcatgaatatgaactctatttgacgaatttccgaacccctaacccgaaattccaacattttattttttacaaaaaacggttttaaatgtaccaaagtgcgtgctccatgattctccgatgtgatgctcatattatat

SEQ ID NO: 24003 - DNA, 1978 bp, Heterodera glycines
cacgcgaaaacggccctcacgcgaaaatggccacgcgaaaacggccacgcgaaaacgtcctggcccgctcaacaagcccgttcattgttaaaaatatcttaaaacccacctaaaatattcaaaatttgatacaatatgtataacaattttttgggaaaattgcttaatatgaatataaaaatctataaaaaaaaattcccacaggccctaaaaaccctttttctttttaaaaaattgagtcaaattcacaaaattttgtctttttttgataaaatatattaacaaagtatgtacgaattttcaaactttcctcggcgacgcttatcaacattgccggaaccctcaccccttattccccaaaattttttaaattttattttcagaattctacaaattttgaaaaaatcccggttcaggcgggcgcccggtcaaaattttgtaggtgctggtcaattatccaaacctggtcccggtactttaaaattccgggctcaattaataataattgtagaaggaaaaatgcaaaaatttttaccattacaaaaaatcttattcttttaactaatttaattcgattttaagttgaaaatgaatccaattgtttcacaaattctaaatgaatcttatggactaaaacacccagtaacaaaaaagaatatgaccatcaatgaggcaatcgcaaatggactgttcgccccgagactcgaaaatttatcaacctaaacaccggccaggagatggatgctttcgactctgagtttttaccatccggccattattcaccatttcgtaaaattgggcgcactaggagtgaacacgatggacttggccgttgccttggaatgtaagttggcgagaaattaaaattgcacgagacaattttgtcatcaaatgagaattttaccaattaaaaatggcttatttttgacgcaattttaaatttgttgccattttaaccaataatgttcaatgttttcctgtgttttgttaagcattccgttttcattatctcttatacacttatttacataaaatttcaaactctctccattaagtttttcttgacgaaattcacggagtctttctgctgcttgaatacgaaatgtcgttaccagaggcactcaaatacggatatctcaaaattccaatgaaacccgagacattttcactcactttgagtgactgcatcgagaagaaatggatcaatgaacagacgggccagttcatttcccgtcccggcgaaaccatcagccatgcaatgcattccgacactgactggccaccgccaattctgaaccgcaatgtgcgcgaatgcttcgactcggtcaccaacgcgtggttgaccattccggaggcagtgaaccgtggcattttgaatgcagaaacgggcattttcactgacctaagaagtggcggacagatgtcgttggcagcagcgcatcagcggagactcatccaaaaaccgctgactttgagtgaagccgtggagaggaatgtttggagcgaaggcggaggcggacgttttcaaaatggcggcacccatcatactctgctacaggcgagggctgggtcttatattcattaaaaatcctctatttaaataatattgctgaaagaatgtcgaaacactgtccaaaacatgggaaaaggtccaaaacaaagcaaattattaggaaaaagaaaaaaatttgcagtatgcattttgcaggccattaattgcgggtctctcgagatggatgttcggcacattttgttgggcggggaaatgctttcaataagagaagcgttggagaaaggaatgttgttgccgcatggaataatcgtctcgggaaatgcatttggccacaatttggagcacatgaatttacgcatggcttacgaaagaggcattttgcggggtcgcgttcgctacgcgattttcgatctcagaggtttcaagcaggaagaaaatctgtctctgttgagcttcaacgacgca

SEQ ID NO: 24004 - DNA, 1333 bp, Heterodera glycines
tgaaaacggaaggccgaactaaaaatctcaaaattaatcatttttacggttctaggtaacgattcagatgcattgatgccatattgtgctcctcacgcacagataattggcctataaatgtcggactgatcagtgtctgcttttattcaattcctgagattatgaatggaatttaatgaaaatgtttttattcgtattgaaaatatttcaacattccatctcgttttgacctcttcgttctttgccattttgctgtaacgctcgagcagctcgattctttctgtaatcccttaagaaatattcttccggtggcgtttctcgtgttcctcaccatcgcgtaaatgttcatgctgattgcctttcgggtgatccttcaagtactggtcttgatccagctttgcatcaaccgtcgtcttttttaggagtttctcgtctgaaatgggaaatttgatcagtaaaaatggtaatctttgttttccaaattgttcactctccgtgtaatctttttacctctttgtttttaaattaattcccatttattatttgtcttacgaatgcatcgtaatgcttgcacggtgaattggcccgacagtctgtgccgtcctcgcgaaaccaatggccaattttggtcagatgcgaacactcaacgacgttagtgatctttttgcctgaatatacctaaacgttgttatctcatttgttgagcatccactatcccgtttacaatacttcaaatgttgtgcttggcaccaaagcaattcatcatactgttcgcggcgtcctacaacggccctccgcattcataaatgtgtttctgtagcagcactgaaatgccactaaaagcatggaatattgatgctttttgcttgatgcacgatcctaaaggtaaatacaaaacgagatgggctgctgaaataaatcatgtcacagcaaattttaggtttttcattccatttattttaattttgcatttcgttacctaccgtaccttcaacggcaaagttattgaacacaaaatggaatagcagaagtgtggttacaattggtagcgtcttcacggaaaagtgaggcgaaaattggacgccaactcataaagtaataccaatttataaatgattggccacggaaacgattcaaaataattgaggaacaatgaagatgacgtgacaatgataccataaaaaggacataaaaatatattgcatcaaaaaattggtttggatgtaaagaaaacacagcaaataaattaatgtgcacaaaaggatgaggtgcgccgtgaatcacggtcacggttaccgtgaatttcacgggatttttcactcacggtcacggt

SEQ ID NO: 24005 - DNA, 1961 bp, Heterodera glycines
ttgtcggactttggtcgccaatttatgggacggaatgaaagaaggggccaataccaaagatgcgacggaggacgaagatggcattggccgttggaaacgaagccgaaaaggcagggaaggaatggcaaaaataaaatgagaaaaaactgaaaatgaaattaagcgatgctttccgggttggattccgttcttcctcctttaattgagagtttgactaaaaattagcgactaatatttgacccgacaatgaatggagtggccaaagtggggggggggacggacgggtcgcactcggcgagtgggaggacacgcgcgtcaattgttggacgtgtcactggacggaccgcagaatgaccacccgtccgtcgcccactcactctttcccgcgtcgtaacccaaccgacgcccaattcattcattcattcgtttattgctgctcttcgcccccacttcacttcacttatcactcgtcccatccgccgattgttcttttccccattatttggctttgattacacccaaattcccatttacataagatttactgttctttttttcattgtatgagcgaaatgaaaggaactgccaaaatggacaaaagatgaattggacagtctcaggaaggaactcctctcctttggactttttctgtggctcaaatcagtttttttctgtcagccgttaaatgcgaagcaaagaatgaatgttttgtttattgttcgctttttacaattgcgcattatttcctcttctgctgatggtctatttttgcatgtcaattcataagaggctttctttgtcttctgctgattatgatgaaaagaatggagggatccatccattgattaaccttcaacccccgaacaatggcataattcgaagaacaaataaacaaaggcggcaaaaacagacaaagtgtacagaaattaaatatgtataggtatgtgtcatcatggaaagacaaaacagccttaaacaattccgacaattaagccatttgtgaaactttgaatttttttcattaaaatatatttttttaatttgcaaataaagtaaatttaaaaaatgaatttgaataaattctgcgccgtcgttgaaatttttaaactaaaaagagaaaaaatcttcttgctttgctgagaattttttgtacataggtatgtgctaaactcccaattttttctttaaaaattggcacaaatcacaaaaattaacaattttgcacaatttattaacaaattgccactcaattttcaataatgcattttcacggctatccattcttagttaaaagtttggagcatttccggtggggatttcgccttaaccgcttaacccatcctttaatacaaaattaggtaatcaagtttttgtaatttaattgttctctttatttaaaccattacataactctcacatttacatgcagtgtttcttttcttacaatatcaggccatttcattccgtcatcactttgcttctcttttcccggtgatcgatgcactgctcttctattatggttttcaaaaaactaataaatacacgacccattcctattctcttcgtttttcatcgtcaaaatttgctccatctcacttttaaatcacaaagtcggagtatggccacatttggagatggccaaaaaggaagcaaagactttctcaaaattggtcaagttcgtattccaatccatgagagtgaacggcctgaatttgtccctgcgggtttcggtgaggaatttttttgataaggtaaatgttggatggtttttgccaccagcaaatggcgttccgcatttgtgtattgttttttcagttggccctgcgcatctcccaccggcattggtccaatctttgaaatggatgatgcagaaacagtccttgggactaggacattttcctcatcggcatgccggggttcctccattccggaattgtgcaccaatttatggtgggaatgcc

SEQ ID NO: 24006 - DNA, 2007 bp, Heterodera glycines
tccaaaaaaaaaaacgtttttttaatgccaaaaaattcgtcgcctggcgctaaaaatcgcaaaaatttggcagtttttagtgcaaatctgttaacaaattgcactcgaattttcaaaaattttccccagcggcgcctaccggcaccgccggcctccgattccctaaaattttttggaaaaagcgcgccgccaaaaaaatgaagttttgttatgcaaaaaaaaaaggtcgtcgccggagaaaattttggaccttcgtatgagaaaatcggtcccgagacaccccccccccccctgtcccaatcgtccgtcgtatggcccttgggctgagacaccccttgtgaatgtatgaccgtgagggcccaactaacgtagaccacaaaaaaagtatgcagtaagttatatggggaccctgcatgccgccgaccccttgtacatacatttacggttttaaccttttaattattatggcgaaaaaaataaattttagaaaaagcacatttggaatttaaaattaaaaatgagaagctaagaatgtaacaataaaagcaactttaaacttttatcaaatttctttatttcttttttgctaacacttttgtttattaaagaatttttttgttgtttttagggcaaagtgccaaacgttttttcaaaaaattttctcagtgacgaaacgatcagtgacgaaatgatcggccaccatttgaacaatattcatctaattttttctctaaaatagattttgtcacaattaaaacatttttaatttttttcatcccttctaaatcttaattcataaattttaaatctgcttttattaattctggttggctatattccaaactagctaattctctcaaaatgaaatgtgaatcttaatgcctgaataaaattattttttttaatagttttaatcttaccgctaaaatgggcatatgcatacgtatcgtattttccaaaattattatataaaccgaaattaaatttttttataaatgaaaactcgatgaaaaaaaataagtaaattaagcataaccatctcggtgatatgattatttatcagatattagtaaataaaggtaaacatattttaaaaagaaattccttatcatttattataaatatacaaaaattgcaatttataacatctttttaaaatttataaattatttaaatttgtttaaaatttatattatatttgttaatagccattaaattatattctaaaaataaagagctaattttaaaccataattaaaaaagactataagaaacgcaaaaatatataaaagtaaaggatgtacatattaaaacaaatatcacatatgataaataaatatgttagccatgctagcaataggctgaccatttattaaactccgactatattagtaaacaaatcaaaatagataaataaacataaatatacaataatttttgtgacctgaatgataattttttataattgtcttaaatagcctaaattagttccgcaacaataaaactagattgaatgtggtgttttggacttgtatatgaaagaagtagcagcatttgaataaaacaaagtggtttaatatattaaaattcaatgttttaaataaaaaataaataaaagcaacccaaaaatttggacacataactatttaaaaaattaatgaaaataaaggctataacaatacaaaaatctaaaaaatgatataataatactcaaatttaaaatgaatatattaatcaatttatttttgcacatctccatatttaagaaaaatttaatgaaactaaaaatgaatacgacaattgcattagaatttttggtaagaattcatttatttctaataaatttaaagaatcaacccaaaaaaatttaaaataaaggatttcgaataaggtatgagccgcgtttggtaacaaagaagtaatcagaacaattcaaatattttataacagcacattgccaaacttgaaaattaaaaatgaaaaaattaaataataagcaaatgtagg

SEQ ID NO: 24007 - DNA, 886 bp, Heterodera glycines
tcccccggaggggcaggtcccttggccggttaaccacaattcccccggaggggcaggtccttgtccgatgaaccacaatcccccggaggggcaggtccttgcccggtgaaccacaatcccccggaggggcaggtccttggccggtgaaccacaatcccccggaggggcaggtccttggccggtgaaccacaatcccccggaggggcaggtccttggccggtgaaccacaatcccccggaggggcaggtccttggccggtgaaccacaatcccccggaggggcaggtccttggccggtgaaccacaatcccccggaggggcaggtccttggccggtgaaccacaatcccccggaggggcaggtccttggccggtgaaccacaatcccccggaggggcaggtccttggccggtgaaccacaatcccccggaggggcaggtccttggccggtgaaccacaatcccccggaggggcaggtccttggccggtgaaccacaatcccccggaggggcaggtccttggccggtgaaccacaatcccccggaggggcaggtccttggccggtgaaccacaatcccccggaggggcaggtccttggccggtgaaccacaatcccccggaggggcaggtccttggccggtgaaccacaatcccccggaggggcaggtccttggccggtgaaccacaatcccccggaggggcaggtccttggccggtgaaccacaatcccccggaggggcaggtccttggccggtgaaccacaatcccccggaggggcaggtccttggccggcgaaccacaatcccccggaggggcaggtccttggccggtgaaccacaatcccccggaggggcaggtccttggccggagaaccacaatcccccggag

SEQ ID NO: 24008 - DNA, 1770 bp, Heterodera glycines
aaaaaacattagtggtttgttctgtgactttcgtgtgagatctaatgtgtgtcatgcttttgaaaaaacattagtggtttgttctgtgactttcgtgtgagacactaatgtgtgtcatgcttttgaaaaaacattagtggtttgttctgtgactttagtgtgagacactaatgtgtgtcatgcttttgaaaaaacattagtggtttgttctgtgactttagtgtgagacattaatgtgtgtcatgcttttgaaaaaacattagtggtttgttctgtgactttagtgtgagacattaatgtgtgtcatgcttttgaaaaaacattagtggtttgttctgtgactttcgtgtgagacactaatgtgtgtcatgcttttgaaaaaacattagtggtttgttctgtgattttagtgtgagacactaatgtgtgtcatgcttttgaaaaaacattagtggtttgtttgtgactttagtgtgagacactaatgtgtgtcatgcttttgaaaaaacattagtggtttgttctgtgactttcgtgtgagacactaatgtgtgtcatgcttttgaaaaaacattagtggtttgttctgtgactttcgtgtgagacactaatgtgtgtcatgttgtgccataaggaaatgccacaagaaataagaaaagacgaggaaaagataagaacaagaagagatgatgaaaatgccaagaatgttgtgccataagcaaatgtcaacaaacaagaagagatgatgtgataagaaatgttgtggcataaaaaatgccacaagaaaatagaagagacaatgaaatgccacaagaaaatagaagagacaatgaaagtaaatgcaggagaattgagtcccagtgattgaaatgctggtgggttcagtcctggtgattggaatgcagtcccagtgattggaatgttggtggattgagtcccagtgattgaaatgctggtagttcagtcctggtcattcgaatgctggtgggttgagtgccagtgattgaaatgcaggagggttgagtcccagtgattggaatgctggtgggttgagtcccagtgattgaaatgctggtgggttgagtcccggcgattggagaaaaagccaagaaaaggatgcgaggccgcgaagcggccgagccagtcgattttatcattcaacaatcgtactacctagcgggggatgcgccgaaggtgctctccccgtgtagggagtaaatacatggaatgttttttttttatacaatatggcaaactggttattaggccatgagttcgagagtccgatttgaacagtatctcagagactcttaaccgattgcttttgaagggatcatcccgactcgacccgtccaatttgaatattgcagattctagaaatttcatattgaaaaatttttaatttttcatttatttttcttacttgtactcctctgcattttttgaaagtattcacagcatgatcgctcaaatattcccagattgaaggatcaaatttcaaaccatatttgccctctcttctgtattcttgtactcttgcgtctcttcgttgattaggccataagcatacccactcttggtccccataagatggacaaacttttctaattggtctattctatgggaaaaacagtttctttttcaccatcattattaattcatgatttgtttgatgcaatagacctgctgtggttttaccaaaagtctgaaatgtatatgatttcattaatgaaggccgagagacttggatttctcagccgttttcctttt

SEQ ID NO: 24009 - DNA, 1818 bp, Heterodera glycines
ttcggtgatgtttcgtgcatttctcttcagcattttcgggtctggttgaattttggtccaacaaaatgcaatttattgaaagggtaaaactcactccgctctcgggttccttcatcacattttgttgctttcgatagatgtcgaaaatgtaattgttgcgccgctcaacgtcctgccatctcttaaacattttttttgttcaaaatgccattgtcaaattgagggggcggaaagtggactcagttctcgacaatattaataatgtcaacaagtagcatgtttcggctggccagttatttttaatttgctcaaaatctcggcttttagatgaaattgccattgtccaattcgactcccgacatgccttgaatgccctccactgatgtatggaaaaggcacgcgaatgattcaccaacggtcgacaacactttttggcatttgcgcaatacatttttgctagttttattacattaaaaacaaatttttaaaattattttggaataaagcacaaacagaaatgaaagaagcaaaatggttctaggtagaaaagacctttgcgctttcactcacataaaacgtggaaaataatttaccaaacgaaaacaaatgataaaatcacttggaacaaaaacaacaacggccgcgggagcagtacaatacatttacaataaaatatgaaacaatttcaattctttttcataatttgaatgacgtcctcatggtgcagcttgtgatggatgccgacgcgttgtggtgcgtttgtgaatttggtgctcgtcccccacacaatggcatagcgaaattgggcggccaaagtgcggtgcagcgcatggcacgcgtgctcaacctgggcacacagaaagaaagtttacgggcacttttgcatgatttacttgccacgatgtatagagttttagatgttgtttaaaataaataaattaaattggagcctttcagttttcaaaaaagaaaattgtaaattcgtggggtgcaattaatcattcagtaaatttacctctattgacaaaaaaagtaccaacaaaaagaaaactttagaagaataaaacatttcattgatatcaaatcattgaaaaaatcttttttttctgagaatttctttttattatcatttgtgggcgaaggggaacgccctgtcccaaaattctcgggggttaactcaataattaagtaaaacattaatacaaataaaagactgtaccgtggaattaccgcgcagaattatgccatcttcaggcccttaaaatttggatggtttagtaaaatttaagaaaaacataatttaccaaggtctggcgcattgccgggctttttggtgtatattcggagcaaagcgagatattcccaaagctggaaacaaatgaacagaagattaaaaattgtaaataattgcaaattgagaagttatgaaaaaagtaaggatcagttgccctttaatgccgaatataaaatccatgtttagcactttcagtctccaaaaagttggcagaaaattacactccgatggcagtttgcacacaccttctccaacatgtagtccaggttcaggctcagctcgcaactgatcacaatgctgtgcggcagccgggcgagtcgttccatctcctcaaggctgatctggtcaattttgttgtatatgtgtaggcaggggatgtacacccggttgccctggatcacgtcgatcagttcatcaatgctaaaaaacggagaatttctaataagaagccataaaaaatagcatgggaatgaatttccgaggtcccggtgatcataaaaaaatttttcagacaaatagaaaaa

SEQ ID NO: 24010 - DNA, 1860 bp, Heterodera glycines
  unsure (1)..(1860): unsure at all n locations
ataaaatactattcttaactgcaaatttgaccaaagattcgtttattttacaagctgttaacatatttcatttcactcaaacgttttaatttttcccggcggtgaatatcggcaccgccagaccccccccccccccaatgttccaaaaagttcgttggaaaaaccgcagcacaaaaaaccaatttaaaagcaaaaaatttaagagtgttaatttattatcaaatagaaaaattctcattaagcattgaatcttttggaattttaaaataatagacagtttaacgaaaattgttgaatttattttaaaaaattctagaaattttgggactcagaaaattccaagtttttaccggtatctttgaaaagattgacactttttaaaaccaataaattcagaaaattcccaatacattcagaaaattcaatttttttaaatttttttgtaatattgtctattaaatttaaaaaatactctatcatttacatagagaaaattttaaactgtttaaattattatattttcacataaaaataattaaagtacccggtttcccgtcccactctatctattcccgtttcccgttccccaaactggctgggaactaataacaagataaaaataagctaaataaatttaataaggaaattgattttatttaatgtcagattaaactacctcagtttatgtttacataaatacaatttattctagcttctctatgctcgatatattatgatgagtcataaatcccgctctgtgtgatttgctcattttgaattcaacattttaatagctttagtactgtgattgttttctattcagttattcgtaaattctttttcttatgttgtttatttcatatagattaattttaatgtcaaagctaaatctatttttaattaatttttggttgaatttttttcaaattaaatcaaacaaataataaattcaatattggtaaataatttatttaagttctaacaataagcatgaataaaaaaataattaaatcaattaatggtaagcactctatttcataaatagcatttgttgaaaaaatataatttgaatataaaaaaattttatgtgcataaacgcgatatttggccaaaagtataaattaatgaggagaaaactgtttgctaaggaaatctaaatacaaattaccctatgttgtcccaaatgtttaccgtgacaaaaaggcgggagattaacaaaaattgtattcttttccttcgctgaattaaatggtgcacatgtcttttatttctatgcttatttaggggggaaagaaatttttaattttttttaatttaccatggtttaaaaaattataaaaataatttatagcgaaaattgtctaattctcaaaatattaaatttttacttaatactctatatcattataagaagctttcataatgttttttgaatttcctaaattgatttcgttatacgtattattattatacatatttttaaattttttattattttttaatattttttcataaaagtttagctcgttcgcgttaatctatttgtatttatttagcatataatatgttaacttgaatatttattatataaaattatcaaaaatttaattcactttattaattgatcatatgattagaagaagctgttgacagtttcaatttttatttcactgttaaacaactattttttatttctcttaatgaatgaataagcgttttttttattgattatacattttgcttaatgtaatataatctataagagcataattattggggttttgtactcttgaatcccttaaagtatatcattgtaattaaaaatttatattagttttttgcagacctgcagnngcatgc

SEQ ID NO: 24011 - DNA, 1954 bp, Heterodera glycines
  unsure (1)..(1954): unsure at all n locations
aaaatggtaattaccgtttcaaagtccacttccgaatcctttaaggcggccggatgcgaagaaaatgggctaaaagtgtcctcaacatgggccatctgctgatgaaaggactaaaatggcaaaggaattggaagtaatttaagcaattaaatattttgaaattaaaaatattatttttattatttttacattttaaaggaccaccaaagaaaaaagtgctgccacagtttttcagcagaagtacaataatagtgattttgtgcgtcttccgcctttttaaagcccacactcaaccaccggttgttctgcccctttgctcgtcggccttatcattgcccaaattttaaaagtttggccaaatgtgtcatgccatggccattttgttcatgtgcatggattaaaaattgacaatttgcaaattatctgtcaattttagttttatgtacaaataaaataaattttaattccaaaaatgattcaaggccgaattttaaagcacaaaatacgctcttgagtaggggatatcctggaaattgtgctcatctcatggaaaactgagattgtatttgttttattgcgttttttttgtcttaggttaaagcaattagcaaaaatcagcaaatggtaattagtcacaattaaattttcaatgatttttacaaattatagtaataaataaataaaatattattattaacatggaaaataaacattaacagttatttatttgagatggtatcgacttttctgtctgtccttcacttcgtaatgaatgacaaacatttttatgtgcatttttccatttccccgccgatgactccttttatggagatgatccaattttatcgcccgaattgtcgtccataaataattttattgcgaaaaaaaaaaccaaataaaaattctttgcgataacaaaagacaaaattaggcaaatgcaaaggctaaataagagttttggcaatgtaagaaggacatcagacagcagaggctgagcattcggacgaatggaagcccaaaaagtgatgcccataaaaatttagcctttgtttgccacgcgaaatgaattttttatttttccggacttttcgtcaataaacacaaaaataatggacttttcaacagtaaacataaaaacaagttttattagtaaaattattaaattttttgccagtttttctaaatttcttttaaatttaaatattaatgtgtgttgttaaatcattattactagggatacaattattagggttttacctattttttcccgagatccccagcggtccgaaacgcacgaaaatcatgttgtttttttgtggttgttaagatacttttcaagttattagcacctatttttaggttttggagaagaaagaatcttttgttttaaaaattcggtatttcaacaattatttgacttaattttgttgatttttggataaattttatgattttacactcactaaatttgaaacttaattattctttactgtcgaaaagtccccgcctaaaatttataaatttctgtgaaatgtcctttgctgtcgaaaagtccggcgcccccggccggaccttcctttttgttccaaaattctaattgtcaataatttggcatttattggggagaggggggcaccttaaagaaatactcattaatttgtaattgtgacctcgaaattttttggatgtcaggtttcccagaaatcgaattctattgacccaaaaataccggaattacattgcccgccaatgcaagaatttcaaaaaaatatatcccaattttttaatgaaatattaaataaaggggaaacgggactttcgtcccgttagccaaaaagtgactaagtgtacactggtaatctcgagctagagttataaaaggctacattgatggaggttttagttcccaagaaagtttcgaaccggctntttacatcaccttgatcagatcaat

SEQ ID NO: 24012 - DNA, 1698 bp, Heterodera glycines
  unsure (1)..(1698): unsure at all n locations
acgccgagtttgagatgcagcggcagtttgatgaagcgacannctgcaanngaagaatttcaggctgcggatgagagacaaaacgcncancagaatgancagnagcaggacaangaggaggaaaatgtacagaatgctgcgcagcagcagcaatttgagagaactgtacgactccagttgcgcgagtcgcagcgcttttacggcggttcgccttcgtcagtgttagtgccaccggttcaattattttgggagactgaatgtgtaatatgcaccacttcaaggccccatttctatagcaaggagtgcgggcatatttatttatgcagtgagtgtgctgtcactgcggtgatcaacaaggttcgacgctgcatgttatgccgcgctagtgttagtggcatttatccttttgtccgttgagtacctttatggaagtaagaaaatgttaacatttcacattttcagcttaaatttgtcttacttccataaaaaggtgttatttgaaagttggaaaataataaaaaaatgaattttaggatatacaaaatttcaaattttgtcctctattttttacaattatttctcaaatgattctaattttggtaatattcgagctttcaaataatagaagtgtttgattgtatgcgcggcattgagtattggaactaaaatcatgatgaattcgttttcttgaataaccgtattaatccttttctgtttgttcgtcacttttttttcaatgatttaactgatgtatgtctttaataattcattatactctcaactcatctcatatgataatcaaccaacagttcgacaatttttccgtgctttttgttaatgcaatcaactccagcatatatttgtgtttgacgaaaataaagtgtaaatcaaattgacagtgaaagttgatggtcatttttaaaattaaatgtaaaaaaatggtgaatagagacagaaagagagagtgagagacagaaaaagaaataagcccaaagccagcgctgaaaagcaccgacctcaccaaagtgggtgaacagagagagaatgagagagagaaagcccaaagccagcgctgaaaagcaccggcctcacataagtgggtgggcagagaaagagagagagagtgaagcccaaagacagcgctgaaaagcaccggcctcacaaaagtgggtgggcagagaaagagagagagaaagcccaaagccagcgctgaaaagcaccggcctcaccaaagtggatgggcagagagagaatgagagagagaagcccaaagacagcgctgaaaagcaccggcctcaccaaagtggatgggcaagaaattttaaaatttgtcgagaaaattcgtatgaaaggaaatgatgaaagggagaaaaaagcggaaaatttaaaaccatacaaattgaaaatgaattaataaaaagaaaatttaaaaaaaaaacaaagaataaaagttgtaaaataggacaggaggaaatttttcaacaaatgaatttaaatgaataagtacattgggaattggaggcgtaatatgcccctagtaaaagatgaataaaatatgtgtgtgtgtgggagaaattgtgaccagaatttccttgagctcaaactaantcaaatctaaaaggaatatggggtgcnncgnnttggatngnnattaactttaacgttttaaaaatgtatagctcattttatgtctttatt

SEQ ID NO: 24013 - DNA, 891 bp, Heterodera glycines
  unsure (1)..(891): unsure at all n locations
tgagtagagctcgacctggacctggatccaggcctggatttttcctggatccaggtccaggccatttttcggcaacctggattttcctggatttttgtccaggaaatccaggtccaggtcaaatgtgaaaaaaaatccaggtccaggcatttttcaaaatgtcgagctctacttttgagttttccaatgtttttccttcattttcaaaatatttctacccacagatttcggtttttccataaacaaacgtaaaattttcactcacaattttacgaattttcaaaattggttattttaatgtggttaaatactggtacaccccacaaatgtggttattgctgttttatttttgtgcagatgccccactccgcgttgcccccgttgcccaagaatcggctgagccgttcgttcagcaccgcctccgtgctgttgacctgcctgaacgcgcactgtcaacgcgtggcgcaaccgtccaacaatttcctgtgcgacgcgtgctttgcggctcagaagcgcgagctgacgcggacactgatcggcggcagcggcgccgccaacgccgcgctggccgccgcttcgtccgccgctaacatatccgccgccaccaccggcagcggaggaggaggaggcggcaacaacaaaggcaccgccatcatcctcattagggctaatgatgatgatgataatgagcaaaagcgaagtggtggcagaaagaacaacgccaccaaaaatgagagtagtatcagcaccagcaattcccatcgttcgcattgtgatatttccaccatttgttaattaattgcctaattagtagaagacaaatgcagcagggatgggggagagctcgaaagcacttttggcattcgtgtttctttacaaatgnggttgggt

SEQ ID NO: 24014 - DNA, 2120 bp, Heterodera glycines
aaagtgaaaagagactgacagagaaagagagcagagaaacattatggagaggaagtgaaagaaaaaatgaaaatgagatacacagaggaatagaaaaataaaatgaaagtgaaagaaagaaaagagaaagagacagacagagggaaagcagagaaagaatgaaatgaatgggtaaaagagacaaagagaaaaagagaaaatggaaaaattaaaagggaaagaaagaggaaaaagagcaattaaaagaatggagagaaagagaaaactttgggggaaagaatcaatgataaatagaggtgctcaattataaattatatgaatataaaatcacgaaacatggccataaaattacaaaaaaaaattggacagaattttttcaaattgatgataaattctcaacctttcttaaaattcgttaaatgaagctaaaaataaactaaaaaatatgccaagctaaaacatgttttcgtgcgctacaggcctacagtccatgaaaaaaatatgaatgaaaattggacaccgccggaatttgtcaaaggaaaattggacaccaaatccctattaaaaaagtaaataaatccagcaattaggtgaaaaataaatttgtgtagggtaaatggatgagtgaagtacggtacttagggtagatcagcaggcatcccatagtgattggtcaaaatgtgccaaaattgaacaaaaattggaactttatgaatgctaatgatgactttcttctgctgatgataaaaataattttaaaaatcttaattttcattttatttacgcttataaacaacttatgtatgtatgtgcagataaacaaaaagatatttttggccaatccaaaatttttgtttatttatttatttttgtatccaatagtgtccaattttccattaatgtccatccaattttctagtgtaaattttcggtgtccaatttaccgggagcctggcctagggagtgatttttttttgaaaatctaaaaatttcagaaaaaaaaaactaaaatttacttttatgaaaaatttttgaattcgatttttaataattgaattatttggaaattctctttaaaggattttttttatttaaaaaaatcaatctgaattggtcaaaattctgaaatgtacaccaaataattaatgcattgccaaattaatttttttttttttgaaaattcccgtcaaaatttcaaagttcttcattctcttcttcatcaacatttcaattatatttaaacaaaatttgctgttttattatgacgattgattgggacggttttgaagagaattgtgaaaaaaaaacattcggattatgggaagagattcagcgtgaacgaaacgacggacgaaacaatttttctcttcatcatgctccatattttgtttttgtttttgatcattttctttgatcaattcatcgctttcgctgctgcaagaacagcgtggccgtggcaacgtgccggcgtggcctcgacggcatcggcacaacagacgcatgggcagactgggccgcccgtttcctgaacatcggcttcagcatgtccaccagctttttgcatatatccctgaaaaagttgtgctagttagctggctttaatgccattaaatcagcgaggggaacagcaggaggatgggacactgatctcgacaatctcgaatacccggtgtactagaacccaccgcccctcacatggagataggagggcctttttcggtactcccgaacccatgcagttgcgcgctcggcaccatttccaaccgggtcaccgacgccgaatatccttcctatcagagacagcttcgctccctatagtacgattggcttttttggcattttcccatgccctgacttttcggcactttcttggcagaataatccccgaaaatctttggcaatcgtgcccgaaatgtgcaaaatttcccatcccatgcgttatggtgcgcattttcgtgtcgtgcacacctggcatgtttgttctccggaatgaagccttgctgttggagttgtggcaaaatttcgcagaaattgaacaccgcgtgcagttcctgcttgctcagcctggcctcctccgaaagcctcatcatcatcatcatcgttatggttgttgttcattt

SEQ ID NO: 24015 - DNA, 1889 bp, Heterodera glycines
ttaattttctcataaaattgcaatttttgcttgttttactttttggttaaagccaaacggttggtgctttttgcgattattttgcggcaaaaatacgcccggattgagcgcaaaaacgcgaaaagtgccgctgaagtcatcgtcaattttgaaccaattgatgcggcctattttgagctgttgcgtgacattcgccgcgagacggagcgatgggtgccacggcagcgggagattaagcggctttatcgcgtgtgccgaaatttgaaccgggcggaacgggtcgaaattggaaaattggtcgacgcatttttgcgcggacaaagtgtcgacaattatttggaaagccaaacaacaaaaagggacaaaaagcgaggagcaaaagcaccgtgaaaagcggggacggcacggatttctatcattatttattttttaaaaaaatttaaatgcaacttttattttttcttatttaataagaaaaagcggtagaatttaaaagttgcaaatgatttttatgtgcaagcaatttattggagctgataaatgctgttgaaaaggtgcaaataataattattctattaaataatttaatttcctttaatctttcgttgtgttgtaaaatttatttattcaccttaaataactttttgagaaaaatatatttgttataacttttttaaaatcacaaaaaataaaattatggttgcgcattatttagaatctaacgaaacttttttacgaaacttttactatctaacggtaccaagcatgttagtaagctaatgagttgagaaaagttatacgaatctttatcgaaaaactacatgagatggcttttagctgttttgtttagcatttatttatttggaaaaataataaaagtcattaatatgaaaaatttatgaaacaattataatttatttaatttatattttcatatttatgtatgatttccggtgacaaaggcaattattgctaatacataattaaaagtcaaaaaaatctttgaaaaagctgctctcaaaagagaatatctgtgacgttttctccgcaaatccacggcaacaattttgcaaaaaaaaattaaaaataaattatttgaagatattgaaaaattggaaatcatcagtgcgttattatgaagtattttaagagatttgtaactttcaattaaatattaaatgttgcattgtcggaggatttcggagcttatgggggcacgaattaaataaaatgaacgaaaaatattaaatttattaaatttttgaaagaaaattacaatttaaaatatacagaagataaatagaaatagaaaagaaggctatgattatggtggttatggttactgtacaagtcaccacacgcaaatggcagtcggaataattatggaatttgaaatgaaatagaacggatacggtggtggtgaattgtcagtcaactacagtatggagggctctggctgacaatgatgagggtggtacggtaaagccattttgtggttggtattatgattataataatgataaataataatacacgttttgcccgtcgggtgaacctgagatgcttccgggaaaatgcttctcgcgccgtcgccacagaagaggaaaagcgatggcacagaaagagagagagagagaggagaagcaaattgcccgtccagtgaatggttaagtggtaagaaaattatgcaaaaaataaatttaaaaaaatgtgttaaaaaaatgtaaaataggcaaatttaatttctctattttttattttcaaaattttttggtaaaattaatgttaaaatttgcctgagaaaagttaacaaatgacctaaaataaaacaaaattgcgatttgcatcccagtgatcaacgaataattgaccctatgaccttgatacaa

SEQ ID NO: 24016 - DNA, 1995 bp, Heterodera glycines
tttcttgtaaattgaaaaaatatttttcagtttatcaacatttttacgtgccaaaaataataaattttgaatttggtataaaactatgattctgatttacaacctttgccagtgcttttattttcttcataatttatatgattgccacgaatccttatgcccttgcctaactttttgaacaaattttctttaacttttcctcgcgatacctacagaaattgatttttcattataaaacaaaaataataattacctgttgcctcatgaaaccatgcccaacaaagtccaggttataaaactgcgcttcgtcctcacaatcagtaaaatcatgatagggttcacctgcggtagaaattaatattttatgtaatatccgaataagaaacgtataatcgcatctgcaattaggttgccatttactctctagtactagtatttctaaaatttgcattggtttttttcattttccgacggagctcgacttttgtgttcccaaaaattttaaaaagggccgtaaaaattgttgtgaaaaacaaaatataaggttcgtctttgtctcttatttgggttgggactcggcggttccgttccgaggcctccgaaaatcttttttttttgcaatattacaccatacctttgttgatttgcaactgcaaaagttgacgtctcctggtcactgatttgtattctttgttatttatcctttggcgcatttggtgtaagaaaaatgaggcaaaattctgtccaggtcttttcaggaggtcgcacacaaattgggccctttcgatgttaaaagtcggcggaatggtccaactgtaattgaattcggagagggacgccagcgaagggtccgagggaattacatgggacaaatgggcgaagaagcgatttgggtaattaaggctttgctctgtcgaaatgacgcgaagacgatagatataacgcctaaaattggaaaattatgatttatattaatgagacagatgccaaaaaagcatttgtttataccaaaatgagacaaagggaaacgaataaattacagacctataggaaacatgaaaacacgggtgaaatcccattgcgacggggtcaacgtgaagcaattcgatcgcattcgtaaatccattattgcgaatttggtctgaagttaattttaaccaataattggcagttttagaaaatataaatccgacctccaaagctgccaacttaaaaattaccaatttgtgaggatttttccaagaaacataggctcattttgaaaattaggcctggctaaaacctcacagttggcagcctgtggtcataactccgtctaatgtcctgatattccttaataaataccattaaaacatagaaggaattctgtcctggccaattctgactgactgaaccagtcgcaagcgacgggcaatccgatgagaatcggcgatcgaatggcgtgcactttcgcatccgttcttaaattaaaacaataacattaattaacaatgaatgaaacattctttgattacctgcttatagcgaacgttttgatttggtccgaattctctgtagcaaataatttttgaagacacgattcgaccacctgcatgacacttggcccgttgcgagagtcagaaccctttgccatggctgggaattttgaaccatcataacgaaaccaaaaaagaaattttcgaaaactgctggcgatagtagattcaatttttgatgtcatttctgagaaagtttaagtcggcgtaatattagaaagtgaattcaattctggaaaattcacatgcatttataatcctggattcttctcgaagaaatagagaagcacaatagtaccatttagaacgcggcgacactttaataaaagttacgagtcaatgacaaactcggtacttgtgcagtttacgcggtaatagtgcagtttgtccccccccccatttttcgaaaaaaataaaaagtttaaaatttatgatgatttttttgggcccaggtcgtttt

SEQ ID NO: 24017 - DNA, 2099 bp, Heterodera glycines
aaaacaaaatgcgcgtctaacatttgcaaatgaaagttggataaaaataatccgtcaaatttgattttttatgattgattggggggtagggctaaaacgcccggcaaaatgtcatcatttgcaaaatatattctcctctgttgcgtgcgttccttccattcccaatgcactgccattccctttttctgctcgctttttgtcaatgatttttcgtctcccattggcatattgtccaacccctcgggcccatttgcaacaatttaaggcaaacaaaattcaaaagttgtttggataaaatgtgattttcgttagaatttttggttttccgcttttctcattatataaaaataaagtttccaacgcaattaattcttctgctatttgtgtgacatcattccgaactcgtccaaattgtgctaattgctgccaaaaatgaaccgacggtaattaaattaaaagtcacaaattcgtcatttatttaactaacaataaactgttttccataatttcagttggatttgcaacgacgtttggatggacattttcccctcttttgaccgtcctcaactcggcctcaaattggcacttctttcgccacgtttcaatgcgttggtggacaaacatttcgatggcaaaagcgaattgacaatttggagaacgatcggaattcacaagggcaaaggaccagaaccgaagctgtctgtacaaattggtgacaaatttgtgccatttccattgcccgaccgtccgttgaccagcaaaatccgttttaagcatcttcggattgagtaattaaaaatcagagagctatgacaataaaagcattctttatttttgttcgtgaaatttggccaattttttctgaaaacattcgccacttgggctttaacgatggtgatcatttggacaatttgcgtcgtcaaatttcgccaacaattctcactgatctgaatcagttgaattcaatctattcctttgatcggttgccctctgcgtttggtgatggttttgatgggccaatttctgctggccaagcattgtccaaatggttgcactctccgagaaaagatggacaacccaagcgattgcgttgctataattacaacgaacaagcgaacactgattggatcaacaatttcaaggaggtgtggtccggggggggggggggggtggacaaaacgtagcccgcaaatttttattttaattaaaaaaattatttaaaatttagttacctagcctaaatcaaaaaaaaatagataaattcgaaaaaaattattaagaaaattcaaggaaatgtaaaaaagtcgtttttttatttttctggaaattcagaaaattagtttttatacgagacggcgacgttttaggggcgtacccggtctgtggatggcattctgagttattttctgaaacccgaccccaaaaaagttataaatcgaaaatttctgaaaaattccgaattttatcaaaaatttcggaaatcggaattcagtgccatccctggtgtggccataattcgacaaatcactgattgttgttttccaatcaaattgtttagcattttcttcgtgccaatgccatttcttccgtcagttaccaaattcatttttctgttcctgcgccgtcaatgccaatggtgccgtttgaattggtgaacgaatggacaaaggaaaagctgacattggccaaaacaaatgaatgggacatcgattggataatgaaacgatgcaaaattattggggagaccgcggcggtttattgggaagacggaaattgggacaacaattgtaataatgtgtccattcgtctttttatttgttccaattgcattgggtgagcaattaaaaaaggcatttaattttgtttaaataattaaaatttcgcttaatttaggccattgtctccgccaccgaaagaagaagacgaagcaggacaaagcagcgaaaaaggggcgtcgtctgctgacaaaatgagtgacggacaaaagaacaaaaacagtgatcagccgcagaagaaatgaattaattaagaatgatcgatcgatcataattcatccgtgatcaaatgcattttatgaagaaaaacctctcaattgctaa

SEQ ID NO: 24018 - DNA, 1888 bp, Heterodera glycines
atttcccaccaaatttttagacggttttggcgaaatacctcctaatttttcattttattctgtgcttttggtgtagatgatggtgatgccaccggtttttctttttttgaattttcatttaattttaccaaaattttctttgcattttcttcgcccacaacgaattccaagttcggttggaaagagtttttatttaaaaggacagctaaaaattaaaatttatgtaaaattaagggacggatttataatttttttaaacaaaaatgccctccaaccaatcggtctttaaatttcaaaaatgcataaaaaattaatttcatcagatttgtctcattagtgataaaaatatttgatcacggcttataatttagcatttaatttaattcgaatatgaaatttggttttgtcatttatattttcgccgcaagtattttatttggcatttttttgtaaaaatttatttttaaatatttcgggcttttttcattaatttaaatcaacattgccctaataaatgtgtaaaatttgcaccgtttttcatgcgatcggcaaatgccggctcttctctgatcagtgttccaattatgtcccaatgcagtgatcgcttccacttttcgtacgcccgtcgcttttccatgtcaatcgttttcgcatttcccttctccattatctgtgcccataattcgtcctccaacactttcgtcgtgtccttctccaggcactgcttcaacttgtctaataatcctgtcaccacttctcccaattggcgcacctttctctcgtcctcttcccaaattttgtcgtaaaagccctcaaaaagttctattcgcgtctcccaacttttttcgatgcgtttggtggcgattgaacgccgccgcgtcagtcccaacttttcctccacccatcggacaaaaatgatcacatcggcgagcaaaaggtgtacaattgggtcgtcctcatcccttttcaaattggcgccaaacaaaattctgtcataatgcgacagaagcactttgttgtccgagaaaactaaacaaaaaattggtcgttcattagtagagaccggatttttaggtgctaaaaatcctgaaataggtactaaaataggtgccaaaaaagtgcaaaataggtgctaaaaacgcccaaaatgcaaaaatagttgcgaaaataggtgttaaaaattggaaaaatccagtgtctttatgcactaaaattccaaaagtgactaattttttaatcaatttcgctcgcacaattgcaactggtcaagaaaataaataaataaattttggagacgaattttcggaaaatttttcctttcttagggttatatttactgaaattttggttaatttttaggggtatattttctcagaaatttttgggatagattcataggggtgtatttttcgtttttattgcatttttgctataaaatttctgaaaaaggccaaaataggttgctaaaattcgaaagtgccaaaataggtgctaacccccccccccccccattttaggcttttaggtgctaaaaagtcgctctaaatcaaaaattgttcagagaaaatgtgtttttcgtgcttctctcatcaagtactaaccgcaaaaaaaataggtaaaaacttaaaaatccggtctctattcattagcaattcataaatcaaaaggcatttcttgattaattactagggcttcgttttttcggcaaatgccgaaaattttgcgcactttgcactttatacgctcagataagcatgaaaaacgcattttccgcttggtttagggtataaaatttaattatttttcattgcacatgataaaatttttaaatgcccttgaatttaatggaatttcccttgtgtccttggaaactggcatacccgtcctt

SEQ ID NO: 24019 - DNA, 1911 bp, Heterodera glycines
  unsure (1)..(1911): unsure at all n locations
tacttactcacccaccccaaaccaataaagccaaattcccgcctgtcgcgtcgctcggctcgggaaaggggggggggcatctggcactccgcaaaacccaaaatctgccacctggtgccctatcaacgcatgacaacaccaccaactagagcccaagcgggatcgggatcccggcttttttgaaaaaaggcgggcattggggcgccgaaaccggtattcaatcccagtaatcctatcccggcctgattccgatcccgactttttcaaaattccgggctctaaccttcagcacattgctcttcggccctccgccccctttcggcggccctttcgtttcgcgcggcgtcgtcgaccggcgctgttggcgctggcggtggttgcgcagcagcgacgcggccgacgccaatttcgtcgcagcgggcggcagcgactcggaaaaggaattggcgttattgttgtcgttgctgctggtgtcgttctctgtggaggaggaagtaaaataattgccaaaatgtaaatttttcattaaaaacggaatttttaaaattttttttgaacaattagacaaattctgacaaaaacccaacgacattttgcaggtggcgctgtaaggttttgaaaatttgaaggaaatcaatgaaattttggccatcgaacaaagagtatgggctgggtccacttggttatggctatttttttctttaatttattcaacggagatggataaaaggcaaaaaagaccgtaaaaccaaaaaaggcgtttttgtttgcccaaaaataaaaaaacgcttgttttcactcgacggccaattgagtaccgaaattatttggctggtcctggccgacaacgccttgctgctgctcaacaccgtcgttgtggtgctgctgctgatcagtggccggcaaaagcaacgcattgttttgggcggtgacggcggacgatgcgccatgctatttttttcaaattaattcggaggtccgataaattggcattaaatttttaatttattgcattttgaaagagggatttaggcaaatttaactcaaaaattctttgctaaaataaacaaataaaagcatcgatttcattcacttgctgctgctgttccttcctttgtttgtcgcgctgatttttcactgcgcctccgccgcttcgattacgcgccatttttagggtttaagaatttagaaaattttaaaaaatatggtcaatctcctttaaaaaagcattaaggaaatgagatgtaaaataaatatgacagacaaaaccgattgaaattttcaaaaaatcaggagactgtataaaagtagaaaaagaaattcaaataaataacattatgccaaaaatagatttaaatgaatccgacaggcatttatacagtgtcagttgaacttggttaattacctaattaggaaataatataggacaaatgacaccatgctggaggaaaaaaaggctaatttccgcaaaaacaacatttttgtcccagctctatccacgtctcagcagttccattcatcaatctccgttcaacttttcagcaatattccggggctctaatctctaataattagcaattattagcagccttttatgataagtaagtgcctgctgcgcctctgattggcactaaacacttttgtatctctctgagaaatttcgaattatggtgaagaaggtgaagatggaaggaacacgtgctgcacacacattttgtttgtgtgtacccgcccgatcgctaatcactactaatcactaatcaggtgagcgaccgccgtccgacgacccatttcttttttttttgcgttttgcccttacataatgaaaaacaatgagtaagaggggaatatcgaatacataatcttcgtctctctttcgtggcatttcacccgaantatttgtggggacct

SEQ ID NO: 24020 - DNA, 1752 bp, Heterodera glycines
agtaagcatttgcctttttgctctacgagaggtttccgtcctctctgagcttgccttaggacacctgcgttacgctttgacagatgtaccgccccagtcaaactccccgcctgacactgtcatcggcgcgggtcgccgggccaccgggtggcccgacttaacaccaaaatggacaccctttcgggcgcactcccgttttaccgattaagtaaggaatcgatgaaagtagtggtatttcactggcgccttgcggctcccacttatgctacacctctcatgattcttcacaaagtcagactagagtcaagctcaacagggtcttctttccccgctaaatttgccaagcccgttcccttggctgtggtttcgctagatagtagatagggacagtgggaatctcgttgatccattcgtgcgcgtcggtagttagccgacgaggcatttggctaccttaagagagtcatagttactcccgccgtttacccgcgcttaatcaagtttccttggcttaacattcagagcactgggcagaaatcagacacggtcaacgtccacaaggaccatccgtctcctctgttttaattagacagtcggattccccgagttcgtgccagttctaaactggtcgttcagcgccaaccgaagtgcataccctgacgagcatacacgcagctgaagcgctccacaagcagctctcaccactagtccacgcaccatccccgaaagaacagcacacagccacgggcaaaagccgcctgtttcacgcaacagcccggctgacccgacctttagagccaattcttttcccgaagttacgaatctaatttgccgacttcccttacctacattattctatcgactagaggctgttcaccttggagacctgctgcggatatcggtacgatcaggcaggagatcaaatagctccctcgcatttcaagggccgtgtggagcgcacgagacacacaggaaccgcggtgcttacgggcgcacatccctatctcaggctgagccacttccaggcacgcacaccctaaaccagaaaagagaactctggctcggactccacacgacgtctgcgagttcatttgcgttaccgcgcaaaacagctcttgcgaaccgtcatttccctagcctggcgtgggaatgttaacccacttccctttcggcaaccggatggaccaactgcgcaagcacagaaaagtcgtcatccgtagtgtgttacggcgttagccggtgccttaggatcggctgacccacattcaactgctgttcacgtggaacccttctccacttcagtcttcaaggatctcacttgaatatttgctactaccaccaagatctgcactggtggaagctccggccgggcccacgcccaaagccttcaacgcaaccaccacgaccctcctacacgtcatggccagactacgcgacaagcacgtgtacaagccaatgacggtggagtataggtggcccgctccagcgccatccattttcagggctagttgattcggcaggtgagttgttacacactccttagcggattccgacttccatggccaccgtcctgctgtctatatcaaccaacaccttttatggggtctaatgagcgggaactttggcaccttaaatccacgtttggttcatcccacatcgccagttctgcttaccaaaaatggcccacttggagctcaaacattcaacgcctgggtacagagtcaagcaaccctggcttcatacccatttagagtt

SEQ ID NO: 24021 - DNA, 2640 bp, Heterodera glycines
acctcttttgagtttttaatagagaggcgccagaaatgaacatttttaaaaaatttaaataaattacaaaaaatgcgtttccaaaaaacggacattcattagcacactttgtcaacaaaatgatgccaaacctgaaggtggcgccgcaatcggaggccaatttcgcgctgctccgactccaaaaggtcgagccgttcagtaaaattgagaaacaaactgaaaaagaaaaacaaaatttcgaaaaaaaaagtttccaaactcccccgaggccatgtacaaatgggaaaaaagagtaataaaaattaagaaatatgatttttggaaaataaattcgaaaaattttggacgtgtgccgcccattcactcaacaaaatttcctttgaaagtttcgcttaattcggttacacccaaaacagcattaaaattaagaaaataatgtgttcaattttattaggaacattaattctgctgtttgaataattgacgatttttcaaaaatttacagttataaaatgctatttagactatcagggattgaaaaaaatcagtttgaacccgattttagacacaggcgcaaatgtctgggcacgttaatttttgaaaatcctccccagcgacgccttccgaaacagcataatcttttttttaaaatccgcccataaaatttaaagaagtttaattttgcaaaatgcattggatacagttttaggggcgatgaaaaaaataagtcctcggaatccgctttttgaatatttttttctgttcaaaggcctgctggaaaacgaaattcagtatacgaaaaattttgggaaattgctaaaaaagatcggaataaataaatttaacggcccaaaattatgagaaaaatgcgaatttaggcctcgcttgcgatttttcatgcgaaaaaactcggttacaaattgtccaattttaagggactccgttacacataggcaaaaatgtaagggaaaatattttatttgaaaaaagtacggaatggctgcaaattttaccaattttttctcattgtgatacactaccaaaaaaaacaaacaaccaaattctgagaaaacggttaaaattggaaaaacggtttcttcggcttggcccggccaaaaaaataaaatagaatttaaaaatttgaataaaatacccgtcgttgaacgggtggtcgtacatgagcacgtcctccgcccccgttgctgtcgattggtgccggggctgtccttgctggtgcccggcggcaatgccatcatcgaagacggccatttcataagccaaaaaatataataataataataatctactttaaaaaatttaaataaaaaaatgctagacaaaattagaagaattttaaaaaacaactgatcagagatggcgcgggaattccgacccgaattttgggctaaatttcaaaacaattcagatttttttttaattaaaaaaaacatttcgccaattaaaaatgttaaaaaatggatgaaaatctgttaaaggcgtgccttaattttggagttgcattggaccgagaattttagaaatacccggaccgggactgccgggacaggaaagccgtggcgggacttggattctcaacaggggaccgggaccaatcgggaatttaaaaaataaataaataatattcaaaaaaatctaaaaattttggtggaaggaggacgacggcggtgccgatgggcgccgccgaagaaaatttgaaattttgttgtgattattaacagatcttaccaaaatggtcaatttgcaatatatttgatcttgtgtgcgaattaattaaagctattttttaattaatcctaatgactagggctgcaaaaaatatggatataaaatcgcgaaatatgctcataaatatgggccaaaacaaattgcgaaatatggacataaaatgccgaaaatatggacataaatttgtgcaaattgagggtataatttttcaaactttcttcaaattcgctaaatataaagtaaaactttcaaaaatggctaaatactatattaaaactcattttagttgaaaaagacgatacagcttaaaatttactcattttacacggcgagtcaattttgggctccaagtacaattaagttggatttttcgtcttagtggtctgtgagttagtcaccaaaaggggggtctcaggttcgattcccagtgcatgctatagctgtattttgaggtttttaaaccaaataaataagtgtgaaatggtaacacaattttaaagaagcttaggatttttttaaattttattcatagctattttcctgtaaaattaaagaataaaagtttaaatccaactgtgtttattcaaaatcgaattgttcttcttctccattgctatcttcgtccgtctcccgctggtctccaatttctccttgttgttcttcacggtcctgaggcatgggaattttatttgaaaccaaatttcaccaaactgacccgcttcatttcgtcgatttttcctgtgtcgagaagccaatttgacacaaaattgtgttccaacaattttcgcatttgttcttcatcgggcattgtcttccaaagctgttccaaccgcatccataccgaatgcaatgcttcatcacctaaaaaattcaaggcttaaattcaaaatgctt

SEQ ID NO: 24022 - DNA, 1673 bp, Heterodera glycines
aaatatttctgaatgtcacagatcccttcccatttgatgacctgcaaaacgcaatccataaagaattggacaaacagccagcgcaagggatcaccgacactttgaatgtttgggtaacatttactttcattttctttttgggatgaggcaaaatcgccgcctaattcttttttatataaaattggacatttttgtagaaattagacagttttttataatttcatggaaaattctttcccactatttttttttttgaatttttatgataagttgccaattttttcaaaaaaatttcccaaaaattgatgaaaaaatttatcaatattattttattaagatttttaggtttgaaaattaaaaaaaaaattcaaaaaatcgctgaaaatttcccgaaaaattttttttaaagaaaattttcttatataaactttctaagatttttttcttaaaaaatttctaaattagcaaatttaaaaaaaaatttctttggggaaccgagctgggggtgaactgatacaggggggggggagggaaatgaagtggaccccattttttatatacaccaatcgcaaaaaaaacacttacatcgcattactccaactttctccaggacaacaccattgagaagttctattctggccaaatttgatttggcagcgacttttaagaagaaaagaagcatcggttcgctcatctttacacactttctattccttaactttaccacacaaatacaaatattatttttttcttgcgcattttttcttttatttgcttaagtattttcttgtaaaattagatatattcactgctacaaaatatgtatgtgtaaaatgaaaagtataaatggttttttgggtacgatctgttgctgaatttacggtttggaaattttagtcggatgggactcgaagttagcctaaatgttgttaatttgtttgacgggcgcttcgaaaaccgcagaactctttcacgatctcatccggttattccaaatggagaactgacaccgaaccaaccggactgggacactagtctgcccgttatagtctgagccaagtttagagcatcataactttttttcatcaacagcttctaaacatatagggctttagaatgatgccaaatttataaaatttggcccgctgagaaaaaagttatgatactttaaacttggctcagactgtaacggccagactatagtgtccccaccccgaaccaacagttcgcatggtccatcattttttcagggcgacactaataaaaagggtacttttccgttttggggccaaagtttcagtttttttttaaatcaacagctggcgagttgatttgtaatattcttcattcccatagcatagtgaaaatccgtggtgcagacccattcgaagggtgatgcgacatttgcggcgctgacatttgcggcgctgacacttgcggcgcagacagttgcggcgctcattcaaagcgacacttgcggcgcagacatttgcggcgtgacacttgcggcgccgacacttgcggcgacgacacttgcggcgccgacacttccggcgcccagtcaaaaggacacttgcggcgccgacacttgcggcagcccagtcaaaaggacatttgcggcggcgcaaaattcaaagagcccaaaaatatttcaacaatttatttccattaaa

SEQ ID NO: 24023 - DNA, 902 bp, Heterodera glycines
agaagtcggaattttatgtcagagattttacgccctccttgcgaattgcataccaagatagaaaaatttttatacatttgatttttggcattttgatttgctacctaatttcaaataatttcgccacttttgtcggtcgggatcggtttagtacgggccgttttagtacgagcgcaagtttttggctataacttttttctttgccaaccaaattcaacaatcttggtatcattcgataaccctaagtgtcctctattagcgcaaaatttcgaaaaattttgttaaggttcaaaaaagttatggccagaaaaattcaaaaaaccagattatccaacttttttggctcaaactttttttaagcttaacaaaatttttcgaaattttgcaggctaatagagcatccgaaggatatcaagaaagttggattttgaataacaaataaaaaagggggtaaacccaactcatccaaacccaactcaccatgcccaactcatccatacccaactcatccatatacccaactcatccatgcccaactcatccatagcacgatacgagtcgtcgccgtggcatttaatgccacgactaagaccgtacaaccaaaaaatactacgactaagaccgtacaaccaaaaaatgccacgaccgagaccgcataatcagaaatgtccacggccaagaccggcataatcaaaaatgtccacggtcaagaccggcataatcaaaaatgccacgactgagaccgcatatcaaaaatgtccacggtcaagaccacataagcagaaaatgccatgccacgacgatgactcgcagcgttatggatgagttgggtctatggatgagttgggtatggatgagttgggtttggatgagttgggtatggatgagttgggggtgactcg

SEQ ID NO: 24024 - DNA, 961 bp, Heterodera glycines
  unsure (1)..(961): unsure at all n locations
tcttggacagaattttgagaataattaatgttctgtctttcaagtagcgccggttccggcgtataaaattagtttcttttttcaaaatttaattttattactattaataatttttttttgttccaatagctttgcatcggcccacccttcccgaaccggacccttaacaaaaaacggagtatttttcgggtgccaaacggattatcgattacgtgttggtctatgaagagaaggaaatgacgaacagcaactacaacaacaattgcgctgacaacaacggcttttcaaaaaatccaagaaaatttcaagggaaaattgaaaaatttttcagcaattgtttctctgctctgtctgagtgcccatttcttagccggtcttcacgcgttggaacggctctgacaactttccatggatgccaatgccatcggcggaggggcgaaagacaacgcaaagggcggagagacggcagacgccgaggcaaatttgttttaaaacttaaatttaattgtttattttttgtttcttcagctccctctgcgcagtgcttccctcgaaaaattggatctttcatccaatgccttgcgcagagtgccgaccgaattggtggcccattaattgcatcccctcaaaattttgagttcggcggcgatttcaatcgaacggatggaaccgaaattaatggccaatttcagtgcattgaaacaggcaaaattaggtaatggaagttgaatggacaaaccaattatgtaatttggccattttcagttggactttttccaaaatttcctccgtttttgccctttggaattttcgatggactcgacgaattgcaagctctgctcggattggcctcccttcaatgggtcaatgtcagtaaaaatgtaatgtgaaaagagaatggaaccaaattanatctaaatgaaaattcagttggaatggtgcccaattcttggccgaagct

SEQ ID NO: 24025 - DNA, 1823 bp, Heterodera glycines
tattaagttaaagtattttaaaaatatacgtccctagttgattcatgggcccggtggtaccgacaggctccaccggaaaaatatccaactttttaatgcgatttattcaaaattttgatcaagattactatttttaaggcattaaaaaaaaatccaaaatggcttcaagccttcttttgagaatttagccccattgcttcacaaaaaccacaaaatgaggataaagcctcacatttgggatgaaagagaaatattatgaatttaattttcttaagtataaaaagacagtacttagtgaaattattaagtcaaactaagttcaattttggtttgattaagtcaaagttaatacgcgaatcttgagtaaaaaaaaatgatgtggtaatcacttctcgatcagttttgttttttctactcaagtttaatttcgttcacatggttcgagtttcgcaaaaattttttattgaactgagaaaaattttatcggaatattttactgtcaaatgtttggcataaaaaggcagagactctctgaaaactgtgttacaaatgtcacgaattaacaattaatttccttcatttacatgctttaatagtcatggcctcgacctgcaaaatcaatttctcactccgtccgtaattaacttttccaatgattaatggaaatcaacttaaattggagtgatggattaaattacggaaaattcataccgtaatccaaactatctgcatttatcgtgattactgtatattttttaaattcttcatttttcaattccaatattatttatttatttatcaatattttcgataatttagtattgaattaacataattatttttttgcatcctttattttattcattataatggacgataaatgattcattagcaaaatcagagccgatttttgccggatgggtttttgatagaagcggaaagtgttagcgatgacaaatgtaaaaactgtgcaaatccactgatggaaaagagataaaaaagcgaatgaataaatttaatttataaaaataaaaacgaacaaaaataatattcattaatagaaaatgtactaaatgaaatgaacaaaaagagaataaaattgaaagtgtaaaagaggaacgattaaagagtgttaatgaacccaaattagagggcaaatggacgaaattccattgcggtaaaatgccaaaaaaaagaattccctctccgctgccgtttcgtccgcttctctcttttccgttgcttgctgaagtgccactgggacaaacatcaaaaatttgcagaaaaaacacgcacggaactcccgcaaaaaacttcactccaacccaaatttaatttttaaaaatgaaattatggaaataatttttaaaaacaaattcataataagaaggaaaagaaaagagtgtcatatgaataaaaaaaattttctttaaatttgaaaaatacttccttcctttaaaaaactatattaaattttgtatgaatttttgaaaatgaaaaattcatgtctttgttttttaaatcgggtttatttataaccgcttgaccgctgggacaaaaattgccgaacatttcgaattatttaataaaatttaatttttttttataaatcgctccgtatttgttcagccgattcgttccccatggcgcttgtttggcaaaaaaaacaacaactaatcatctttaaagcacggaaatacaaaaaaaaaagttctgaatttttaaaaaaatcggtcatttgtcgaaacaattctttgagcaaattccttcaccatttttcgatttatattcaagatggaaaaattgtaaaaaaaggtcaaaga

SEQ ID NO: 24026 - DNA, 1922 bp, Heterodera glycines
  unsure (1)..(1922): unsure at all n locations
ataaattatttaatttaatttaatttaaaaatantttaaaccttcactatgttttggaatattaatagaaatatttttaatgatatgcatagtatcaaagtctatagcatttctttttataggcattttgtacatttatttaaatattattgtaaatatgcatttatttacatacgagcgatgtgagcacgcgttccacgccggcaatttcagtccgattttgttggccgccagcaatggtaccgttattattattattgcctaaattatgtgaaaaaaatatataatttaatgtatgtgtgaatgtataattgtgagtaaatattaattaattaatcaactgcgaattaaaattaattaatgactggaattaattggaggcggaaggcactcaaagtcgcacgaatcgcctccaggcaaagattgtgcgccaaaataggagggtgtggggggcagtgccaacaattttggcatcaaattgctattgcttattgttgtggtggtgaacgtgttgttaagccgtgcgttgttcaccgacgacacaatgttactctgaaaaacaatttttcagttattttttttttaattttgcaaaaccataattttttttttaaatcctcatattttgtacaaattattaaattttaattttttacattaaatttttttgtcttagaaaatgcgcggattatttattttataaacaaaaaattggtataaaatattatgaaattttataaattgttaggccttatatgaaggaaataaggtattcttgggaaaaccttttgaaaaagattttcggaatacaactttcaggataattaaacatatggaaccgtgtaattaatatccctgtaacatatggcgaatttaattagttagttatgtgggattaaaattacttaaaaataggtcaaaaaaaattatggaaaagttgaaattccacaaactacttccaaaatgaggggtaaaatttgtccaaaaaaaaaagctgaaaaatgaaaaattcattttcattaatttaaaaaaagaaaaaattatctatttaaaaatgaacgggcctttagtcttcggcgggcattaaatcggcgaatgttctcaatggtgtcgcccaagtgcactcgcggggccacactcttcttgaaccaatcgtgccgaagacactgtgacagacagcaaattgttattaaatttatattattataattagtatttaattaaaaataaattaacatttgtgagaaaatgcactttttaatttgaaaaataatttaaaataaaaaataaaattggaattttgtaatttgaaaaaccatgtgtttattatttattacgactaattagtggccaaattaaagaataaataataaaaaatgaatttaataattttccattgaaaaaattgtgaccaaaaaggaaaaattattaaaaataaaataaaattgaataaaaatatttaaatttttttttataaaatttgccttttctggcgttgtgcgtttgtttgtgtccacacacaaaagttggcgcaacaaatctttggccgtgtcactgatcgaagcccaaattgggccggacatctgaacatttttttaaaatgagttttaaaaatggaaaatattatttttaaaaataatttgaaaacaaacaaaaaaaaatggaaaaaaaaatttcaaaataattcatttagtgaaaaatatttaaaaaagcgatattaaatttaaaaaattaagaaaattcaagtattaaaaatatgaatataaaaatgaaataaaattaattttagttgaataaaaaataaataatgtttaaataaaattcaattttatggtgccacaaacgcacggagtaatgaccacccgaaatttgttgaaaaacatcgaagaggtttgcccacaaanntggctatttgcccacag

SEQ ID NO: 24027 - DNA, 1010 bp, Heterodera glycines
tagtccggttaatgtttcggaaaatgccactggaccggagtcttgttaagacaggactttttgtacggagtcctaaagagtccgactctgaaatcctgcagataaatgtgcgggtcataatctgtgactatttcacaaagttggcatctcataattgagcccctccccctttttctagaaaaatattttttaatttggcttgcttatctgtctaactttttgtaaagtttaaaaaatcgaattctatattttaaagcgtagattagagcaggaaaattcatgtgttattatagtcagagagaataccgaataaacgtcaataaattcagaggaagagaaatttgtcaaatgaatagaattcttgaaattcatatattatttaattttaaaacaaatgagttctaaataagaattaagttggattatcgtccttaattacgctaatgatcgattgaaaaaatgaccaaaaattaaaatgccataaatgagatcggcatcgccgcgccataaaaaaacctatttattcataaaaaattttggctcaaatcgaaaaaatttatcattttttggacaaaatctgttaacagacacatccaaattttcaaatgttttcccggcggcgcctatcggcaccgccggacctctttctcctaaaagtctttagaaaaagagcgccgcgaaaaaaagatgatttgacaaacaaaaaaaaagctaatgtgatcagaaattttttgggcatttgcatttttaattaattctatacaaaaatatttatgataaaaagaaataaaaaagcacataaaattattattatgaataataaaaaaaaatttaagctaaaacaatataaaattttttgattatatggtataaggcaaaaattgaaaaaccccgaccccgaccccgaacgatttggcaaccccgacccgaaccccgacgcttctaaccccgacaaccccgaaccccgaattttccaaccccgacgtcggaggtgcaaacctattatattt

SEQ ID NO: 24028 - DNA, 1302 bp, Heterodera glycines
  unsure (1)..(1302): unsure at all n locations
gccaattccgagccccgcatcgacnnatatttcaaaaaaattattcttancaaaatcatgaaagcgtattcgaaatggtnttcagggtagctgatcatgatccggggcaattctggaaaactcacacatttattgacattttttccaattttttggcaactattttggcatttttctgcatatccatccctatcattgtaatatgttgctttatgaaaccaaaatactttacaaaacataaaaaaaatataaaatttaagcaccaagaaaattttgtgccctccaagactctcttctcatcctgctgatttccttcttttcacttttcaatccatctcgaaatgtttacgctattcacatgtaaaatcaattgccaaggtgacgttgtcctcgtctttgttgtacaaccctttgcttgggtccattaattccttaatttgccattacaatattaaaatgtaaattaactaattaatttccactcaccacaaatgaaatgaaattgttcccccaagacttcgattcattgttaaaaactgtttcatcgagttctttcttaaaatcctccacaccgttcttttgcgagacaattcgaagtgttcccgaacatttgcggctccaatttccatcttaaagcaaattaaataataatcaaatttatattttaacgcatttcctttaaaaaatcacttttaattttatgttaaaaattactgcttacataagttttttcaataattaattacaccaattttatagacaaaataattatatttctattatataatttgataagcaaaccttttttagaagcatcgcacaaaagataaaagcccaaccatttctcagtgctttcatttttcttttcaatttctgccaatattttccatggcattccctttatgtacacagtttcacttttacgttcactccaaacgatttctcgtgcaaattccgatagtttttcaatttccatcgaaagtgtgccgttggatttgtttggatcggaaataattttctcagtttttggctcatccacaatgacatcaatggccaatgtgactttgtcctcatctttgtcgtaaaatcctttgcccggatccaacaattccttaattttgatgattttatttggagatgcaaaaatttgacaaatattgtaattaattttttaacatgaaaatcagcaatgtttccgattataactntaattntnnaatcattatgtaatataaaatcatggtgagccaaagtacaaaagtgtcaatgatagaaacattttaattattattagttttaatt

SEQ ID NO: 24029 - DNA, 1224 bp, Heterodera glycines
  unsure (1)..(1224): unsure at all n locations
ttttcaaaatagtaaagtttttaaaaacgctaaaaagccaaaaaattttgtggcctagcaatttttgccccanaaatggttcattttggtaataaattttgaattaaaattgaattagtgaacgattttgtcgttggggcggtcaggaataagaaagagcaattttttttcttctaaaaattgcatataattctntcttatccctgttgacgggggactgcctttttcatgttttctattattaatttttgtcattttttcagttctccgacaagaacactcagtccgttgcgcaactgttccacgatttcctcgccttctacgccttccagtttgacatgtacaccgatgttgcacagattcgcacttccaagtcgtacagcaaagcgatgcgaaagcgcgacctcggctgcggcgacgaccaacgctttcgcctgtgcgtggaggacccgttcgacctggagcataacctcacgtcgggcgtgcgcgaagacagtcagtggaggggaaggaagacagacactcattcatttatttgtggccgaatcatatacggaaaaatggcataggcgcagacccaggcccatactagtgggaattcccccccccccacacctcaaaaatggaaaattaaaatgaattttcaagaaaaatgtacattttttggcgacaaacggctataaattcctgctttttctccccggtgataatttttaaataacgagaaaaatttttaccagaagagcagtaaaaaaatatatattcgggttcttgacatacgattttaccttcttaactatttcaaaaaatatatgggtacaaaaaaagttccaagacaggcaattttagtgttttggaggataaaattgttgttgctgatgtcccgtatttttcactcgatttttggtagaatttaaaaaaatcgagggaaattaatttacatttaatctgtccctcaattaagcattgcatttcatcatcaaatgcttccgttccactgtccgtggaattgcacgctttgatgaggagaattttgctgcgaaacatgacgagggagagaatggcgacggctccaccaagccaaaaacaacgccaaaaattgaaaaatcatttnnatcttatnnnnattttnttttgcttttaaagtttnacccaaaatntnntacaaattattaaccattgttggaaaaaatcgaaccttttcagcaaaattacttttttaat

SEQ ID NO: 24030 - DNA, 1101 bp, Heterodera glycines
ttcctttctttttgcctcctcctcttttctctcctttctccttcgttttcctcttctccttctcttttctcttccttttctctctttgcctttttcccacatttctcttccttcccctcattcactttttgctcccttcgtctgccatcatcacagtccctttgccactttcagcaaacaaattcaatcagattatgatgccattgccgtaactgacgacccttcaaagagtagtggccgcttcatttggtggtgcgacggacagagaaataaatgccattgtttttagttttcttacagatttgcccttcgtttcttccccttttttcattttccttcccaatttgccgatggataacaacactttctcattgttgccctcgtcagcggttggtcctcccgcccccgtccaacttcccaacattcaacgttccactgccgaatgggtctgttcgcttgttgcctcggtcgtccccttccctctcgtagattcccaaatatcgtcccctggctgtccctccccccgggcttttccctccccccgggcttttccctcccccagggttgtctgtccccttgccctcgtcccatctttctcaccccccccccccctcttcctcaggtggaaatactcatttactcgctgtgccttctcgtcggtggtcccctcaatttgctctcttttcgcaaattgctcaccacccaattgtcgcggggcttttcatcccgcagcagcttcaacagcagtcagatcactctgctcaagttgcatttgaacatcgctgatttgatcacaatgtgcctattggccaattgccacccccttcaccagtcacttttcaattcaggttcatctacacactctcgcagatcatttggatgatcagttatcaggtgttgtgtcccccgaggcttgacattcatctcctttggcactttcagtggtattccggggatttactgtgccgtctctgcaagttcttccacacgttcggcttttacctgaactctttcatcgtcgcttgctttgccatggatcgctttttgggcactcgtaatttgaagtctttcattgcctttgctttggcatttcgctgacca

SEQ ID NO: 24031 - DNA, 117 bp, Heterodera glycines
aaaaaaaaaaaaaaaaaaaaaaagagaaaaaaaaaaaaaaaaaaaaaaaaaaaaaaaaaacaaaaaaaaaaaaaaaaaaaaaaaaaaaaaaaaaaaaaaaaaaaaaaaaaaaaaaaa

SEQ ID NO: 24032 - DNA, 1030 bp, Heterodera glycines
  unsure (1)..(1030): unsure at all n locations
tttttttggctagggatatcctataacttatccctcacacacacccgccgncactcncggcttacattacgctgagccaagacaccaccgccgccgccgccgtccacattttgcaaaactccatccacaggtgtgccatgagacgccgacctttctccacccctcaattaaattttatgattattttgataaattggcataatctttgacaatcatttaatttgaatttggtttttaatagagtatcaaacggaaagctcacgcaaatttagccagaaaattacaattttttcgaaaatccacaaatatgaattttttttaaatgaaaatctgctaaaaatatggtcaaaattcttaatttttcccccggcggcgcctatcggcaccgccggaccgtgcgccccaaaagttttttgggaaaagcgccgcaaaaaaatcaacttcgtttttcatgttcagaatcccaaaaaatgcttatttctaacaaaaaaaatgctaaaattgatcatggacaatcaaaaatataacatttgaacattttaaacgtgttttgaataaatttgtaaaaatgaggcttttcgacccaaaatgaggcttttttgcctgccaaatgaggcttttgaaaattttaatctggcaaccctgagtatacacagcggcccaattttgggctctcagtgcaaataggtttattatttatttagtaatcagaacgccaaaactttgcaaaataaaaatgatcacaattttaattggtgcaaattgtaattgctgcccgacaattgcaggctgaacagcgagtcggggagcggagcttggtgccctcaaaatcagatcaacgccacctcacacgaatggatccaagtggaattgggcgaggaatacgtgatcaccggggttggcattctgatcaatcgaacagaatcaatggaattaatgaattgttttaattaaggtacgcacccaaggcaggtgggacaaaggacgaggcaaagaatacgcgcagggatatatggtggaatattggaga

SEQ ID NO: 24033 - DNA, 1831 bp, Heterodera glycines
cacacatttatcccttaatcattttattttaagcggattcgcaattgaatttggcatggcaattacagtgttatgcgcaagtaaaataggcattccaatttcgatcacgcattgtctggtgatcaaatcacccccccccccccccatccgcaattgttgatgccctatcttgcccagatcggcagtgttatgttcgtcggtctgatcaaatcgggcaaaggggtcgactggcgcgtgctgctcaacgtggccctgtcctggctgctcactttgccattgtccgctgtattctccgctctcataatgttggcacttaaaatggcatttctgtgaaaaatggaaatgcctttgctttgcacttttggcacttcgcaactttggaaaaagattttcgtcctaataatttgttattttgtttttaattgtttacccatgtgaatgttgttatctcttttgtatttttaattgatttttaatatcgaaattaaataaacatatttttcgaactttttgatgacaaaaatttatttgaacattaagcatttgcactttctggcatttaaattagggtagtgcgggaccgggactgggccgagccgggattcccgatccccgataggacaaccgggaactataattttaatgatcgcatttattattttttattgttattattaaattcacttacaaacataccaagaaaactttgctaatttaatatttgtttttccaattaccaattaaataaatggcaataaaattagtcgagaatttgtctcgaccaatttaaagaattttaagaaaataccaaacaaatgggcattctttcttttaaaacatttttcgttctttttacaacatcacttttcctttttaatttatattcacataacattttgaactttctcacaaaatgattgttccttttatagtaattgcctaaatttcatgagaatgaaaagcacggcaaacacaaaatcaaattcattttgaagcattttctctcaccgttttattttcgcctttccgtttttctttttaattattcattttcatttatttgttccaattaagttaattggtgaaatgagctccaaatggcactgtggaaactgcttgctttaacaaaatattctgtacatttcatttataagtcataaaaaaccaaaatggcacaaaatgatgacggcacaaatggcacaattttgtcgaataaatcggccccaaattcgatggatttcgcgtcgttgacttccgaaaatgagtcgctgcttaatgtgttggtcggttgtgctatgatggcactttcctcactttgtttggctgccaattcgctggtcgttaaggttttctgtgcgctttcaaagtcaatttaaatttaaacattttattgtttccttttttagaccattgttatggacaaaaatttgcggcgccaaaacagttacaaatttatgttggcactttgtctcgtcgactgttctcaatcggtcgtacattttatcaccggatttttcacaattgatcagagcaatttcgaccagtttctttccgaagtgattatcgtttacattataattgttttttctacgattccttaaattgaggcgctcggagtcatcgcaacgccaagttacgtgttctacgcaattgtcacaattgtcttggccatccatcgtttgacggtgatcagctcgtccgtgtacttggaagagcttctgttttccacgattggcgttaaagtgaaatagcagaaaataattaattatatatttaataaattttgaagggagctctaattatgcctttttaattaccccattggctttag

SEQ ID NO: 24034 - DNA, 951 bp, Heterodera glycines
aaacaatttcatctacgttttttttatttacaaaatattgacaaagcctaattcgtttttatggatttgtaaaaaaatcaaatacaacaacatttaaatggctaagcccaacatttagatcgcataggtaatcataatcacatcaatcaatcaaccatcgattcatttcttctgctctttctgatcgccactcgcccccgggaaaccgtcgagaagactgaaaagaaaaacaaaaataagcatttggatttttaaaattgttaatcaatcacccatcgccgatgagaaaaatgttaattcgattccatcgtttgtccaattccttaatcatctgctctctcttatcatcgggcgcaattggacaacgaatgagggaaaaacaacttaaatcttcttctacatcttctttgtacatttccaatttctctccagtcatttcgttggtcagtttaaatggcacaacggcagaaagcgaagacggcggcggaaagtaaacagtaatgtcgaagtaaacaggagaagaagcattggaaaatgcctaaaaagataaaacattaaaataacaaattaaattggacatcaattaaataccgctttgatttgttccacggctgccaaccattgctgctccaccgctgaatcctcaatgcatattgtcagctccttcatcaaattgtcaggacgaggcaagaacagccatttggtaattgcttggccatccgacgcattggcactgtcatcaggcggaaattcggggtaaatggggccatagaaagtgacagagatgagagattgacaatcgtttagcattgacggggccaattggcgaatttgacgacggttgaagtcgtccaaagacatctcacggatggtgtccttgagcattggccaaatgttgagcagaaggaactccgaaacccgaacattttcagtctcaacttccaattttgt

SEQ ID NO: 24035 - DNA, 2756 bp, Heterodera glycines
  unsure (1)..(2756): unsure at all n locations
cggaaatggtaatgacagaaatcaagcccaaagtcaccaattaatgcagaaggacgagggcgaagaggaggaggaggaaaaagaaaaaggcggtggaagcgaagcagaaggggaggaaggaggggacgactgctcattcgaaaagggatacgtggccatttcgctgtactatttggacggaccgatgagcacggtcaatctgaaggcccaagtcaatcggaagagcaaaaacaaagcgagattaatgagtcccaaattggcacaggtgcgaattgccggggagaggcgcaatttggacgacaaacaaacgctgctcgaagaaagtgggcgatgttggcgatttacccattcgaaagtgtgcagggaacgctttgtcggtgttccgagggcacgaatgcgaactgtccttcaaagaccgggcacatctgacggagtacatccgccacaaaatcgggctgcccattcgcctctctctgctgctcgaaatggacgcgcaactcttccggacggacacttatctgaacgtcctttcgcccaccccttatcattcctttttgacagcaaattaccgggcccgaattggcagcaaagtttggaggaaacgatcaaacagaaagtgagtgagagagtgaaggctggtgagaggaaaagtagccaaggtacagggcgagaagtgcctcggatggccattctttggtggccggccacaaaaagttggacttggagacggtgttcatccatgtaatggggcaggagaatggccaaatgcggaggtgcagcgcatcgggccaacgaaatgccgaccccctcactgacgatggcattggaaaggaatcgggaaggactgagagtagagaaaagtcgacggacatcgaacatggcaaaagcactgtcgaagcaccccctctgaatgattcggctgaatttctgacgaattgccgacagaacaaacagtcgaatcgcccaccaactccttcttctgctggtgcgatcccaccaggcccttctgatttgttcaaaaaactattggtcgcttgctgtgatagctgcgagcgaagggcttcgctaatcacagttaggagaaacgccgaaattgagggagatttaatttggcaaattgaaagatggtcacaaaagcgaatgatgaggagggagaaacaaaaagagaggaaggggaaacggaagaggaggacagagagacggaagaggagaacaccttcgaatgcgacgaggaagccaaaacggaagtgcacgacactntggcaaatatgtgagagaaatgccggtggcatttttatgggcaaaaagcgaagcaatggcactcactgaccgatcagatcagtcaccaaattgaggtacttcaacacagttgtgttgcccgaaatggaatacgtggaggacttcgttgactttctgatcgacgccgaactcagtgatttgcccgtgctgaaaagagcctgcgaaagatacctttgcggagaattggactcggtcagtgagcagaagcaaagcaaatgaccaccggtcgaccaaagctcaattaaccaaatgaaaaatgcccccaggaaatttcctcccctcaagtcgaatttcagaaaaaggagctgatgacttcccttattctcgactttttcttcattgcgatggttttttcggttgttgaatttgtcaaaattgtttaaaatacatattttttcctctttatcttcccgttatgaaatcgatgactttgaccgaattgtgtgaccgatacgccgaattggaaattgtggacaaactgttggaacaagaggagtacaggtaaaaacagaaacaaatgaatgccaaatatgtaaaaaacaaaaaaagaaatgtggacaagcgaattcgccaaatatgcggcgaacggaatttgcacgatttggtggacgaatgcaaacgatttcgggagcaatgcacgagagtgaaaaaagtggagctaaacaaagaaaaagcgagcgaaaaagggggcgaaggagaagcggaagcgaaaaggcagcaaaaagacaaagggaatttgggcaaaaacaacgataaaagcggctcaaatgaaatggaaaatcagcagcagaaaaatggagggaatggcagcacaaattgtaagaattgaaagtcggccaattccatccgtacattcactcattgtccttcgtctgttcgttctgtttgttgccctgtgacaagagataaaatgtgcaaagaaaaacaaataaataaataaacatttaattaaagttgtgggtcactggacgagtaaagggcacctcatgcctaatgaaaaactaccttagaaaaatgtttttgtttgtaaatttttatggggggatgggtgggcgtttaacggacaaatacatcttaaaaaaatctatttttactaataaaaatgggaagcgataattgggatttattgcgcgtggacaatcataattcattccctatgacgttacggtaataatactgtatctcttgtctctcttctccccccccctctctcccttttcctctctctctctttctccctctctctctctctttctctccctctttctctctctcattctgctgttttttctttgtgttttccgttgtttccttttctttaagtgctttttcatgatgtagtgacttgtctttttttcctctttagcgtctgttccaattntcattntctctcttttttaatctatcgaaaattcgattattttattttttttacgtctgatcatttcacatttttt

SEQ ID NO: 24036 - DNA, 1433 bp, Heterodera glycines
  unsure (1)..(1433): unsure at all n locations
attcaaatcattctaataacntctggtttaaattttgtcaatttaaacgaaggcttaaaacgtttgaacgcgttgaaattgttgtaattcccggggggggggggtgagacagttcagttcaacatcagctgctctctctttaaagcggcttgccatcattagttcggttccatctctttcagatcaacacactttccgccctcccatgcggtgccgcgtccgtccgcctcaatgacgcgttccgctgatgcgtccgtcatctccggcgtgccgtcggttgaggcgccgcatcgcatttcgctgtactcgcgcgaaccgcgacgcattggactgccgaccgcctccacagcaacgacaccgacaacccggaaatcaacatcaccgacggcgagctgaacaacgagcgcaagcggaaacagccgaaggcccgcacttctccaacggcagccgtcactgccgtcatcagcgcacacgaaaatgtgagaaaaggcagaaagagagagagagagagagagaaggggaagagagagagagagaaggggaagaggcagaaattcaaatttactttcaaaaatccaggaaaattaattttatttcctctcaatttatttttcgaaattttgcaggctaataaaggatacatagggctatcgaattacaccaacaatgttggtagacaaataaaaaaagttatagccaaaaacttgtgctcgtacgaaaacgaccctggcccctactttatcattcctttttgcttttctttctctgtctttctcttctttctttctttctctcctgactctctctcttttctctcatctctctctttcttactctctcttccaccaccctctctttctcttctcccggtcggggaccggtaaattggacaccagaaaattggacaccaagcggaaaactggacaccgccggaatttggataccaaaggaaaattggacaccggaaaactggacaccatcctaaaataaacccaggaattgagttgaaaaacaaatttgggtagggtaaatggattaataattaaggcacttagaagtagatcaggcattcaacaagcaagattattgatcaatgtgccaaaaaaatgcaagaaaaagggcaatgattggtcaatgtgctaaaattgcataaaagatgggaatcctatccaaaagaaaacttttttctttgtggatgttatggttgttttcttttgctgaagttttatgtaataaaaacattatttatttccgttttattacgcttataaaaacataagtatgtgcagactaaataaaatcttttggccaacccaaattttttgttttatttatttatttttatacgatagtgtccaattttccggtgtccaaatttccattagtgtccaatcttctagtgtccacttttcggtatccaatttaccgggagc

SEQ ID NO: 24037 - DNA, 1022 bp, Heterodera glycines
ctgtcctttgccttcttcacgctgtccctccttcacgttctgcttctctctactctccacagaggccaagtcccgcctctttctttttgcatgtcacactgccccccccccccccccttctttcaatccctttcattttgcgcctatttctggccattttcccatttcgtttgtttcggtaaacaaaaaaaaaattcgggaaaagcttctcctccctttctgtgcgctgtttaagcaaatacctgaaatacttttacgagtagtcctgaagttccaatttatctttgaaattattctaatggttttctttttccataaaatattctcttctgcctcccccctccccctcatttccttctccgtctcgcgcgcgctctctgtctctcccttttctctcctcgttctctctatctctctctctctcttttctctcctcgctctctctctcatcccctctttttccccttcctaattaattttactcactttctctccacacctttccattaatctccctttgtttttccactttgcgtgttgattcagcgatttttccgcatccattccactgcccttttaaattattgggataatttcaataataatcatataataatcgtataatagtaattcatcattatttctaaatcattcctaaaatttcttcctctcctcccttttttccttttgcttaatctttctttggccactaacaattgctatttgattattcctcctcctcagctgctccccccgacctttggtcatttcgcttttttcgctgccctttttccctgcaaaaaattacactttttggtgagaaaaaggccaatgagcgaacggatgaacgaatgaatgtttatttctctttttttgttgtccctcttctgccttatttttactttatcagctgtcaccaattttcagtccaaagtccaatccgaaagacaaattgcaaaacgaacaaaaaaacgagcacagaactccatttgatacccaaaaaaggaatttgaatttaacta

SEQ ID NO: 24038 - DNA, 1877 bp, Heterodera glycines
  unsure (1)..(1877): unsure at all n locations
ttattntggatatctatatctaagcggattcatagaaccattcgacacactactattcaagtgtctaatattctcaaaaacatttatatgtctcgcatcaaatttcatgaacaaatcccttaattcctcaggaaaatcctgttcgggaatttcagggacaaaaactttaccatagtggcagcaatccttgaatgaattaccgcgtccaatcactttctcttcaacaaaatgcaatgcatcacaaaattcacatcgcatattcatttggctaagtctatgttcattagcattctcatgagatcctgctgcgtaaacattaactacaccttgtctaattactctatgtctaattctatcttgttctaagcgcaactgtcgctcaaaaacagatgcacttgctattgcaacacaatttctatttctcatttgttctaaacgaatttgtctttgtactacagattcatctgctattgcaacacaatttctatttctcatttgttctaaacgcatccgtctttgtgctacagattcatctgctattgcattacaatttctatttctcatctgttctaagcgcacatttctggattcttgtgacttattatgccatctaatcctatctctctctcttttctttcgcaaattctcaagtctcctatcttcaaattgactgtcagtcatacgggatgaccccgcaacctcagcatccaaattcattgatccctgactgggaccaccatccacaaatctttgtctcttagcatagttatgctcttcaaacacatcataattcctaatatttctttcattttcttgatctaaaatctcaacacattcttcaacttcatcaaaatctaaatcataaacataatcataatctcgaacataatctaaatcgtttattgaagccataataataaataactgaaaattaattatttaaaataaaacaaaaagttgtaggtattgaaatgaaaatcaaatgaagaattcataacattaaatttattatttatttaaagtttttacgatttacgatcagtttatcactaacaaatccatgatttttttgaagagatccaatggtaagcccagtgcacacttcattgcttaataattatattggtctaatttttaacatattgcaaataaatttcataatcaagtcatagaacaaactctaatgtttatcaaaaaaatgacacacattattgtttcacactaaagtcacagaacaaacactattgttttatcaaagacataagacacattattgtgtcacactaaaatcacagaacaaaccaccaatgttttatcaaaaggcataagacacattattgtgtcacactaaattcatagaacaaacactaatgtttatcaaaaacatgacacacattattgggtcacactaaagtcacagaaaaaacactattgttttatcaaaaacataagacacattattgtgtcacactaaaatcacagaacaaacactattgttttatcaaagacataagacacattattgtgtcacactaaaatcacagaagaaacactattgttttatcagacataagacacattattgggtcacactataatcacagaacaaacactattgttttatcaaaaacatgacacacattattgggtcacactaaagtcacagaaaaaacactattgttttatcaaaaacataagacacattattgtgtcacactaaaatcacagaacaaacactattgttttatcaaagacataagacacattattgtgtcacactaaaatcacagaagaaacactattgttttatcagacataagacacattattgggtcacactaaaatcacagaacaaacactattgttttatcaaagac

SEQ ID NO: 24039 - DNA, 1348 bp, Heterodera glycines
aaaaaagctgttaatgatggatgatgtgagagaatgcaaaaaattgtgtaaaaacaaattttaaaaaatatttattttttttgcgttataatttttgagaattaagcattctcttgagaaggttaagatttttctttttgctgttttttttttgaattttaaaaactgaggatagttttgcatccatttttatgcgattagttaattaaatttttgcataaaatcagaaaatttaagaaatttgtagaaaattttgtaaaaaaaacaaaaatcatataaaactaacacttctaggtttttggaccgtaataaattctatttttaatatggccagttaaatttataattttttttcttaattcaaatgaatgtatagattttattttatttgtccatgcacaaatgcgcgaaaatgtgagatttgagaaaaacaaacaaataaacaatagcagcaaaaaaaaatttggcaggaaatgtaatcccaactaaagaatggaatgatcaaacagtgagagaaaaaaatgtgaccgtgtgggattgatcaggatttgatgaatgggaacaaagccaaaagtgatcgagaccgggtaataaaaattgtcgtgctaattcttgatcccatcaatcggctttgtttgttatttatatgtaattttcatactcggatttgagaagtgacagatgattttaatttttcattttcagctaattaaggttaaagcgagttggattatattcaaaaatttttgattgttaatgactaatgatctgtcccacgttcgataaacaatttaggcatgaggaaaaattgcaaaaattccaaattgattcgataaaattgaaaaagccatacattttctataataaacaaaaaaaagtagaataaaacaaatgaaattggaagggattacatatttggagtgatagaataatggtgtatgttttgtttatgtgaatattgcccgtaattatggtttgaaaaattgtgcaaaaaattataattgagagagaaagagagttttagaaaagaggaaaggaagcaaaacgcgaaagcagcagagcagatcaagaagaagaagatcaatattttgatcatgaaagtcaaaaccaccaacagtcagtcatccgagaaaagaaaggcgagagagagagagatgggttaaagaaccgctgatcagcagcaggagagcagcttgaggaggacaacaacaaacaacaacaacaacaacaacacaagtgtttttttggaatgtgaaactgatcagcttggcggagagtgatcaatcaatattgtagcgatcaaaaaatcggttttccaattgactggaaagtaaaaaatgatgcaaaa

SEQ ID NO: 24040 - DNA, 1892 bp, Heterodera glycines
  unsure (1)..(1892): unsure at all n locations
tcattgttgcatacctgactgaccctccttaatgtgcattgcaatttctccataattgtgccatttgccgggtctgtctcttttaaactgttcaaatttcggtacttctcttcccagttgattttcttcttggactttcattttatctttgtttttgctgaacatttttaccatttttttgaacattcccttcttctcattcttaatttaatattaaataattaatttatgctgcttatttaaaaatgaattaacacatcccggcataattgccccatttacttaaaacacattttatcaaaaaatcttgaaaaaagcattacaactcgaagaaaaaaaggtaacttttctggggcaaattaccacaaatccttagctttaaaattttggaagttttcattcccttagctgttaggttccgtcagcgaatgccaacccgcccgactcattcattgtaaatgtcctaagactcaaacggtcagtctcagctgttcgtcctcaactccccgtgctaaccatgctgtgctgctttgccattttattctgttgctgctgctcgaacacttcaccaatcaaatattcattttcgttcatttcccccacaaattgctcaaactctccccgatcaatgcgttccatttcgatcagttgcgccatggaagtgcccttcgcgagtgattgcgcttcactttccattgcgatcagttcggccaacgtttgtctcttttgctccttcgccatcagttggcctaatgtcgtcctctctcttatgtcaatcgatggcgaatcatttagcgttttgtggtgatcaactacataaatggtgtacttaaaacttttccgattaatatggaaaaaataacaaattaaatattattcattaattaaaaaattcaaaattaattctttcaaatattttattatgatttattccaactttacctttgtctcctgaaatggtttgggatgaaaattgggacaatagcagcgggatgacaaagtattttaatactcccattctttgagtgcttttaaattaatattttttaagagacattatattattgcccgtacattttctatttaatttatttggatcaaaaaatgttcaatattttaattaaaaatggcattttgtattttagaatatgtatgtcaccgtgtaattttgattatttgaaaacgagaatctcgggcaaaatattttatgtacattatcgtatgacgagaatctcttttgggcttttggattgatttgaaaaataaattaaatccgagtttggacatcggctaaaaaagcattcactgaaatgaataaaattgctaaatgaccgttatataagaacagcatctgttattgttatttctctcagcaaaaaaagccgaaaacatgggatcgagccgtgccatccgacttctcatactcaaaacatagccaataatattacatggcaattacaataaaaaacaaaaaatgctatatgtttattaagaaaaaaataataatttaaaatgatttggatgatgtcaaaattaaaaaatgttggaaaatgacgttatacaaattaatgcatacacacagctcttcctttcacaatccattaaggtcgataattattttttcaattcgacaattttatgttattttttaatatttcccaattaattaaacataatgtaaagatagtttattatgacaaatatatatttttttttttggaaatcgcagttaatagataaactattttcccgcaggcggcgcctatcggcaccactgaccattcaattctcttttaattttttaaattagcaagactaaaaatgaggcttttggcccanaattatgctaattggtcatcagantaagaccttttataatttaaatttaagaa

SEQ ID NO: 24041 - DNA, 1999 bp, Heterodera glycines
  unsure (1)..(1999): unsure at all n locations
ccccccccctcccctcaaaagggggttttatgtcagagagtttgactctaattttctggggggggactataattcaagaaatacggtatataccgacgcaagccctacccatgcaaattttgaaattttgaaattgtatttcattttgtattattcaaaaaactgtactttttcagaagggcttttggtttagtcgaataaacaatttgggtttggtttaaataatatctcttgaaattgaatggtttcccaaggcattgttttgcggccaaaacttaatttaaaactaacaaataagagataaaaccggtaactcagtgaaaagttagggaactatattatgaaataatctctcaaatttattagtgaatttgttatgattttataaaataaaatttctgctctatgagagaactattatttccacgtcccacattaattgcgaattttttgtaattatatttttgttcaaaaaagtgatctgcaaattaaaccaaaatccaaaattgaacagcaaatccagaaaaatgggattaacaagtcgaattaacctgtgagcagcagtaaaagctgacggcagcaggtcgtccgtccttttctgcacaattatccatccgcagataattggtaaatctggtccaattttaatagagcaggttactacggccaaaaacaatgtgaaggttggttggttgtcaaatgcacaaatttccaaagccatgaccgccgcggggctttgggcgaaaataatttcattttttttttgcaaaatcagcccatataaaagcaagttccttttgcaccacaatattcactcgaaatatttctctttgacagaattatttatttagtaaattcattaaaatttgccaatttcaaaaattatttttaagaatttaattccaattaaaaaaagttccttattttttttgttgagaattgcaatgctttgtcgcctcccttttgtctttggtttcatttccgttttgtttgtttcgaccattttggcccagtggtggggcgacatgggccccggcacagccgaccatcacacgagcggcaccattttacagcaaaacggtggcaataccataaggtgacatggacaaattaatgaatatttgcctaaataaatgcctaaattcttttcccttcagaagcgatgggcacaatgaatactattccaatcacaacgcatggaacaatccgagtaaaaacaattaaaataacaaataaaatatttgaataaatgtgccgatgtttttcgcagatgcttggaacggagtgcaatggcccgcattccccaactttggtcgtcgctaagaatcccaaaggatcgaattttgatcggaacagaaaattcgatggttttgtattaggctgtgtaataatatttgtatgtttttgcgattgtattttttcaattaaaaattgatgttaattaaaataattacattgaaattcccctttatttcttgtctaggctaaataaatttttttcattattgaaaaagccaatattgactgcatggaatattgatttaatgattttggcttttaaataattaaaaaaccaaacacatagtttttattttatatatttaatggtaatatgtttattatatatgctttaaataaagaaaaagtttcatcagtctttttctcccttttaaattctttttttaaatttatgttttctcaatttgtttttgttttaaatagaagacattatacattaatttttgtttacatttataattaattttttgtcaattgatttttcgagaggaaaaaagacttccatttccgtttttccaatcatgcaatattaatttgctctcataaataattagataatatttaatttcattttagcattttttaaatttaaattatgaataaaatatcttttgacaaaatgttattattacttgcactttttgtgttcattttcttcgggggagcattcgctgtggcattttttcaaaatgnttttaaa

SEQ ID NO: 24042 - DNA, 514 bp, Heterodera glycines
gaacgcataaattataaataaaaagtgattgtctgtatagagagatcgaattattctaagttaaaaactggttcattggatttcatgtgaggcaaatgtctttgtccactttttcaggttggtatagttaattttcaatttcatagcaagtttttcgtcactaatttttggagtgagttctttgatttcaaaatattgctccatctttcttaatgtggcatcattgatatagatattcataggtaaaaacaaaaatttaaatagagatagtgttcgttcccttgcttttcttgtaatttggccccaattcgtttttagcagttaataaatcatcttttaaaaatggcgcaattcattcacaaattctttgtgcttgtgatgttcataccctccccctccccttatctcactccctgtcccttctctcttctctccccctccccctccccttatctcactccctgtcccttctctcttctctccccccccctccccttatctcactccctgtccc

SEQ ID NO: 24043 - DNA, 682 bp, Heterodera glycines
gtagagcccggatttttatgtttttacatatttttttacggcttaattatggcgagagaagcccaaaaaaagcattttcaaaataatttttgcattagagcgacttataaaaatataaaaacacatattttggccttttggcacataaaaacatatcgcacatacatatttcggggttggcacatattttgcacatattttgacattttgagaaaattttgtaggaaaaacagaaaaaattgaaaaatacactcctaaaaatcaacattcttgcaattgcttacaacattttcaaattttttaaaatttatttcaaatgccgatagtaactaactcaaattcttattttgtcattggatttcgaaattctctgctggagcttttaatttataaaaatttttaactgaaaaaaatatcaattttactttcgaacaccttgaaatgtatttgttttgcaattgttcgggcgaaaatgataaaaaaataagattttttggaatttttatgcaaaaatgcccttaatcccgcatttaaaatttgcgggatcccgcgcgggatttcgagattttggaaaattcgaaaaatttcaattaaatttcaaaaaatttccaaaaatcaaaaaataccttggttgagaaagaaaaaagttatggtccgaaaatttattcagtgattctgtgta

SEQ ID NO: 24044 - DNA, 2176 bp, Heterodera glycines
  unsure (1)..(2176): unsure at all n locations
atcaaataacacagattttttccagcatttaaagatcaactattacataattttgcaaaaatgctaaaaagcctctgctgggggaggggagaaaatttatgaagctatccggaaatcctgacaaaaaaaaacaatttaagccaggttatgttgggggaaaactcactcggaaatcctggggaaaataaaaacgaagtcgaaaaaaaacacatggaaaccctggggcaattctctgggaggcgggggaggaaggaaatctgattaagccttcgggaaatccactaaattgctccatcgaaatcctggtacctaatttttgagcccggcctaagtatgattgaacagatgtggccacaaaaatttgaactgctggaccgtcaaaagaataaatttccccggccaaaaaagccataatgggcggactcgatcagttgggcgccggcacgtttgtgcccgggactatgacttttttcattcttaatcaaatccaacattgttgatatcattcgatagccctaagtgtcctctattagattgcaaaatttcgaaaaaatttcgtcaattttgaacaaacttatgattttgggggatgaattgattttttgaaaatttattaaaaacaattaaaattttcaaaaaaaaaatttctcgcctataggcactgccgacaccctctctccaaaaaaaaaatcaaaaaaatttttggctgccgaaaaatcaaaaaaaaaaaacttcattatccgccgtccctgatcaccacaacacatctcggaatcactagaggaatatggttcaacaattcaccatcattttaacacacaataatgatcagtagtgatcagaaaagaattgttgataaaaaaacggggaaaaaggggaaaaaatgtccccgaattgggcgcgccgtccccgtccaaattgtgccctttctcctcaagtggaactgctaaaataaattggcgcggtgcgccgccgcgccgcgcgccattcaatcgaacgacgaaaataaatccgtcacagaatttgtgcgccaaggttagttatggggggggggggggacagtcattcagcgatcgtgaccattaaatttggttaatttttgaatggaaaatttgggttaagagcggcggcacgctgccccgaaaatgtggtgcccattagacacaaaatttaatgggtcaatatgtttttaaattgtttgtttatttatttttattttagaaatttcataattttatttttataaaaatattaatttattaattaatgaaagcatataatttaaaatattttgaattgttttcttgttatataaaagcaattttcagattaaaattaaaaaataaatttaaaaaagtataaataaatcgcgggtttttatattttatttgaaaagtaagtaaatcattttaataatttcttattaaaatttggttcaaatttaatattttgggaagaaagaagcaatttttataataaaattcgttcgtaaaattaaaaaaatatatattgtaaatttaatatattttaaattgtgaatttatttaaaaataatataatcattttaatttaatgttagaataaatttaggtatttaattgtataaattcatttatcaattatataaaattttaatgcatgaataaatatgttttatatttgttattttttaattaaaatattaataaaaataattaaagctacaaaaaaagaatgcaaaattatgaaaaaatttaaattaattaaaatcttttcatattaaaattcatttcgcgtgacataccggtttttggcagtgcatcataatacaaatatatccaaaaaatgtgatagcaattagtggcggggaggaataaaaaaatctaattatgattatataaatggtggaaggtcatgagaagaaataattggtgcggcgaaaattatgtattcttttctgaattggattcggcatgatcaaaaagcgtttatgaaactaattattgttttatttatggaaaatgcgaaattatatggtttaaaattgaaaaaagataattgttagtttttaaaagttattttaaggcaaataaattgaaaaattaatgaaaatttgtattaataatataaattaaattttattaaaaatgtgtgaacaaattaaaanntattttttgtcatgaaaaattctattaat

SEQ ID NO: 24045 - DNA, 1520 bp, Heterodera glycines
cctccgactcttcccccattttattgttgcggttttaactttgtgatttgtctccgtcttggaaatatttgtggaggagaagcagtgatttagccccgacccaaacagcatttatttagcacgctattctgtgttatttcgatcactctaaattgaagaaccactcaaactgtggattgaatcatagacattgagtttattaaaggcacttccattaaaaaacaattagtaaaaatctgaacaaaaaccgatctaataccctttaaataattctaattagccacaaaagaatattaagagcctgaaaatatatagaataaatacgaaaataactaaagaaaatatgagtaaattattattgatacataaatacacacaaaaatgctagtgaattttttaatttagttaatcgaaataattaaataaaaaaacagaaatgacaaaataaaatttatttttatgaaaataaatgtaaaaaacgaaagttcactcatccttatttttatcctaaaaccagaggaccttgaatttttttcaacttaatatcattaaacacaatgtctaattatgatataatacaaattcagcaaaaatataaatataaaaataaaattacattacatttataataataaccgtatcttgtagaaacaaatatttgaccagaaaaaaataaaataccaattaataaaaataaagtgcagtgagtaatatggtttctatgaagaatccaacagaaatattttcattatatcatttgaaattaaatgctccaaatattaatggccttaaaacagaaaaaatttagaatattttgtaaataatgaaaaaaatcatttttttgaaaaattaacagcataaaatgttataaaacaaaaaagaaaataagaaaacggtgctaggtcgtttcttaaaaactgccactatgggcgtttcttaaaaactgccaagtgggcgtttcttaaaaactgccactatgggcgtttcttaaaaactgccaagtgggcgtttcttaaaaactgccactatgggcgtttcttaaaaactgccaagtgggcgtttcttaaaaactgccaagtgggcgtttcttaaaaactgccactatgggcgtttcttaaaaactgccactatgggcgtttcttaaaaactgccaagcgggcgtttcttaaaaactgcaaaacaaatatatttatttattaaaaaatgtttatgtcagttgtttgccaacgttataaataataaaaatatatatacatataatttttacatcatttgtttgccaacgttataaataataaaaatatatatacatataatttttacatcatttgtttgtcaacactatcttcaacaccaagctcagtagaattaaaatattaataaatttattgcttctgatgattgtagttaataaaatttacaaatgagctcaacgatatatttaatattttttcttgataaattaattatttaaaatgattactgataagcttattataattaaaatttccctttgaaag

SEQ ID NO: 24046 - DNA, 1512 bp, Heterodera glycines
ttaaaagattccaaaaattctgaaccttaaaataggcatcataatcgtactcagcacctcaaaatagcccagaaaaaaaattgtcacccccattttggcccacaaaaaaaatttcgaaaatttctagggggcctagctcgaaaatttttgaaattttccagacttatagtacaccattcgatagagtttcgaaagctctacaaaaatgttctaagacaatttttcgctaaaatcaactcctgacgagttatgggcccgggactcaaatgtcccgctgaggccaaaaaatttttctatttccgggaaaaaatcgaaatttttccgaaaaaaataccaatcgatagagctcgaaaaactatgttttggaagtggtctccgtttttctgggaaaattcgttaaaaattcctaaaattcaaaaacccgaaaaccgttttttaggcctagctcgaaaaattttgaaaattttcgaaatttttaaatttcagaaaatcgagctcaccgagctctacaataagtctgctggccaccctgcgctcaggtcaaagcctaatgagtttattcaacggggactgaactgggcaaagttggtactgaaaagttgccaatttctgcagcccttccaagtataggtagaggcctggaattttttttgaaaattagaaaacacttcaacttaaaatcctaccagcaagaattttccgctccctgtcctttaaaaaaagttacgggccttcaaacgcaagcaaaagtgagaaattagccgccgggactcagttggccaccgaagagaaaaacccgtatttttcccagatgcgcctcaaaaagttgtaagacccttccactactttcagacccctcccgacagccgttcgactcaaattagtttttaagacgagtccccctttttctctatatatatataaactagcgtgttggaattgacgggggcggcgtaggcaattggcttttggatgaagagaaaatggacatgctcatttgttattttaaaacatacaaaacattaattgcattagtgtgctgttttaaagcgctatcgcgctatgggacgcggcttcgccgcgtcgctagaaagtgatgttatttagcaattcatcgcagcctcaggacgggcgcttcgcgcccgtttttaattttgttgagaacattcgccgcttcgcggcctcaggacgggcgcttcgcgcccgttttttaatttttcgggtggcattcggccgcttcgcggcctcaggacgggcgcttcgcgcccgttttttaattttgcggggaacattcggccgcttcgcggcctcaggacgggcgcttcgcgcccgttttttaatttttcgggtgacattcggccgcttcgcggcctcaggacgggcgcttagcgcccgttttttaattttgcgggtaacattcggccgcttcgcggcctcaggacgggcgcttcgcgcccgttttttaatttttcgggggacattcggccgcttcgcggcctcaggacgggcgct

SEQ ID NO: 24047 - DNA, 1970 bp, Heterodera glycines
  unsure (1)..(1970): unsure at all n locations
tcattcacttctgctgctgatcacttgggccgggaattgcgcgagaagcctgaaaatagaaaaactattataaataagaatttttgaaaaatcattcactgacccgtctccgatttgttcctcataaaaaatgtgaatgtcaattctgttccattgataataaatttcccaatcaatcgcttcctcctcccattttgcccatttgctcgcatctcgcgcaattggacaacggaccaacagcagcagacagtcgtcgtcgctattgtcaattcttttcagtgtcaattgctcccgagtcaattcgttggtcagatcaaaaggcacaagaacgaagaaagcaacggatgaaggaataaaccgaatgatgacaatgaaattgacgggggaagaagcattggcaaaagcctaaaatgtgggaaaaaacgaaatgaatgacaattttacagttgggaggaggacaaaaaaaacaaaaagatgagagaacttttacggttgagatggaccaatttgggcataaaatttttaaacgaaacccaaaagaatgtaaaaagccaaataaattattgaaaatcaccgctttgaagtcttcaatattcgacgccaaattcccgagatccatttccaatgcgcattggaacacttttggcacattgctttgaagtggagtgaaaagccatttggccacggcttgtccattcgatgccatggcattgtcaccggccggaaattcgatgaagtgatcggcgacagaaatggagaaaacacgaagtgatggaaaatcgttgagaattgacgggacgaattgccgcaaacggcgaaaaacatccgcagataattccaagccataaatgttttttccgagcattggccaaatgttgcgcaaaatcgactccaaaatgcggtcattgtagtacgggtcgatggtcaaattaattggacaattggtgaaaagctggcaaaaacggcggagaaaagtgatggcatttcggtcaatgaaactgaaaataaatagggaaaatttgtataattttttagcatattcgccaattttacaagatgttgatccgttcgaaaccgatgactttgcgtggcatttcaatttgcggaattggcaatgcttctccaccatcagtgacaatttccatttccttggtgccattctttccaattttgctgtgaatttgaataagtgccaatgtccatctgcgcgtcttgaagtgttcgtccacgtaaatgtcaaaacggtgactgatcatcgcaattccgtggccaagttgtgaaggcgtaatcaaaccgaacacacaaagccaacagtcggcggagatgaaactgaaaaattaaatcgacgttttgaaatttgtttatttttttacattttcttttttggttttttgaagcggtcccaataaagccaaagaatggcacaacatccgacaaacccgacaaacaatggcacaacgaacagactaaaacaaaaaagagaaggaaaagggtaaatgttgagaagaaatgtgaaaaacgtacagaatcatttttaaaggaattgtcagagagaaaaagttggagagagagagacgaagcaaataaatggcgaatgaataataatggaaggtggaggatgaggagcaaccacttttatactaatttttatgctcatttgtacgcttttgcattttccaattttttctcgactataaaagccctccctccctcccccattttttttcattcactcactttttttaacagtgtatgaagacaactttaataaagcataatttttttgttcgtaaaaagcaaaataaactttgtgtctccgaatactctaaagtttcaaagatatttaataggtatgtcttttttctaagcacctaattaacctataaagatgggcttgaaaactgcagaaaagtcagaatttagcctatgttggctctattgcactttatgagtcccaatcaaantattta

SEQ ID NO: 24048 - DNA, 1639 bp, Heterodera glycines
tccttgttttactaactcctccctcaaaaattacggggcttaggtagcaaagactggaataccggtagtaatacatccaattcaatacacattccccaacacatacctttgtgcgcgtccgcaacactgcccacttcaacagtcgcagaatggttgatgcgcatgtgctgtttgggccgggtaacgtcaagcacactgatgttggcaatgtcccaaaaaatctttgtgatctgacaaggatgaaatgttgaagtgttgcagtaacaaaaagcttttactgtcgccagtaaaacgcttactactggtcaaaaaaaaattccaaaaaagctaaaggcctgtcagttttattgtaacgacgacaatgtcaatgcttcataacttttcttcaaacactcggattaaaaaccttattgctatcattcggatcacaatcagcaaacagatactgaaaattcgctttttcgaattttggtaatgtttttgaaactgagtgtaccgacccattttgttcatgtgtactactatataaatcgattattaaacagcaaacctcttcgacagaaagcaatggcaatttcttgttcttattttcaatgccgtcgacgaaaagtattgtggacggaggaattggaggcaacttgttcattagaggctaaagaaataagatgaagtgccgaaatttacaacacaaaagaaaaccacaggttggcgattaaatcctgggcgtccactgaaactccgagaaaattcgcgcggacccctcacactgttgttacatcccgaaccatcagtagaattggtcatttttgcttggctcggagcccagccattgttgttacatccccaaccgtcagtagaattggaagtcatttttgcttggttcggacgcaacgcactgttgttacatccccaaccatcagcagcagaattggaagtcatttttgcttggttcggacgcaacgcactgttgttacatccccaaccatcagcagcagaattggaagtcatttttgcttggttcggacgcaacgcactgttgttacatccccaaccatcagcagcagaattggaagtcatttttgcttggctttgaccccacccactgttgttacatccccaaccatcagtagaattggaagtcatttttgcttaatcaaatcaactttaatttatatatattatacagaatattgttcgatagtgatcaatcagtttgtctggccagttccatatgagataaatttttgggcgctaagaaaagggttcccacttgaaaaacaaaacaaaaatttacatcaaaaaaagtgaaaaaatttccaagtgcgtcactatgggtcaagcccagtgtcactatgggtcaagcccagtgtcagacaaaattgctcataacgccaaatagcgcatttggcgtaaatttttgcgcgctatttcaaaatttacactggaaaatgccttttttgtattttttattttgatctgccataactcgcttcattcccaattaaactgaacaaatttggtatctaaaaaaagtttttgaaaaggagaatctttttctaagcgaatgctaagcaatttgacatctcagaaaaaagttgtggggatttcaaacttttatcatgttataacgcaagtccta

SEQ ID NO: 24049 - DNA, 1423 bp, Heterodera glycines
tttttgttcaacaggtgttggggtcacttttgaaaaattgtaattttttccattttccaaaacaactcctgatcaattggaaatcttttatgaggaaattataatatattaatagtggaaaactttcaaatttaaaaatgcaatgttgattttgatccccttcaagtggattggttcacattttctcaagaattgcacgttcaatatggtggttataacatctggcgcggatttccttatcaaagaggggcaggtgttggttcagtgtttagaagtttcatgcgatttcttttacctattggataacaaattggttcatcaattgcacggcagggactagaaagcggaaatcgagtgttaacaaatgtattgggaggtaaagatctaaaggagtcactcgtaagtgagggtaaaacgaggcttaaaactctcctggaaaaggcagcaaataatattgaaaaacaaaaaggacaggggtttgattttaaacgttataaaaatgaaccaacacaaaaagttgggaaaaccaggcgaaaaaatataaataaactccaatctccagttgggccaccattggtatcattccatgaactcaaccattggaatgagacctgtagacgtaacctttgcaaatgctgaagaattgagaaaaaaactatacaatgaagcagctaaaaaccctagaggaaatcccaaatttcatgttggagatcgggtccgaattgaaaaacacaaacacgtgttccaaaaaggttatttgccccggttcaccaatgaaatatttactattacggaagtacattctgagagatcacctattgtttacaaaataagcgacgataataatgaaattattaagggatggttttatgcaaatgatttatgtagaatttttgaaaatgataataaattgtatgacattgaaagaattttgtcaaaaaagaaaagaaaaggtgttgaacatgcgttggtaaaatggaaggggtatagtccccaatttaatagctgggttccattaagttcaattactgtgaaaaatatataaaaactcttaaaaaacttttttttttaataaaatgccttctaattcgttttatattgtactcccatcaaatacaaatgttgaagggaacagaaccaattcttttcggacacgtataccacgaaaactacaattcaacacggaatgggaagtaggcctcgctgtaattgtttatccccattcttggccttcaatcggtactgcacaacaacaatttgttgaaattgagtggcagacaggaaaagcgttacgcattgaagttccaccatcaaatgtcacaaacccctacgaactaagcaagaatttgtacaaattattgggcgagggaagtgatcacttggcaaaacactgagaactaagccaaaatgctttcctacttgt

SEQ ID NO: 24050 - DNA, 1645 bp, Heterodera glycines
  unsure (1)..(1645): unsure at all n locations
agctcggtcagtgttcagatggcgtacccgctcgaccatgaaaaaccctgaataagaagaaactgcttgacgaaggtgacagacggacggacaaaggcggaattctaattttgggatttgatttgaaaaaaatattacagggggggagccggtcccgaaagttccgccgccgaaactccgcgagacataactctgccgaggaaaaaagtttcaaacttagaaatttttcaagaaaaaaaatcttaaaaaatattttcacagaaaacttggagaaaaaatattttcatataaatcgctggaaaaaatttttgaattttctcggtaaagctgatcccattttgcaacaaaaaagaaaacaacgtatttcgggattttcggggggtggtggtggaggaattggtcaattatttactccgtttgtttttggttgccttttcattacaccgattgtctcataatctcaattttcaggccataagtacgcctgctccgcctacgagctgtgcagcgacgacttcaacgtgttgaaatggactgctgccgcggttggctcacggacggactttctcggcacgaaggagcgcatcgaacagggcaatttcttcagggtcggactttgaattcttataattaaactaattaaaccaatgccattgtacaaaatcgcaaacagtttaatttacgaatttcgcataatttgtttaatattcttccaaaaatagactcatcgaattttgacaaaattttttgaaggttataaatgtgggatttgcatcagcgaaaaaaaattcgaaagtcggctccgaaattttttttttccaaatagcaaattttttgagttttctctgcaaaaaaaagcctgagaaacctgataagatttcttattttctcaaaaaaattttttcaggatgttctcgacaaggcattggccatcaacccggaggagtacactgtgagtcagaataatgggattggtccaacgactttctctctctctttttgttttttttgctcattgccccataaaattgccccgtcttttcgccatgcacgcagtcttcttttcctcttcagctgcttcacatgcgcggcaggctcgtcctctcggtggcttctctgtcgtggattgaacggaaggcggccaccgtccttttcggcccgccgcccgaagtttcactcaacgaggcgatcagagtgggtgcagcagcactgccaaattagtggtcggaaatgcttttgggcttctcaaactcttcctccaccgcatgccgtgccaaaaacgcgtttaatggtttcccacccccttgaaggacttcacggcggtgttggagttggcgccggattggctggagaacactctcttcctggccaaggcgtatttggccaacagcgacagggaaagtgcggtgcaccatttgaaacagctgatcgattcctaccagcagaacgaaaacgacaaggaccagcccgaggcactgaaggaggccaaggcgctgctcaagaagcacgggagaaaatgacctcaatgaaaatcacccatagatcttcttaatggactcattanaggatttgcataatttctaatctgtgccacatttgaatatgtgactctcactanatttaatttctttttttgtttgcattc

SEQ ID NO: 24051 - DNA, 1393 bp, Heterodera glycines
ggattacccatgaaaataatttctcaaaacttatttttttttaattttttgggaccaataatctttaccattgccaacttcaaaatcacataaaatactaaaaaaaatattattaaggccctttttggtccaaaaacacaaaattcgaaaatttgacatttcgactttttgttcgagttcgggttcgggatagaaatcggtcgaaatggatgccatattcgtgatcagcgacctagaaaaccccaggacacttgttttcaggactttttaaaccaaaaagtttttgaaaaatttcgacccaaaagggggacccaaactgaaagagtacccaaaaaataagatttttaacaattttgggtaggggggtaaacccaactcatccaaacccaactcatccaaaccaactcatccatacccaactcatccatacccaactcatccatatacccaactcatccatagcacgatacgagtcgtcgccgtggcatttaatgccacgactaagaccgtacaaccaaaaaatactacgactaagaccgtacaaccaaaaaatgccacgaccgagaccgcataatcaaaaatgtccacggtcaaggccggcataatcaaaaatgtccacggtcaagaccacataagcagaaaatgccatgccacgacgatgactcgcagcgttatggatgagttgggtatggatgagttgggtctatggatgagttgggtatggatgagttgggtatggatgagttgggggtgactcgacgctttaactctttaatttagtcatttaaaaattgtgtaattttttttggccatgaatctcacatcaaaatgctttttttttgatttaacaaattaggtaggtacgcttttgtaattttttaaatttgaattcacggagttttcacttatcacttccgcacaagcggcgtcaattggctcttaggaggcgggtgtggggaggaggggagaagggtgcctcgaagcggaccatgtacccgtacgtatatgtattacaaccaatttgaacatgcctatctatcatcatttagataaataaattcaaatgtggcgaaagattggcaggcgccgaggtgacgcggctccgccccctcctcagcccttcctttaccctctcttaatacatcattcattcatttattttgatgtttatttgaaatattctttggaatgggattagtgactgactgactgttcgttcacctttccctttctaattttttatgacgcggaacaaagtttaaaaaattatgcgggtgtgccgcgatacgcgttcatataccatccttttgatatgcatatacaacaacaaattgacaaaatccgtattacagatttaaagtattttttaacatcttaacaccatgtcccctta

SEQ ID NO: 24052 - DNA, 1838 bp, Heterodera glycines
tttttttttgcatatccactcgtacgaaaacggcggtacgaaaatgtcccccgtacgaaaatggcggtacgaaaacgtcctggcccggtaaatagtgctgctcataattggttgcctcacacgaaaaagggtgcaactttgatcatacggacctcaatttcgaaaatctatgatttttaaatcaatgataagatcaagggatttttgcaaatccgatatcttattcgtgatcatgaatttcttacgcccgacttatttccttaaaatttcggaaaaaatcaagtactggatgaaaagtcatagacaaaatcaacgattttcagaatctgagctcagattcgtgatagtgcatttttagcccagaaaaattgcttcttataaaagcttactattttttccatcgggaccacaattccacaccattgccgaaaatctcgcaaaaagtcaaaataaattaaaatttagattagagcccggtaaaaaatttccggcaagggaatcaaaaaagggaaggaacgagattttgatttttttgaattttgttatttaaaaatttttttaaatatttgtgctaaattttaaaattcgaagccagaaattagaaagtattccgtatcatccccgatgtgtgccaacacccacaaaatgtcgtaagtgggaaatcggcattccgactcattgatatgcacgttgttatgaacgtgtatttgatgattagttatgaaatttaatttaattactctcttctataataaatataaagtctaatacgatttttttgtggtgatccagcggtgtcgacatgcgccactagggaaatttttgaaaacttaataggctcaatttgctaacaaatgtgctccaaaaaaagagaaacctttggttaatttttttgagttttaggccgttattaaaaaggaagaaaacaaattaccgaagctggaaaaagttactaaaattaaaaataattacagattattttaagaccccatttttaccaatttccacagttttgagaaaaaaaaattcgggaacgtgattcccgcaagttttattttattagccatacagggtcaatgcagttcccacaatggcattcatatatatttttataatttgtgcccgtataaatttaagtggtaaatggaagagtgaattttattacagtaattaaaaatttattgcgttatgtccgctaattcttttttgatcatcttcgactttcgttgttttttccatttgtggaaaatgaaaaaagaaagcgtgcacagcatcgccaataggaaaatgccgaaagcccaacaactgaagggacattggcacacagttttacgaggatggcctatcagaagagatccaaaaaagtccaaatcctccgacaaatatttgctggtcatttgatcgtcgatcagtactcatccctcagcaaatgtcgccgtcccgcaactttggtgataaaaaggatcatggaccagttattggcttatttaactgactttggtatttgctcagtccaaaatttcccggcgcatattgaaaagcagtgccaatttcatcgtattcaaattggtaaagaaaggttggcacatttcgccgtgaataatcagcagcgaacagcctttgacgcattcggacaatgccttcccgccgttttcatagtttaactgacagactaatcgacgacagtaaagcgcgaggcggaccttgtcgacccgaccagttctcgggctgagcagcaccgctccgtccagaaactcctttgaaacggtgcccgtcattacgctgtgcttgcccctgtaacggctcatcagattgaccaaagtgtcgttgattatcta

SEQ ID NO: 24053 - DNA, 2415 bp, Heterodera glycines
  unsure (1)..(2415): unsure at all n locations
aaaaaaataaaaattaaatcctttccataaaaataaaaaattcccccctcccccggcaagccggggcgggggcggctggtgggcatggcggcgttcccccatctcttccttttccggcggagccaatcctggaggtttccagtcatgctggagcctcgttgaggtcacaaatgacgtgggtcagattcgagccgagaccacagttgagcaccgggcaacgcttcaaagactagtaataataagtaacttaaaattggaaacttatgacaagaataagcccaaaaatggaaaagtttcggttttaatcaactttcttaaaattactaaattttggctctattgaattttttcttctaaaatgattttacataccctatttaatttttaaaatgtttagcttaaaataattaatttgaagaattttggaaagttttaccttcaattaaaaaaaaattgtgtatattttcgacttatatgcatattttgcaatttttggtgcatattttgcgattttatgtgcatataattccgaggcctaataatgagatacgtacataatttttaatcaaaaattctcgtcaagaaaataaataaatttttgagaaattttgcatttcttagtggtttatttttgaaaatgttagggtcgattctttggggtgtattttttagagctgagcgggaccgggaattttgacaaaaaccgggaccgggacttaccgggaccagaaaagtcgggaccgagacctcgattttcgcccgggaccgggaccgcgagaaaagccgggaccgggaccaaccgggacttttcccaagagaaaaattttttgaaaaaaatttgcaaaattctaaaaattttttgagaatttttttattgttttaatagattgaaatcttttaaattttttgtttttaaattactctttttgtggcgctgttttttcaaaaaacttttgtggaataaggggccggctgtgccgattggcgccgccgccgggaaagttttataatttttaatgcgaattgttaacagatttgaccacaaaaatgaccaaatatttggttaatttttgggtttttaggctgtttaaaaattaaagaaaaattaaagttggaatatttctttattaattaaatttaaattgaaatcatgtaaagataatatgaaattatatcccagtggggaattgaacccaagcgaaaaataatgaaagtcagaaggtttagccattacgccacataacgacataaacaaaactgggattcgtttttttcaaaaaccgggaccgggacctgaaaaaaccgggaattcccgccccggtcccgcgctcacaatcagctctagaatttttcgttcttattgcattttgttaataattttgggcaaaaacaatgtttaatttgagtgcttgaagaaagtcatgaagcgttgaagttggcagtttattttaaaatttttaatatttattatgtaaagttaaaaagagtaaatttaaaaattaaaaaaaatgaattttaggatggattgctaatgcatttcatacccgtggagattgatttaaaaaactggccacaactttgcttaaaaagcgataaatgttacatttggcatcgtttgataggtttgataacctcagaattaaaaagaaaatccacagatcccggcttttctgtccgacttaaactcccggccccgacaactcaattcataattaattgtaatttcgaatattcgcttaaatatttactattctgcagcttgattgtattgcagcgggggaatatattaaagaataataataaaattatttttaatttttatggcattgaaattgacaatcccccccnccccccccctcttttgcgctaatcaaataacccctcatccgcccccccccctccatctatcgctggttcgtcctgctgatgccaaatgaattgcatctgtcccgtctccccatttttccttccttttcagcccctcgggagatgggcggtatattttctgagtttgcccaaaacttctttcccctcattacatcacaatgccaatgccactaattgatttagagtaatgcgaaaaaaaggaagaaaatttgtcgcgttttggcggcttctgctcataattcttagacaacaaaaaagagttacctaaaaatgcgtggaccaatcgaaaattaaattttaaatttgcttttgttttttaaatgttcatttctgattcattgtttccttccattttggggcattgttttttaaatttaaactaattttgtcgcgccgtattttatttgacacaaaaaatcagattttttgtgtctctgaacgaagtacattcaattcacttgacactatttttctttgttcgcaatcctctgctgttggtgttcggcactttgtttcacccctttgggt

SEQ ID NO: 24054 - DNA, 2239 bp, Heterodera glycines
aaatccttgacatccagatttgcttttggtcataatgtttcaagaaattttaggattgattatatttgaccccgaatttttgactttaattctgttccatggcacaaatccgcgtcttttttttggcattttctccaaatcccccgccccatatcagattaattttttgttccgctacgaccgagttggatactccgaatttaaagaatattataaattaattaataaattaaattttacatcttccagtgcttccagccatgaatctggcgcaaattctgtggaaaatattttttcgaatttttaattttataattttcttgtaattttacttacttgaaaaaacttctttcacatgttttaatgtgcgtaatgtgatcatggatgatgcttgttgtgcaatgttgtcaatttgtgcagcgttcagtctcgggggaagctgaatatttttatggaagctcaaaaatttagcagtaataatttcaaataaaaaaatcgattaatttcattaatttatttttgaataaaaattttgaattattaggattaagaaaatataatttggggccaacttttatttcaaaattcagccaaaatgccaggcaaatgtatttttagtatataaaatttatttttaaaaaattgaatttttcgattaattaatataggaaataatattttttatttaaaataaattggttttacatatttaacgctaaaattagcttcaggcctcattttctgctgctggttaatcggctcatcattatctttggagaaagcgttcttaaatattaattaacattataatttgtttaataaatttcattatatttattaattttttgaaaatttttacatttgcttcattcagtagcattttgaggctgcagttgttgagtcatcttcatcggaacttgatgatgaatcacgcgactaaatttatcattttttaaattaaaattaatttttattatttaattatgataaaattcaaaatttctttgttctaatgttttacaatttttccagcttcatcatgggttgcatctgctgttttaacagtttgagttccttgaccatttgtagcacagttagtcgacttaattttcaaatttttattacaaataaatattatttccattatttattttaataattagatattaatatttgttactttgttagcaatgacagtcaaaagcaataagaaatgaatggtggcataaattttgttcatcattttgttataaaaaaaattttcaactgattcaatatggtcatattttgcccattaaaatatgggcagaaatctctttttttttattttcgttactaatctctttttttaataatggattaatggtcattttaattggaattatatttaaacaaaaatgtttttcatagggattaatgtgaaagagtaagcaaaagatttttcgtgttattacagataattagcaattaaaatacagtgaataaatatgtgttgaaattgaaaataatcatttgaatattttatttaataaatatactgtgtaattcttgagcttttgcttatttttttgtttattcatatttgaaatgttttaggaatttttcatatttaactgtgccttgtttaatttccgaatttagtatgaattttcatagaaaaaaccctggaaaatcaatgcctatgaaaaaccgaggcttgagtccagccaatgattttttcactataaagagtgacaatgaaattcttgccacaccaatttttatcaatttttgacaagtttccggagaaatattaaatgaaaaaaaaattttgttatcaaataagcacaacaaaatataaagaaaagtggctattataaaaattacattaaaatccgggcactaattatatcaatgccattataatcgacttagtcaattgatgcaaatttctttatccatctgcgcagagttcctaatttcttagcaataattttgtcactaatttttgattttcttctttaatttcaaaatattgtttcatcttttttaatttttgctcattggaatatgatgcttaaaactagagttgagcgggagcgggaattttgggcgcaaaaccgggaccgggaccttttcgggttgaaaaaccgggaatttttggctgggaaaaccgggaaaaaaccgggacttcggtactcagttgtactcagttgtccgtgttcaggtcccggtcccgctcaactctacttaaaacaaa

SEQ ID NO: 24055 - DNA, 2091 bp, Heterodera glycines
tgttgaaaattgtatggaagagggaacggtggagatttggaggttgaggatgaggagacggggagggggcaatctctgatcaagcgcttatcgatcgaacggctaattaagcgtgtggagggactgatcggctcattcgaatcagtcgccggtgccatggaaagactgctcgaattgcgagtactcacttcagaggacagttcagcaacagaggaagagatcgaacagttatacgaacagatggacaacacaaagcaaaagctgaccaaacagcaccaaaaagtgccaaaaatgaacggggaaaacggcgaggagctgcgaccgacgaagttcgaatatggcacactcagcagtgagggcgaattggaaggcagccgaatgtcggcggacgaaacagagcaacggcaggacatcgctgggattgctcactccgcgcgaccgccccggcgcaaaatgagtttgggcgagcagacgcggctggacacggtcactcgactccgttcatggcttcaggtggatgatttttgcaggtcaacaacaagcgaagttggatgagtttaggaagtggagagggacgtgtcggcaacggtggacttgtccgatcagcttctgatcagacagacattaggcaaagtgcaggtgcgcaactgatttgtccatcatggttcgtcccgcattttgcagaattgcgtggatgaaattcatatcaatctgatggagattgtccgagttttggagagtgccaaggatcggctgatcatcgaacgggctcaactttgcgcgacggagatggagcgcgtgttggccatttgcaaacggcgcaaggcggaattgcagcacattttggagcagtgccgcatttgggagcagttgcgctcctcaattgaactttggcttgctgatggtcggtttggagtttgaccataattgcgtcaaggctttctttagcgagtgatcgcctttgttttgggttgctcgtcgtcgaattgtcagatggcgaattgacagaacaactcgaactgtgcgagcagctggtggacgagctgaacagctggaaaagcaaattgcaggagctgaacagaatatccaatcagtgagaaaatggacagacaaatggacaatttggcgaatcgtttagacaattggacacccaccgaagggacaatggtcacaatttgtcgcatcaaagcagcaaactgaacgcccaatggaccaaattcaacgaccaattgcgaattcgccgcgccgttttggaggcagccaaacgatcgcggcacgactttcagacggcacttggacatttccaacaatggctcaacaaaatgaacatggaaatgcgcaaactgaacgaagagacggacaacctgcaacgactgaaggacaccgcgcgacggagggaatggttggcccaggaaaaggtggcaatagtcaaatgacaataagaaggcaccaaagcgataatataagaaaattaaaataagcggatacggtaattaccgtaaacgccagaggatgaacagtaattataaaaaacatttttaggaggcccgcgtggaaatcgacgcgcaccgcgagattatggaatcggtgcggcgcatgggacggaaacttatggaggagcagcaacgcgaactgagctcatcggcaggagaagagacaccgccgccgagtgggaacagaacgacggagcaaatgaaaagtcaagtggaaatggtggagaacgaatggcagtcgctgttggaacaggcgaaaagtgtgcgggacagattggaaaatgcgcaggaagaatgcgaacggttaacgtaagtcgtaaagggagtggagggaggagaacaatgctaattgggggtgataatgcttaattaggggataagacagtaattagtgggacaatgtttaattggggagaggcaaggctttttagtgggaatgtggcaggcttaactaatagagggcaattcgggcaaggcttgattaaagggaaatttacccaatcaataataagcagagcggcggttgcctttcagacaatctctgaccgacttccttaagtggaccgatcaacagctgaaaagcattgccgagtcaaaa

SEQ ID NO: 24056 - DNA, 921 bp, Heterodera glycines
agtttatgcatgggagacatgtggttcagcatgggaatgaggagaaaatgcgcttgtaatcagtcgtaaaaggaaattgagtttaatggaaatgtgggcagtgatgatgtaaggcaaaatgagaagggcaaacattcggtaatgagaaatgcaataaatatacagcagcacacaatgaggaaatcagttggccaaagaaatcagccaaacgttggcagtaataagcgcttaaatcaattagcaaatgatagaaacaagcagcagcagatgaagccggtgaatattgagcaacaacaattagttaatgttatgcaaaacaacgtgcagcagcagcagaaaaagcgtttggatgggcatagaaattaccatcaaaatgtcaagcgctggcaagcaactgctggagaaaaccagcatgtgaatggcaaacgtgccaaaacggtaaacaacaatggcaacaaacgaatgccaaaattcaccgaagacaaaaagcgccgcttgaaaacagttcatcacgtcaaatttgatgatgaaaaactgcaacatgtcggcaacctcaaacacaatgaagatatggctactaagaaggctgaaaatgccaaaaagcacagacacacaatgccagcagcaaaaagtggcgacacttttacagcacacgaagagcaaccattgagtttgctggataataatccaccagtgaacgaggtaaattaaaaattgtttcttattgataccggaatttcgcccaatctgaggaattttagaatttttcttttctttttttaaaaattatttctctttcttttaaaaattctacgctattttcattttttaaacggagtcaacggtaaaaggaaattttttataaaaaaacctagaatttttatgttgaaataataaaaataaccataattttacaggatg

SEQ ID NO: 24057 - DNA, 1489 bp, Heterodera glycines
  unsure (1)..(1489): unsure at all n locations
aagtccattagtagtgcccaggtcaccggctggcacttagccgctaatggacagttccattagtagtgctcaggtcaccggctggcacttaaccgctaatggacagttccaattaagccgcttcaattgtctggcatatagcaccagacagcgagcggttccggcatcctcaaaattcaaattttccattagtccttccatcgctccccccccccccccgatcaaccctgacccagacacatcaattaactgacttatgaatgaccgatcggttgagggctttataagcgccactttgtgggcttaataagtaaagatgatgtcgcgcccccattcacttcccccatccttccgtcgggcacgctcaaaaaggagcatttcggaaagtggcatccgaaagcccgccgctttccatagcgaaatgtggcaggacccggaatatagatactttgcccgtttacacgataattctggggggcggcggcttatcagcacaccaaatcccgtgtattttcaaaaagaagcttccccgagtaggtcctattcatgtacaacaatgatattaattcccgagtgctttttcttttttttgcattttgcaatttttattttagatcaaatgcaaatccaaaattcgcaacagctagacaaaatacagcacttacgaaactctacaccgacttcagtcgggttcgcacggcgataatgagcggaaattctacctgtactgagacgctgacgcttagactttggtcattaaacaaccctcaattggtaagtcaacttttttttgcttcattcccaatgggacacggaacccagaccagattcgtgatcagcgaccatgaaaaatcttctttttttgcttaaggcatcagcaccggttcagtctgagccaatccgccttgccactccgtatgtcagaccgaaacgatggaagaatgacgaatggcggaggtggtaattttgagtttcaataaaaaaagttataaaattagaggggtgatgggcatttttatctcgacaattcattttttccttttttacatgccccttctaattttataatttatttctgtgattttaccttattttattagtcacaatgtattccttactgtgatcgcctttcagtagtttgtgatacacattttttttttgtctttcaataaattcattctttgtagtctttcttttttaaaattttaatggcaatatcttttaatgtttaatgtaaaaaaaataatgtttttttacttgatatttactgtgataattttcttttctatttatttatttgcctttttaataaattgcttctttttttattatattatccccacaaaaatcgacaaaaagttattcccttcacaatttcccttccgctanattgcaacatttttggcgtcatattatactcccatcccaccaccatccttgttgttatgcccgaactttcacccgccgccgagtttggctagggaaaact

SEQ ID NO: 24058 - DNA, 1134 bp, Heterodera glycines
tcgagcatgatagagagggcggtgcgcaatcgatcttttatttgagggaatttttaaatttatactctatcccagaaaaatggctatctctttttttgataaattttatacacaacaaatgctctcgagcatgatagggagggcggtgcgcaatagaccttttattttacagggaatttttaaatttatactctatcccagaaaaatggctatctctttttttgataaattttatacacatacaaatgctctcgagcatgatagggagggcggtgcgcaataaaccttttatttttgagggaatttttaaatttatactctatcccagaaaaatggctatctctttttttgataaattttatacacaacaaatgctctcgagcatgatagggagggcggtgcgcaatcgatcttttatttgagggaatttttaaatttatactctatcccagaaaaatggctatctctttttttgataaattttatacacatacaaatgctctcgagcatgatagggagggcggtgcgcaatagaccttttatttttgagggaatttttaaatttatactctatcccagaaaaatggctatctctttttttgataaattttatacacaacaaatgctctcgagcatgatagggagggcggtgcgcaatcgatcttttatttgagggaatttttaaatttatactctatcccagaaaaatggctatctctttttttgataaattttatacacaacaaatgctctcgagcatgatagggagggcggtgcgcaatcgatcttttatttgagggaatttttaaatttatactctatcccagaaaaatggctatctctttttttgataaattttatacacatacaaatgctctcgagcatgatagggagggcggtgcgcaatagaccttttatttttgagggaatttttatatttatactctatcccagaaaaatggctatctctttttttgataaattttatacacatacaaatgctctcgagcatgatagggagagcggtgcgcaatcgatcttttatttttgagggaattttaaattatactctatcccagaaaaatggctatctctttttttgataaattttataacatacaaatgctctcgagc

SEQ ID NO: 24059 - DNA, 1774 bp, Heterodera glycines
  unsure (1)..(1774): unsure at all n locations
ccctgctgatggttctgctgttggtgnatggttgggtacctcctagggaacgatgtagacagttgaatagtcatattttcgcgtatatcgtgggaaataaaaacggaatcctttgggttaaatttcagttgggttaaacaaaaaaaaaattgggtttcatactgtaataagccacggtgttcatttgatagattggtctactgtataataatgctggcgactcggtactgtatgtacttattctcttgtgaaaaataggagacaagcagcaccaccaaattcaaaacatatttggcgcctaccagcattaagcggcagcattgccaatgcttgggtcgggcgttgtgcaccgttggcaacattttgaatttggtgcaaagcggcggaggatgactggcgcgaggcgactgcccgctggtgggtacggcgttggttggcgaaccaattgcaaatttgctgaaaatttttaaattaaaattttaaattcaattttaaattcactccctacccacctgataagtgactttgttgttcgcccgtcggtaggcagccgcgttcagaatgttcgcgtaggacaacagtttctggcgtgtggggttcgggtcggagcggaaccaacgctccagacgaggcagctcactcaccggactgaaccggatgttgctgagggggctaaaaaattggaaaatgtttaaaaaaaaaattaaatttttaaaacggctcccggaaaatgggctggctcatcctataacacgctaattggtctaaattaaaaaattggaagttaatttaaaaaatttcttaaatatttaaagatatttgcattgattggatccgttctaatccggccctgcccattggcaatggaggactaattaatttttgaattccaatgccaagaaatgaaattgaattcgtctttcgaaatcgaacctcatcagcccaaaaattgggaattaaatatccaaccagaataattttatcaaaaaatttttgggaacggcgttcttggggtttcttggccatgttgccacctcttcctgctgttctcttgctgggccacaatttgttccagccattcgttgaccgcttcgctttgctcgcggacgcccatccacgcggagcattcatcgtcgccggccatcaccttgcaatcaacaattaatgcagttcaagaaacacgagaaaacctaattggctttgttaattagtgagcgccaaatggaattttccggttgcgcgaacaggtaaaactcgataattaataccggtccctgttttttagaaatgaccgataaattttcaagaaaatcgtttaatttttaaagttatattttgattaaaaaatcaattattcactccaaaacaggcacggatgaggggggtgggggttttccccacaaatcaatttaataaaaaaattcgccaaaattaaaacaaaaattcccggacgatgccatggttgggaaatgtttcagtcttgggacatgggacacccctgaaattttcggtggacggagtgccaactccaaaagcaatttatgccgaaaagcggatgagcacacctgttgaagaatttgcttgacttcttgcccattggacgaggtcaaaatttgcggctgcttctcaatggcagtcttcagcaggcgctgtttgaggtcgacgaggcattggccatttgagtcattgggggaagtgcaattaattaattaggcaattaattaggcaatcgagagagtaggcaaatagtcaaattcatttttatttccacaca

SEQ ID NO: 24060 - DNA, 1743 bp, Heterodera glycines
  unsure (1)..(1743): unsure at all n locations
ataaaatactgaaaaaatagtgacattacgccaaaattttaattattttggcgaggagccttaaagtctgatttttgtggcctcaaaatcgaaaattcaatgctgacatgcttttttgagctcctttatcaaaataaaagcaaaaaagttttttcactaaaatcacggctctattactgacgtaacattttagcacatttgttttcattttagcaatggaaatgtgctgctcaacagaaagcgaccggtgcctcaaattgtcaatcaatttgctgggaaattggtgatcaatttcgctggttcggtgtggatgaatgatgacacaacggaagactacttgcacaaaataatcggcgcaaagctcttcgttggcgaacgcctcttggtttgggatgcgtttggcagccacaagagcgagagaacgacgaaggtggtgaagggattgggagtggaaacagtttttgtccctggcggctgcacttaattcaaccaggtgccaagtcatatctacctatctcaatgaaatccatttttcttccctaggctcccgatgtctcgtgaaataagccgttcaaggagcgaattcgacacttctacaatatttgatgtccaatgaggcggaaaaggagtttacattggcgggaaacccgaaggcaccggctctccacgtggtacttgactggatccaccgatcatggcaggaaatttccaaagaagtgatcatcaaatcatttgagggttcagttgaaaaagaaaacggaaaaattcctgaatttttagtctgtgggttgacaacgccattggacggaacaggagatgaaaaaatagcttgcttcaagccgaaaggggcaattggatcgataggaaccaaacttttgcgcgagtttagagcaactgaaactatgaaagatgggcgaaatgatcacgaagaagccggcttatctgatgatgatgtgatgtgagttggatcaagtcggagatgaggatgaaattcttatttgttagcgttttttactgttatttttgaaaaaaaattgatacaattttccaaataaaaattccatttatccccccggggggataaatggagacgggggattattgttcaacctccccagaaaggggggggggggataaatggagacggggcgataattagagataatacggtaatgcctatttgcctatttttatgcgtatttcgccattttttgataaaaaaattttggtttaaaaattgtccttattcgaaaaactttaaaaaattgaaatataagcaaaaaaattaagtttttgaataagcttacgtgatttgcttcctaaaaagcgttaataaaactttcatttgccattttgtgcctattttgcgatgttttctgcctttttaggtgcttatttcgcgattttttgtgcctaaaaatcgcatctctaatgtttatatgtcgtgccatttagccgggagcctcgttaccgcgctcaaccaccagaaaagtgaagtgaaattattttaaaaaactttattttattattgaaaagctgcgaagaagagctaaatcattagaaaagatggcgcccccacaaagtgtccaagccacgaattgtccaagccacgaattgtccaagccacgttttgtccaagcacgttttgtccaagccacgaattgtccaagccacgaattgtccaaaagagtaaaaaccaggaaaattgtccaanagtctaaaaagctcataaaaagccggaaa

SEQ ID NO: 24061 - DNA, 2350 bp, Heterodera glycines
  unsure (1)..(2350): unsure at all n locations
ttttaagtncattttttcaaaagaaaaagtatagactctttttcatagaaatctaacaaaaattaaaaattctgtttctctattaatttttaaaatttcaaaaaaatccgatgtgacatattattttcgttacgaaaagtccaaaataatgattaataaaaatcagttattaaactttccatttaattgtgccaatcgaaatacaaaaattgttttttagggattttataataccaaaattgttaagttctgttgaagcttcttatgctgagaagtatagagtttgctcagacagaattttcgtcttttttttcatttttatcccatttttcattttaaaaaattctttgttttatattttcgttttttttaagaaatttaaaaatatttctaaaaatatataatatctgcttactttgcatatattattctgctgctgctggtcacattctactggtatgtgcaatttgttcacggggttttcaaaattgtcatcacaaaattgcgcctcagtttttggcactttttttttggaaatttgtttgtggcattttgtcttcctgtttaacaagtggttcaattttaattttccctaattgaacttcattatcgggttgctgctgttcctctttcacttttcttgcttttgcctcctttccatcgttttgggtggcttttcgttttcccaaattctgcgatttcgttgaagatgcctgttgccatatttcataaacaaatcgtcgttttcatttgctccaactccgaaaattccatcattttctatataaaaaattataataatattgaaaaataatattttggcgaacaacatttatttgttcataaaatttttataattataaaaaaatggagagggaaaattatttattttccatcattgcgattaatatttgtaaaagattgattttacgccaaatatacaaataattatgcttgaatattagggttggcaaatattctaccggaaattaaatggaaaaaattttaaattttaaaatttttaaatatctttcttcatggttaacttaatgcttaatcgaattttgtccgaaaaagatgaaaaagttttgcgctttttggtctattttaatgtaattcgcgaattggggggcatctgtgaatttgtcccaattagatttagaaaaaaacttattttaaggattgatcaaaatgatttttgaaatttaaaattttagaaaattcatattttctcaattttttttttgttttgtaagtggctattgaacattgtatttaaaataggctttacagaaaaaatagtttttttcagtcactttttttatttttgtactttctcgtcaaaatactttcttttatgcacacttttgtatataaatatgttaaatatgcataaacaacaaataaaatagaaaaataaaaaaatacagagagaatttaaaaaatagacggatagccataagaaagaaaataacaactaaaattaaagatttacaatgaaaaattgtcaaaaaaagagagcaaatttaaaaagttacaaagggctccatttgcttattggacattattcctccataaaaaatcatcataaaaactaaaagtttttttaaataaattttggtgttccgtttgattcaaattaaaaattcatgtctccccgactctacttctgctgggagaaaatatggtcgagagtttcagaaaagcgagaattattatttggataagttgctgtcggtgcaaaaacagggttgacatagtttgacgataaatccttggttgactttggcgtctgatgagttccggcattgttaaaaccattcccactctgctgctgttggaaattaggtgcttccgtgttttgctaccttccctcccctcggaaaattttaaaaattcatattttggggttttcaaggtcactgatcacgaaaatagtgcttgttttgacatttgatgacatctggtcataggtttaacaaaatatctatgattttttgaaatttaaaatttttcgaggggggtagcaaaacaaggaagttaccgagtttttctgcttagagttagaaatcgctgttttttgtaaatctttattttttccttccattccgtaacaaaaattggcacacaatgccaacacaacgacgaacaacgccagcagcagctgcagcacagtgatcaggcgacggaattgcatggttttgatctgatgggcctgcaaataaattgtgcaaagttcaaaattaattgaaaattgtaaaagttagtgcccaactaattgaaaattaaattttatgcgtcggagaaaaaaatgatgggccatcatttaatgaatgatatatgacttttt

SEQ ID NO: 24062 - DNA, 1365 bp, Heterodera glycines
  unsure (1)..(1365): unsure at all n locations
ataatgtgcgaaaataataatgggaaaataattaccattccctcacgggggccatacgacaataaattctgataaaaacattactttttaaaaagnatatnaattgataattttaaaaaatnagaaaaataattttgttttttaaaaattatttangatccatttccatttaggtgatgaactccggttacgagaaaaaaattaaaaattttattgttcatataaaatagcaaaataataaaaaaaaaattattcttctaattaataatgtttcgacaaaaatttaatcattatttggactttttttagaaaaaaatatcaaattatatagagctatcgtatggcatggcactaatgatatctaaattgattaaagtattaaatttatcatatttttttatagaaacaaaatataatcaatctagaaaataaaaaaactcagctaaaatttttttttggtaatttctaataaaaaacaataattctttactttttcatactttaaaaagatatattcacaaaagacataatataaaaagataaactataaaataataattttactgaataaagaaaatataaaaaaagcatattgagaaaattattcaataatattttatatgattataattatataaagaaagaaaataattacaaagaataataattatgccaaaagtttatgtaaaaatcatttgttataaaaaagaataatgctaataattatttaaaaattaataaacgaattcaggaaagtttttataattggttgaaattactgtgtttgaactgaactatcaaaaagcataataaaatttttgagattaaaatgtaaataaatttttagttgtgtcaaaaaaaacattgacaaatataataaaataaccaactgagaaaattaaaaaacattttagttatctctgaaagtaagtaattaaaattattatttctatatttgattagaaaatttatttgcaattattgcaattttattaaagatattaattattttttaatcttccatttgatcgttgccaatttttaaagcagatttttttggcaaatcctcaattttacaaatagataaaaagggaaattaaagcacataaaatttttatgctgattgtttgattcattatttaagttaattaaatttaatataatattttttctgtttgttccgaaaataatttttattcaatttgattttactattttttattgacgagctccgattagttatttgttaagtctattatatctcttgttttatttaagattaataaatatataactttgtataaattaattttgttgtaaatttattaatttaaaataattttttttatattttctaatcaaaaa

SEQ ID NO: 24063 - DNA, 949 bp, Heterodera glycines
ccccccaatgttcccagaaagttttttgaaaaagagcagccgcaaaaaagcgatctgaaaagcaacgtaaaattaaaaatcatcaatcctgtgggttaccgccgacccaagctttaggcagaaagattcggaggtgggaggaatcatatttttttgctttaaaaaaacattttttgtcttggctttagaaggaatcacttacctaatttaatgcctgatcagacttattcaattgcctaaataatctttaaaagattttttattgttgctaaagccattgctagtagtaaaaaaaaattcggtaacgcttgaacaaaattttcaaaattaaattttcggcaatttctaaatacgcaataaaagcagttcaaatgcatgaaatatttgtcttgccttcggaatcgtattcttcgttttatttcatgcattttattgcatatttagaatttcaaaaagggggggggagtaacatccgtactaccgtattatctctaattatcaccccggggggattattgttcaacctcctcagaaagggggggggggagttttaacattaaaaactcattttttgatcgggaccaattgggggggggggggttgtttcgacaatattattactcataccttttcacaagcttatcaatagcgtacctccttcaaattccgaatcctcttccccgtttaaattgcttgggataaaaaaatccgatttcattggatagtttattaattgacaattagtaatccatccaacggtcagctttttatttctaattcaagttttggctttttttctaatacaagagaaagtgcttttgctgattttttttcagttgaattttccattataaatccactaatggtcaattttgtccttctgatttcttccgtcgattattcggaggatccaatgtccccgggcgaacatttgtccccatgggatttt

SEQ ID NO: 24064 - DNA, 1568 bp, Heterodera glycines
tgcatcaccataaaactctctaccatggggttggatgtaatacaccagtgtatcattggcatcgtagcaaaagagattaggatttttttgactactgtaactgagcaaaccgttctcatgacgcttataaaaccgtgctccttgggctaagtctgagaagtcaatgacagtattatattcataagtttcgcgcaataactgtacggtagcggtgcccaacaactgaaaatggaaagtgagaacaattaccggaccaaaataaactttaaggattataaaattattccaataaaataataagcataataaaagttttttcaagaaagaaaatattaaattctgaatttttgataaaattttccaattgttaggagtgtattttttgaaattttcgactcgattcttaaggtgtattttgattttattgtatttctgtatccgaaaatccttaaaatcggtaacaaaatagccataaaaataggtaaaaaaatttttacaaacaattttctggcagttaaaaagcaaacaaaaaggttaaattttggattattgctgtgtaaacgaataatttaaatattatgagtttttcttagaaacattgacatcttaccaaaaaaaaaaatttaaaaaaattaaattaaaaattttgtcaagaaaaaataaataaatttgggagaggaatttttgagaaagttttccaattcttgggggggaggtaatttttcggatcaatttttaggggtgattttttgattttattacattttgtttaagaattatctgaattaagtgttgacacataaatgaccaattaattctactaatttatacctttatgtttccattcctttttgcatagaaaaaaatttggtcttttccgtctaaatgaatgggccattcattaggacaaatcagtaagcattgttttagagccagaatatccatttttatttctttttcaaagatcttgccgcgattgatcggataagcattggaataactccaaattcttaactgatcatttccactgaataaaagttttttcttcattaccaaatgcaaaactgcgtgagttcgtcgcatttcagtcaattcaatgatatcaattagctaaactaattaatcataatgatgaaagggataacaataaagcgcggttcaggatgggaccctgtgcgggattttgcggcatcccagtctgcaattctcacatttttggaattcgggattttgcgggattaatccatgcgggatcccgccctgtaaaattttgagttccaatcccgcagcggaattcgcaaatatgatttatgaaaattgtcggatttatgggagaatttttcttactttggtataaccattctgaaatttttgcagactggttatcatttgggcttttccataaaattaaaaaccattctatcaagaatataataagatataagatacataatacctttctcaaaatatataaaattgcctagtaattaataaagtttattcaagaaaatttttcataactaattagacatagaataaccttttttaggctttcaaaatgattttga

SEQ ID NO: 24065 - DNA, 2251 bp, Heterodera glycines
caaattttacattaaggattaaattattaaaatattttcattagtgtgaaggcggagtcacgatggcatgtgtgctgggccaatgcgagtgcaaattgggcttccaaccggttcgctctttaagccaaaagtcatggcactatttaaaattaattgttgttcatcattttggaacaatgatcatcggtacccgagctgtgagcgaagatgcactttggaggaggtaaggacaatttgattgttaattatataatattattattggtttttttttttgcagttttgttacttactcaaaaaaaacaagggcttatttgacgaaatttttctcgaagatataataaaaacacaaaatttctccatttaaattgaacttttcacaatggtaaactttaaatattagcatttttcggattttgtgttcctattttttatgcctatttaggcgcctaattcgagatttttctagcctaaaaattgagtctctaatttctataaacaaatttattgttgattgataaaattattttattaacattatttttttttggtaatatcagggattttattggggtgataatttttaaaatttattattttttgaatttttttttaaatgatcaggtgcccgtgattgatcgatgtttgaaaaaagttgaacttggagagcgttgtatgagcagcaaacaatgtggcgatgcggcagccgagtgccgttttggcatctgtcagtgcctttgcaccttcaaacagacggtcagtgccaaacttagaatccggtaaaagattatgtggaaacatgaaaatgggtgggatcacatgtggaaaatcccatcttttttacgattccgtaaaaacccggtcggtgttaatccgaattccattgtgaaatggaaaaagcctaaaatacatttttcaaccaaataaaagattctagagattttagagaattttttctcttttgtttatgattgattacccactaccaatttgagcgcttcggtgagatttgctttctgatttatgacaattgaatattttttcgaatattaccaagttttccattagaaaatgaattttcgttcgaaatttccaataaagaatttttagaatttatttaattagaatttatttaataggtttgctagagaaaatagtcaaactgaaagttttttctgctcagaaagttctttttgaagataaaaaaaaatttaattcataaattttttttttatcatactttaagaaaggcgggggcaggggataaacgagctgatccaagctaagagtgataagaaacagagaataaaccaaaggcatgaaacatttttttttcagggaccataattatttattaaattagcttaaaacaaaatttactttcttccgaatttattttttcccgcgtttaggagagaaaattgtaagaacgggaaatggaaaaaagcatatgggaaataaaaatcattaaagggaagagatgcaccgtgacccacggtcacgattcacggtaccaattcaaggttattccgtgaaaaatttacactggataaaattgaatatttatgaaataaattttgttttcatagagaaatttggtcattttttgggcaaagtttgctaagaaacaaagcaaaattatcttttgaacaaaacccacctaccaatattgtgcgaaaaacaaataaaaagcaaagtttcaaggatgaccccagttaaataaaaaactcattaaaattttttttaattcgctcaaataaagttaatttgcgcaaaatcagtttaaacaaatcccatttgcaaatttgcccttgaaatattttcagaatattttgggcggacccccgcgctgcaccaatccggacgacccactcggcttcagcaatattctgacacgcgttgagcaaatcttccaaaatcggcaaaggagtgccggctttagtgagggatgagaaggcaatcagcggcagaggacatttgcgagccgacatttgggcaccgagaaattttaaatgccattaatttgaaggtgcctgacagagcaattaaattttaattgtcttattaatcagtgtatttattattctcagaatttattttgtattatgaattaaaacaataatgctaattaaagttttttggcatctaaatgttgacaaaaacgcgttaaggacgaccatgataaaaaaaaattacgtgaaatgtaaaataaagatgagaaattaattcaaatcattgtttaatctgacaa

SEQ ID NO: 24066 - DNA, 1021 bp, Heterodera glycines
atttgttaaaaaattcatgatttgttaattgttattagagaaattaaataaaaaatttgctaattttggtgtttaatgtaactgaaacaaaaaataggtttccatccgcaaaagtggttgtccgcaaatgtcggctttaaaaatcaccaaatgtcggtccgcaaatgtcgggtaacctttttgagacatccattttcaacaagacgcgccttcgcggagacaagacgtagagcaatcattcaaaggccattttgtagagaattttgtgctctttctgttcgtcatattcatcttctatggaaaatttttcccaaccccctagaatttttttttcgaatttactcagattttcgtattttttcacccgcaaaaattttgtgtttaatgccttttttatggcataaaatgaataaaaaatgcttaaaggatgtctgtacgttatcttagtgctgattgctgttagtttgattcggttgggcaaatgttagaggcgatttaagccttttggcccttaatttctcctgaaaacttagaaaattcaacataactctgcctaaaagacatatttctgttcgcaaaataaacagaaatgtgaaaaaagatttattctttcttatttagtttgttttatctgtttatttttggtagttgttgagattttgttcgtttttatcaagtgtctctattttaaattaacaccccatttttgaaaaaaaatcgtaaaacttttttccgtcatcatttcggtttctcactttcagaatcttaatattttcagaattgctacgtacagtcaaaaattcagctcgatcggttcatgggaagtggtcaaactcccaaaaaacagggtgtctttattttaaattaacacagtgtagaagctttttctaagcaaatgctaaacaattggatgcattggaaaaaatgagcttctaaattttgttttagattttagactaaaataaaagcgattattttgtttaaaaaagcgattgaaaaatgtagaatttttttctctatc

SEQ ID NO: 24067 - DNA, 1064 bp, Heterodera glycines
aaacgatataaccaaaatataaggaaaaatttttttcatttttttctccatcttcctttttgatactaaagcatcagagtgctaaaattaagttgtaaataaaatttggtgcgctttagagcactttctgaaaaaaatatttatgaaacaaaaaaatcgattttttcaagtgtccgtttggggtactcaaacatttatggggagcaaaaatccaacgcagaattaaagtacaggctatagggaagctactcccgaaggattcggtctccccataaatctgggcgcatcggttcggggggactgccccgaaaacaaaaaaatcgattttttcaagtgtccgtttggggtactcaaacaattatggggagcaaaaatccaacgcagaattaaagtacaggctatagggaagctattcccgaaggattcggtctccccataaatctgggcgcatcggttcggggggactgccccgaaaacaaaaaaatcgattttttcaagtgtccgtttggggtactcaaacaattatggggagcaaaaatccaacgcagaattaaagtacaggctatagggaagctattcccgaaggattcggtctccccataaatctgggcgcatcggttcggggggactgccccgaaaacaaaaataaatcgattttttcaagtgtccgtttggggtactcaaacaattatggggagcaaaaatccaacgcagaattaaagtacaggctatagggaagctattccggaaggattcggtctccccataaatctgggcgcatcggttcggggggactgccccgaaaacaaaaataaatagattttttcaagtgtccgtttggggtactcaaacaattatggggagcaaaaatccaacgcagaattaaagtacaggctatagggaagctattcccgaaggatgcggtctccccataaatctgggcgcatcggttcgggggggactgccccgaaacacaaaaatcattttttgcagtgtccgtgtgcggtactctaacatatatggggagcaaaaatcgacgcagagttaaagtacaggctataggg

SEQ ID NO: 24068 - DNA, 2136 bp, Heterodera glycines
gtcaccattgaaacgcattggcttcgccaaatccatgcggttcttcgggacgggcaatgaacagtccagtttctctgtttatccaattctgttcgatgcaatcggtcaacgtcaatgcaaatgtcggttgtggcttgcgaatttcaatgtagccgtatttgagggcctccggcagagaaatttggtattccaaaaggcggaacactccgacgtaccggtccaaaaaatcttaatgggaaatattgttaaacaaaattgtataggtgataaagaaaattggaatgtttaatgaaacccaggaaacattgaaaattattgggtacttttttacagattttcaaaaaaaaaatttttttttattttttaaagaaaacttttagggattttaggttcggaaatccgattctggtatctattttggcccaaattcaaacgcggaaccaaaatagatgtcagaatcgggttttccgacgctaaaaaccaaaaaagaagtttattctcaaaaatttttttgaaaagataattaacaagtaccaagaattgttaaggtcgcactaaatctaaaatttggccaaaacgaaaccatttttaaaattagttaaattcgcattttgggccgaaaatcctatttaggtatttagaaactttttcgcccacttacacttcagtgcatgatccaagtccatcggtgtcacttttatagccccaaatttgacgtagaggtggacagtgtttggcgaatggaatgctaaggaatcccaataatccatctgctcattgttattgagaaattgtcgggtgactgggtcataaagtccaagtgcaattgcctcgttaagggtgatgttcaactttgtttgcgggtgttttagcccatagtgggcattcaatattatggcgtcaattggattcattctcaacttaaaaaatcgaatgcaattaattaaaaagaacacattttgttgtaatggttataaattttcaattataccttaacattagaaaaatttctgtaggggactcctttgagtctgcaattttcttaggagtatgaaaattttgcataaaaaacccagtgataccaactgcttttttggaaaaaaacctcaaaaagcctccttccattgttttatggaaactgaattttatttaaatttaaaatggttggcatttgagaggccgtttggccagtaaatcccaaacccagaaaaattagatccttgaaacttttcagcattataaaaattgagctacattcgatgaatgattaattcctagtatacatatatcgttgaaaaagttttggtagttttcatttgctttttttctcttcaaattcaaatttaaatacaaaacacttagccaaatgctaaaaagctaaaaatggtcaaatatggactaaaaactgacaaaataaatattttaaaccataaaattccaaaaatatatttatattcaatatttgctaaaatagacttaaaatacgcgaaaaactgccaaaaaatggattaacatttaaaaaatgccaatttttattaaatttagcttcacaattgcaaaacaaatgcatctaaaaatgtttataataaataatatctccgcgaaaattttcggatggacaaaatacataaaaaaaaattcagaaatttcggaaaaattcttttttagaggtgtattttaaaaaaatttccaaaaatacccagttttagggatgtatttttcactttttttgcagtttcttgtgataatttgccaaaaatggccaaaatatggactaaaaacacaaaaattctttgcatgtgcgcagaaaaaatatgtaacttataactagggaaccgatttctagtgaaaaaacttttttttttgctcaattgttttgaagaaaggagctcaaaaaacgcatttctgcgttaaaattttttcatttggacgtcatttttcgtcactagaaatcactattttagagtttcgtcacttaaaatagtgaaaattcacttttttggctttttgtcactattttttcacttttcgacattttttgaaaaatccttaacaaaaatgcaataaaaacaaaaaaatacacccctaagaaccgacctaatttttttttaaatacacccctaagaaccgacctaa

SEQ ID NO: 24069 - DNA, 2190 bp, Heterodera glycines
  unsure (1)..(2190): unsure at all n locations
tttggggatggcccttcgacctgcgctctncgcaaagtctgtgctctctcgctgtgtgtcgaaaattgtctgctttctctgcgctctctcaacggcactttgaaaaggcggcacactcagcccatcttaacgcatttctcttccccccagcaaaagggagggacacgcaattgtgaacataccaaagccaaatccataatacaacatctgatgacagaagaaggcatcacaggacaaagggagagaaagaagaaaaggaagaagccaaattggaaaggaaatacgacgcaaatggaaaaagaagccacgagcaaataattacaaatggaatgaatgaataaatgaacagaacggtctttccaatcctttgtttagagaacaaagattagctaaaaaaagaaagtaatttatttaatctaacaataaaaaaaaggaataaaataagccaagtaaatcacataaggcatgccacatgcttaaacaaaacgggacaagcaaagttatttgctctaattgaaaaacagaaaattcagagcaaaaaaatgggagaaaagggagaggaaaaagcgcattttcccaggtaattaattaattaatagcagggccattacacaatacgacaaacaaatttcaacatcgaaacgaaagataaaatgataatcgatagaagggttgttagcatatgataaattggacaaaaaccaaaaggacaaagggaaaaggaatgaatgttattttggagagagaggaaatttgaaatcgggccaaagcatttttctaattggccattaagttttaaaacaaaaattacactttttcacctatgaagcacattttcgatttccttttttttcctgaattcgtataaattcatccgttcagtaaaaagaactccttgtcatactgcaaaattcccgtgttcagaatttgccaaaaacggaagtcatatcgatgtttagcgctcaaacaccggaaatatttttctcaaagaaaactggaggcaattctgcagttttaccaaattcctaaccattaattcaattctttataagttataaaaccggggcaaaaatgaacaaaaaatttattttcttttttatgtacctatatcaattataggcctgtttatacacagacaaagacatgcaaatgagtgcttaagaaattattcatctatgttcttgagccaattatgctccaaacattgccctgcagtggcgcgttcagacggtctgaaaaaacaaattaaatagtaaattacaaatgaaagcgagcttgccaaagggaatgagggggagacactcccgcccccaaacacagcaatccgggaattttttttgaaatttttttttactaatttcatcaaaaagtcatatttctttcctccggcccctaaataagaggccttaaggttttgtgaccaacgccttggaattggttagactgcagctaataatgtaaatgttgaaaacaaaagactcactcatagttaagcataggaaccaaaaatgcagcaaatgatctggcttggtcgaaaggccactggtatttctgagtaaggacctgaagttttcttcattttaaaaatggattttagaaaaattcacctcaagcagagaccagggcttcagattcggaatatggagcaatcgaccagtctgcaaattccatcttttttaaattcgaattccgaaagtctctttaccttatgaaagaattctcgccaatgttcaccctttttgaaaacagtcggagggatgctgcccaacagttctgttaatccaaaaataaaccaatgattgggcttaattatttgtagcaaaagtcaaatgcggaaaccattccttttttaattaattaaagcagaaaccgaaaattaatgccctcaattcgttacgattgcctaaaaatgaacaaaaaagcaccgattatatgtgccaaatggtcttcgtccctgctgtaagttccgccttaaaaagaaaaccaacagtaattcaaacgaatcttgtcattctcaccgctgtgcggttcgaataaataatcgccggtcgccaattcgaaagccttttttagtgaagaaatttactaatggtaataaattatcacaaaaacaactgaccatacaggcgacactccaaatatctgctgatgcatcatagccctaaaaccgaacataaattattttagtaa

SEQ ID NO: 24070 - DNA, 1451 bp, Heterodera glycines
  unsure (1)..(1451): unsure at all n locations
tctcttagacttgtaaatttcaaaaattgatttggtaaacctttttgaccacaacttctttgaaactcaacgaaaattttttgtattttacaggaaaatagaggacactcagggctatcaaaagatgccaagaatgtttaatttgggtgcttctataaaaagttatgttgcctgaaatttatcaaaatataacatggtcgtgtctttttttgtggtcgtgtaaactgaaatagagcaaaatataattataattatggtcaacaaatctaattaatagattaaaaggtcccggtcccggttaagcccaaaattcccggtcccgctctaaatggtttgtaactaataataacattttgacaggggatagtgaatggtatcattataaagcccacaaaaaatgctacaagaaatataaaacatatatacacaatatagtcatattgagattttataatcaatttaaatcaaatttggtagaaaattttgagtgttcctaaacatatgaccatgactgtatgtactgaatgaataacggtgtaaaaatgaaactgattgctgtctcaaattttttttcttaaattttttttcgggattttatgcaaaaaatgcatccagtcagaagcagatataatcttttaattgttgtgttggcacagacaagtgccaccggaccggatggtgccaatcaacagccagcacaacatcacactgtcctcctccaccagtgccaacaaggagaagaaggcgtgctgttctgcctcctaatttattgattgattgatcggaatgatgacaagtggtgtgatcagagaagagagaggggaagagagcaatcatttaattcaaaaaataataatataaataaatttctgcgccttgcaactcaaaaaaaaaacaggagtgtaaaattctggggctaggactctggactctttgtattggtactgaatctgcggtttgcacgcaaaaatgctaccaaaaactagagttgagtgggacagggacctgaacacggacaactgagtaccgaagtcccggttttcccagccaaaaattcccggtttttcaacccgaaaaggtcccgggtttgcccaaattcccggtcccgctcaactctaccaaaaactcacaatttccaaattttcattggccccgtttccgaaaaagtttttttttgtaagaaaacgcgccgcaaaaaaacgtttttattccttttttatttgggataaaattttccaaaatacaggtttttaagcatttttcatgaaaatttgtactttttcggtatgacaaagtgcgtttcagtgtcaaggaagtcggccgggtccgaacctaggaaacccccgggattttgttaaggacgctgttaaaacgaaaaagaaaattcattttccggaaggacatgcaagttgtgtcacacaaattcnntgggcagacaaanagactctaga

SEQ ID NO: 24071 - DNA, 1962 bp, Heterodera glycines
gttttggtgtggcgttattttaatttggaaaaacactttctttttcctcctttaataaatacaatttttgatcgaagggcaattaatttctttaaaaattgctaattttcatcaggttccctccttctgatcacgaaaacttaaagaaatgatcagatcagctgttaaatttaaaatattttataaaaaataaattaaaattttatgtgaaaattcaaacatttttttgtgtttaaattattaatcgtgaaaatttattcgatgaaaagcaaatgatggatgcgtacagcagatgaaaatgtaagtttttgttgagagaaaagtcgtaaagtgacaaaaattttggagagggcaattcaaagaaaaaattggaggaaaattgggggagagagagaaagggggaggggagggggatcagcggaagagcaaacgaaaaggggtcaaaggttttgggggaaaatggggggggggggggagaaacacacgtcagcagctgatcagcagcagaagatggaatgaatactgactgatctgaagcacagaagcagcagggcaaagtaatgaatgatcagtaaatcagcagagcgcaacacaaaagtgttaagcagagagagagggggagagaaatagagagggatgaagagagaccgaaggggagagagagagagaaatagtgagagagatagattagagggggagagagaaagagaggagtgagagaggggggggggggagagaaacagtgagagggcgcgatgaggagagaaaggtggagaaaaatgcattagtcattttgatcaaatgacagacaatgtaatgctgtgtcagtcattagagcagcagcaatgagtgtaccataaatggaaatgcccttttatgacatcattgagtgggggaatgcttttggttcgttaattgatttgatgattgaaatggaaacagtgcgactgatcagcaccgtattaattttaaaaagggaccgtaattgaaacattgacccgcttcgagattcccgaactgttgggcctaatcctttttggcagttttcttttgttggcccaattttaaagggatttccccgggagggccaagcaaaagccatcggcacaattcggagacgacctcttaaaaaacacacaatgtttttggcccaattaccatagggacgatggacaatgaagatgaatggaaaatattttggccaaactcaggaaaaagtcggaaagttttcattttgcatttttaaaaagcgacggacggcaaataaataaataaataatagtcgaaagtcaatcggaaatttgaatgatcggaacgatgcgacttaaaatttgaaaaatttgggaaactagaattaaaaaaatactgtatgcagataccgtaacgcaaattaattgaaatactgtaagtccattaatttccaaaattattttattttttattggcattttatctgtccactaatggactttttccatgtcaattaggacctaattgagcacatcaattagtgtgggcaacatgcgtttgagcagaaagagttgagcaaagcctccgccgtggttggatttggtgggtgattagcagcacaacgagcgcaacaaccgctgctgggggttggttgcgttgccaatgcaaaagaatgtgccgacgctgccgaatcattcaaattattgtatttaagcccccgggggaattccctcggcggacggcggaggtcacagaacgaacggagggattattaacgggtaattaataaattaagcttccgctgacgaatgagtgttgcccatctgttgttgctcaactgaatttggaggaacaattgccttctgttgctgatgagagacagtgccgactgaattggcatggcatggacgaagtgctggcaccaccgcagcaggggaggcaaacagaaaagtaagccgaacggaatttcggaaaatgggaaaatgccgaaaa

SEQ ID NO: 24072 - DNA, 1067 bp, Heterodera glycines
acgacttgatgacttgacttgatgttacatcaagtcgtttgataagcgtttcaataaaaatcatcgtctgccgcagactataatcaagcgaattctgtttcagtccacatcgtttcgccaacttgcatctcgccaactgactatattattttaacttttaatttattaaaatatgaatatttattctatcaatgaattaggagtaatcgagttatttaaatgttacttttttggtgggaaaaatcaaaagaattaattttagtaaatttggctttttccaaagtaattcagctttatttaaattgatttcattattctttaaaggataagcgagatattttttgtgatttaaattttaaaacttatttatttataacaagtttttgatatatagttttagaaaatttgttgcccttttttcgactttttatgaaaatttactcccaacgatggtttgctccccgacatttttaaaaggtaatttcctattctgtaaccacagaagaatatatttttaaaatcacgaaagtcgtgcgcaatttttatttatgaaaagacaaaaatattagaacataattaatttaacagaaaaccatccatcttagtcgtaacagtatttcttgttaggagttcgacaccggttgacgttttcatttgaatttatttttatctgaataatgcagggtttctttatgttcttatttctaagaaatgttctgattttagggcgtattttcatccaatgaatgaaatttctgaaaaatttggctaatttctaacaaaattcataaaaaaaatttcccacggcggcgcctatcggcaccaccggcccccaaaaaacctattctttcttaaaaaattagccaaaaatctctaaaatttggtaattctttagacaaaatctgggtaatttatgcaaaataaatagaatcgaggcgatcaacgaataaaggaatgtggagccaaagaaatcattcataaaaaataattttttttgtgagattttttggagctaattcaaagcaaactcccgccccgtccccgcggaggcggaattatcgtgcccc

SEQ ID NO: 24073 - DNA, 1006 bp, Heterodera glycines
ttttccataaataaaaatactccccttatttaaaataaataaataaatatttttttttattaatatgttgtttcccattttgcgactgaatttatttgtgatttatcaattctaaaaaactgttcatttaataataattccttttgatgaaattttttgttcaatattatttgtttttatattgtattgtaatatggaatttaattccaaatgtatagttcacaatatataatatttaataaagtttttagattaaattattttattttgcgaagttaatttctaaatataaattttttatttaccttaatcgagtagaaacttaagtttttgttttgttatatataaaataagttcgatttgtaaaataaatattattttgaatttattatgacatcgacagtcggttcttttcggtatattcaccggtaattattttaaataattttttattatcaattaaaattttattttatttcaatctacaaatatttttaaagattaaaatagttgatttttcttaatatttaaaattctttttcgttttaaattttttatttttggttaattatatgaacaataaaaatttatggcatcaaaaattggtttttgttcgtttaatgctcacaattaaccttagataaatgttataactaatgaaaagattgataaattacatatcatattttatagcatttcttattttaattttacatgtttaatttttacatgtttttgaactcttttttaaaacttattcgaatttctttacgaaaaattttaataattttcacctgcatttgaaataattctatgaaaaaatgttttttattatttgatttaatttttatttgctcattaattaaattaattaaataactgacgaatttggataatgaattgatgagaatgattaaataatctaaggattaaatttttttaggtggatttgtttaaacctaggaggagtatcatatttcttttctttataacttaatttttattt

SEQ ID NO: 24074 - DNA, 167 bp, Heterodera glycines
ccaactttcgcgcacttcaccgccgttttgctcagttggccaccgacggacatttggtgtacgtgttgagacatttcgaccaaaatgatcagaaggtaacggcaggcagcagctcgtagttaatgcactccttccatcataactcaaaaaataaatcaaaatttttg

SEQ ID NO: 24075 - DNA, 2785 bp, Heterodera glycines
  unsure (1)..(2785): unsure at all n locations
tgtatgaattaattaactcaaatataagnnaaatnaattattcgcctttcaaatccaattattaaatattntaaatgattttagggggattaaagttactatttttaaagaattttttttcaaaaaattaaatgtattttgtctaaattaaataatctttctctgattgaaaataaaaaaaattttttttttttaaattttaaattaaataatttattttttaaaataatttattattttttgttacattttttctcatttgtttaacagagcccatctgaactgttgccaacaaaaattggacaagctgcacttgttcgcactgacgaccgttccaaggtggacaaacggacgccaattttcaaaaaaaaaacgattttttaaaggagtttcgtgtcacaattttggtgcccgaaaatggcatttattatttgttggtggactaccatggatgggagcgcagtgcaatgccggtccgtgtacgtgtccaacaaagtgatcacactgctgaaggcgttttgctggtgcgaaaataatgattgccttacaattaatttttattctctcctgggattacggtagagtttcttagagccgttactgtaaatattaaataaaaataaatggtaataataaaaaaaaattgtgtttatcacatgcattaggacatattagtcgcacagtacaaagtgctttacagtaaactgccttatgtctcattatggtaaaagggatatgttactgtataattgtttgattgattacggtaaaaccaagggtcacattaccgatttgaggaacaatttggctaatagaaaaagaatagccgaactaatggctgtactgtacccgtagtcctttacagaaggatttaaaaacatgaaaattctagtatttttgcaacctacagtaatttattggcctttcttttcactcgaaagaacgcggaagcaatcattttattgatccctacagtgggatttcaaaatatgaaaaacatgtacagtatttttgcactacggtattttattgcttttcttttcacagatcaaccactgtccgtacgcgtttttctgccgcgaaatgttgtccgccggtggccgtgccgcaatgcttggcctggagaagagtccaccgccagtgcttgtcacccttcaagtgcagcccgggcgcgaattttccatcggcgccgtcacgcttgtcaaggaggagcaatggcacaatgacctgcttggccaggtcatccccctcccacttttttgtggatgaaaagccaaaaattgcaatgtaaaaaatcgatttacctccaaaaatgaggtctctattttaaagattagccctaattagtatataggggcgaagccttattttttttatctctctctcctaataatgacgacaataattcaagggaggggattgtaattttaggaaatatggtaaatttttggcatgcaaaaattctaaaattttcgttaaaagatttcggggaggggactgtatttaaggaaacacggtaaattttcggcaagcaaatatgccaagattcctcgtcattgcctagttttgctagcttgaatttggtgtccatactcacatattttttttcaaattaaaaaaaaacgccaaaggaatgatttgcgaatttcaaaaatttttgattttggtcaaaatttttattgaaatatcatttggccaataatttgtttggcccaccgttttcagaaaccgttttgtgtgcgcaagaatggcgtctgcgttgcgcaacgctttccgcaaccgtctaattcaatccggactgaagcggaaaagtcgggcaaaaacatcaattccagcattgcgggcgacaagttgccattcccagtggccggcgaaccgtcccaaatgcgtgtgatggcattggccggttccggggctcaggtgggaaaaacgaaaaaattgaataaatttctaccgtaattaaaatgactaggtacggtaacaagaatattttggatgggtgtttttttttgatcttgcccaaaatttatttgctcaatttttcatatttttttgaggaaaaaaaataaaatttattttttttcagtccataaaaatttttttttagttttttatggtgaaattatgattaatccttaattaaatgaactgcttcggtgttaacagatagccccttaaattttcgaaaaataataactttaattttaaaagagaatgaaaatcgtgaattttagtaaaattaattcttttaaaagaatattcattttcttttaaataattaaaaaaaaaataataataatttattgtgatttaatattaggaagaatttatttcaaaataataaattaattaattttcagaaataataaaatattaattttatttatgatttatttttagaaaatattttatctaaaaaattaattgattttcgtcgaatttaatttagaaaaagaatttaaaaataaattaattgttcatcatcaaaattattataattatgaaaaatgatttgatttacatgctcaatatttaaaaaaaaaaccaaaaagatttttatttacattttcatttttaattatgttcagagcacattggacattgagggtgttgttgcgacgccgaacgactatgtgttcgtggtccactacttcagcccggacaacccgccaattgttgtcgatgtactcatccaaaatgaacattttggcgacgcgttgttccactactgtccgtccatgagcggatgccggacaattgtggtaggaaacanaaaatttaatca

SEQ ID NO: 24076 - DNA, 1095 bp, Heterodera glycines
ggaaaaacccatttatcacgtctaaaaagacacctccttaaagcgtgaaaacataggcttttactttgcgagaatagatattataagtttttccttctttataattgacaaaaaaaacatttgtaacagttatggacaaaaacagcttgccgtactaaaccgaccctcgtactaaaccggccgtactaaaccgaccctcgtactaaaacggccgtactaaaccggccgtactaaaccgaccccgaccgtcagaaacatgacgctgacccacaaaatgtccagcccacgaaatgtccaagtttcgaatttgagtttttttattattcagatgggcctaaggttaggcaaggggtaatataaagggtatattcgtattcagcgaccccgaaaaccctaaaaatcctaaattagactcattttgttattataaattttgaaaaattttggacatttcgtgggtttttactcttttggacatttcgtggcttggacactttgtgggggcgccaaacatgatattcaatatcagaaaactgatgtcattatgccaaaaaccccgctaattcaaaatttttggtaatttgatctcttgttttccattcgttttttatctctttgaattaaataacaataaagtaataacattcaagcatttataaagcattacgaatggattccgaggaaaattcgccaattcacttatcttaaacacctgccggactccattatcaagtcaggaaaacaaaacttacgcaaaaaagtgaatttgcaaatctatttttaaaagaaaaattatggaatgtcaaatgtgcagcaaaagacaatgtgataaagacgagcatatgcaatttataacatcagcagggggcgcataccgaacataagattaaattaattaatgaatttaaacaaacaacacacaaaaaatccataaataaaaaataataaacaaaatcatgtaaacaatttaaaggaattacaagatataatcaaactaaaaaaagcgttattttaatacaattcttagtgaacaaattacaattatttaattagcatttaattgaaattcaataataaattaatagctttattaaa

SEQ ID NO: 24077 - DNA, 826 bp, Heterodera glycines
ccagcgcaattcttcaccagaacggaatttttaagatctttggtcccgtacttttggcccagcgcaattctttactggcgcgggatttttaagatttccggtcccgtacttttggcccagcgcaattcttcaccagaacagaatttataagatttccggtcccgtacttttggcccagcgcaattcttcaccggagcggaaatattaattttccggtcccgtacttttggcccagcgcaattctttaccggagtgggatttttaagatttccggtcccgtacttttggcccagcgcaattcttcaccggagcggaaatattaattttccggtcccgtacttttggcccagcgcaattcttcaccggagcggaaatattaattttccggtcccgtacttttggcccagcgcaattctttaccggagtgggatttttaagatttccggtcccgtacttttggcccagcgcaattcttcaccggagcggaaatattaattttccggtcccgtacttttgggccagcgcaattcttcaccggagcggaaatattaattttccggtcccgtacttttggcccagcgcaattcttcaccggagcgggatttttaagatttccggtcccgcacttttggcccagcgcaattctttaccggagcgggatttttaagatttccggtcccgtacttttggcccagcgcaattctttaccggagcgggatttttaagatttccggtcccgtacttttggcccagcgcaattcttcaccagaacagaatttttaagatttccggtcccgtacttttggcccagcgcaattcttcaccg

SEQ ID NO: 24078 - DNA, 804 bp, Heterodera glycines
gatttccggtcccgtcttttagcccagcgcaattcttcaccagagcggaattttttaagatttccggtcccgtacttttggcccagcgcaattctttactggcgcgggatttttaagatttccggtcccgtacttttggcccagcgcaattcttcaccagaacagaatttataagatttccggtcccgtacttttggcccagcgcaattcttcaccggagcggaaatattaattttccggtcccgtacttttggcccagcgcaattctttaccggagcgggatttttaagatttccggtcccgtacttttggcccagcgcaattcttcaccggagcggaaatattaattttccggtcccgtacttttggcccagcgcaattcttcaccggagcgggatttttaagatttccggtcccgtacttttagcccagcgcaattcttcaccagaacggaatttttaagatttccggtcccgtacttttggcccagcgcaattctttactggcgcgggatttttaagatttccggtcccgtacttttggcccagcgcaattcttcaccagaacagaatttataagatttccggtcccgtacttttggcccagcgcaattcttcaccggagcggaaatattaattttccggtcccgtacttttggcccagcgcaattctttaccggagtgggatttttaagatttccggtcccgtacttttggcccagcgcaattcttcaccggagcggaaatattaattttccggtcccgtacttttggcccagcgcattcttcaccggagcggaaatat

SEQ ID NO: 24079 - DNA, 1669 bp, Heterodera glycines
  unsure (1)..(1669): unsure at all n locations
gcaaagattgctttggcgggggatatgtatgtgttggcgtcttgggcaaaaacatcgcccggaggggggagcatgggatgtcgacggatttgtcgtcgtcgtaattttttcgatttttcacccctccctttttataggcttttcggtccacggatcggacaacaaacagacgaatgaatgaatggcgatggtagtggtgaataacacgtgttggcctgctgattagaggagaaaagatcgcctcagcgttttgtttatgtgtgcgaagcgattgaagaagtttttaaaaggataaagcgaagggacggaaaagaaaaaaaggtcggaaaatgacggacgaactgaaaacggatggccaatcattttgattggacgaaaagggggggggggggggagggaaaatacgattgaaatgaaaaagaggaaaaagggaccaaaaaataataatgaaacaaaacgacgacgacgggggcgggacagaaaagttggggcggccacaaagaaagagttgtgggtggtggccaatcggggggattaagattaagctaagctcggctatcagcgaagagcagcaaaataaaggcgcagcaacaactgacaccagcagaagcagcagaagagcagtgggggcggagaagcgaaaaagaaaagagagagagagacaaaatggacattaatcccccactccgtaaagcgatcactgatcggaaggaataggaagaaaaagctgatcggaaggggggaaacacaaaaatgaaaagcaaagcgggagagggggagctgaggtgggggaggaacatcagctaaccgacggaggaacatcgggcaaaatagaagcggtggcggcaccggtgggcgtggcattggccaaggattgcttggccaccccaaccgaacactaaagcattcattcattgtgcacggcgatgacctcgtcgcggaacacacactcaggtggtcctgactcatctgttgttgttgctgacgatacaaataacaagagggaccgactgatcagaagcaaaggggggggggatttatggttgggaaaggatcgcataagcacttaatttatcctatatccacaagtatccatattttgaaatttaaaaaaaatataacagttcaatcagctgaattgcccttttagatattctaaaaaatcgaaaaattttcagaaattagaatttttttcgagtatattgcttaatttaaaatttctaaaccggtaaattttattaaaattgaaatctcacttcaggtcgtttaaaaaattaataaattttaaattatgttttcgattttatccatgtttttatagccctgtaatgaaagagaagtatatacattctatggtaagtaaatgagaatacttatgctttatacagtaggcacaaaaaggattgattaaaataaaaaattttaatgtttaatgctgtttgccgaagttattaaatattaaaaaactcacaaaaataattaacttaaaagtggcaaaataatgcagaaataatggaaaaatagtcgcaaaattattcactaataaatttgcaaataaatgcattttttanattttttcaaaagtcaattcttatggcgtgtttttcgtttttactgaattttntgttaaaaatttaactcaaataatggcaaaattagtcactaatta

SEQ ID NO: 24080 - DNA, 1463 bp, Heterodera glycines
cccagttttcctttatcatcgccttgatcttttccttcacaattttcacagtgtccccggcattcacctcaactttgcaaaaatcacttacattattaggaatggagaattggtaatttacggaaatttcaaacacttccgacacaaaaatggtatcgccttttacaatgttatagaagtacattgtttgacagtcaccaaaactaaattctgttctatcggaaacatcgtctggtttatacaaatgagccaatttttgtctttcaagcggaatgccaaacttttcttcaattttctcttttaaaccttgtattgagaggtcgtattgcaccttaaccagggttgagaaataaagcaatataaatgtacaaaaacgcccaaaacatatctattagaatatgtaaattaaattttgtttttgttaaatagggcgcaaaatgccataaaaataacccaaataggcttattgttaaaatcacgttttagggatttaaaaaaaatttatttttactacttttttttgaaaaaaatcagtttattgaggttcttttttacaattttttgaatttttaacaagaaaactctaaactcaaaaattctcaaaatatttaaaataataaaaacatatacgataaaattgtgaaatttatgatttttgggcataactgtaatttctttaaaagatcctcaaaaatggcaaaaatttcctaaaggaaaaaccaggaaaaactagagtgccacgggaccgtgaatttttgcaaaaaccgggacttgccgggacctgagaagccgggaccgggacctcgatttttttctgaccgggaccgggaccaaccgggaatttttaaaaattcaaataaattcaaaaatttttaaaaaattcaaattttaattttttttgcaactgaaaataatacaaaattaaatttttattttgttttttattccataaaatcttaaagttaaagctaatttaaattaatgaaattttcaaacaaataatcattttttggactactaggtcgttgcataaaaaagggcgctttttcaaaatgactttttttaagacttgattaacgtttgctgtcttttttgtgtgtaattcttttatctgaatgttctcgtcatgtttttgccaaaaattttgattttgtccttttatatctaaagttacagtccaaaaaattgggtaaggtcaacaaaatttggctaccattttacaccaacgtccataacttgagttaaaattgtcaaaacgacttgaaacttggtcagattatgaaatttgatgagcttaacaagaaaaagcctgaaagaaatttttctgaaaaagaaaaaacaaaattttttggccatgtttattttggccaagttccaaatctattggccaaccgaaagtcaaaacaaaatcaaaatatttccatcggggttttgaggctttttatgcccttaaatatataaaa

SEQ ID NO: 24081 - DNA, 1540 bp, Heterodera glycines
attaaattttatataattttttcgaataaggaaaatttttaaacctaaaatttttataaaaaaaaaaaaattaaattttgacgattaatttttgagaaaatttttcaattcttaggggtgtattttctgtaattttttttagatcattcttagggttatataattttttcagatcatttcttaggggtttattttcccgatttattgcatttttaatggaatttttttgaaaaaacgccaaaaaaggcaccaaaacggcaaaaagccaaaaaaggcatttaaggcacgaaaatcccgaaaagggcaaaaaaaaggcataaagtcaacgtagaagcctcaaaccaagtggaaaatgcttttttatgcttaatatatcgaaactagtgcgcaaaaaaaggcatatgcctcagaagtcggcctctaatataagatatttaaaaaagaagaaaattaaacgatatttgcggaaatttcgcctccccctccgggctccaaatttaccattcgaatcaacgactgatgatattgtagttgttgttgtttttgatggtgttgttgtcatatggtaatcaatcttctgtgctttttgttgatcattatcttaatgaatttttattttcagggcattttctcaattttaaaacaatttttctacagaaataattttaattttttttgataccgcgaaattcgtaaaaaatcaatgttttcaatttgatttgattttttgtcatgaaacgatataatttggaaaattgaaaaacccaaaattaattcgagaaaaacccatcttatttttcttaaacaaaactaaataaataatcctgattcattcgttagctttggattgctctattatacatgaaaattttcatgactatcttttttgaattaattttttggtcataaaatcaaaaaagaaagttattttataattttttttttgtcttaaaatttacattccgtgagatcattttgttgttgttgttttataatgatgcaataaaataatataattgccaccaaagcggtaaatattcctttattcattgccgtcgacatggtgatgctcagttcctaaaagcaaggaaaagctataaatttattaagatttttttaatgtaccaagtgagataaatttttagttttaatttaaaaatatgaattttggtggaagatatagtatatttttcattaactaaaaattaaatatttgtttcaaaatcacagataaaatgccttaaaataaagcttatttattttgtgcgtcccatgccatattatgcgttccatgaccatttttttacgtcccaatatttgattatattaaaaaactatttgaaattgttgatttaacatgacatgttgattttggacccagccaaccctaaaataaacacccagggtaatgaagccataggtcgcattaagcaaagttgttgaaacctttgctgcatgggaatacgcctgaaatgttcaacataatcgcagcttcacgggttttttgtcctaatttaaaaaaataatacaattggaagca

SEQ ID NO: 24082 - DNA, 1732 bp, Heterodera glycines
accgagtactttcatcgcctacagtcgaaacgaatttccgtttttactattgaaattcacacaccatttggtgaatttgttaaatttcactggggaagttgtattcttacattacattttaagaaaagtatattttaaaaatgacacacgtatttttcgatcccgagtcggttgattggtcatcttttttcacttcacaacatgggaggggacagaagcaatactttgtcgggagcaagtaccagcggggattcggtttcctcggtaatgtggcacgtttcttgacccctattgcgaggaatattgcctcgagtgcaggacatgaggggctcgccgcggggcagagagttctgagtgacatcgctcagggccgtgatttaagggatgccgtcagggaacattcaagacaggggttgactaaccttaccgacaagttacaacaatgtgggaaaggaaaaaaggccctgatcactaataagatcgaaaacgggtatttgatcagttaagtttcatctaaaggtataaatagaacaaataacacaaataattaaaaaatgtcaactcttacgaaaatagacaaggcgagtgaggatggtctcgaggggggcctttcgctgtttgatatcccccgacgaacgttgcaattaataaatccagtattagggaattactccctctttcagcaataaatcaatctgggccgtatatatttagacttttttcagataatcagttttgtgatctcaataaaacttttctctatttgtcaacttcaatagagagaaaagacaaaagcaattggattccaattaccaaggacagtgaagctgaccaacacgtcggtgtcattcaaaattttgggcacagctttgtcaaaaccttaaaggtgtcaatttcaggtgttgagtcttatgattccggcatttactatgcgtttagggcatatatgatgaatgaattgggattttcagaagatgtcaaaaagggtctctgtgaagcgtcctgctattatgtcgatgatgtcgaccaggatgattatacaaacagtggctttaaaaacagagcgtcacgttttgctgatggtgcaaaatgtaaaacaatggtgaaacttaattttgatctcgcccgtcagcccaattttttgcttaataactctgacgtgatttttagcatacaccgtaacaccgatgattttctaattatggcaccgccatatgtttccggaaatgcagtcatagtgaacccgcacacatatcgtattaacatacacgatattagaatttatgtaaaaacagtagatgttacccagtcattaaataacataataagcaatcagctacaaaccaccccggccaaatatcctatgagaaaaattgagatcaggagtcttttcatcccgcgtggcacttctgatctttcacacaatgtttttacaagcattgttccgagacgtttaatcgtcgggtttgtttcaaccggtgcgtataccggaaatcctaaagagtcacccttcgtctttgaacatgccaaaatacgctctatcagtgtcgaagcgaatggaaacattttccccgggtcaccctattctcttaattttgatagaaacaaatacattcgagcatttgttgatatgtatacgggactcggcatggacgacggtgaaagaacaatgtcgatcaatatacaaaaatttgtaaacgggtggtgtttcttcgtcataccgatgacctct

SEQ ID NO: 24083 - DNA, 820 bp, Heterodera glycines
gtcttaaaaaaatcaccctattatttcacgtaaattcaaagtaattaattaggctaacgcaaaatgcatcattaaattgccaaaaaaaatatcgttgccaaaaaaaaccccgtaaaaaaaaaaatagtcaaatatgcatttaaatatttgagataaattgtcagataaaaaaaactcattaccaaattggcactgctgaaaattccaattcggcatccaatcaagcgggtgggatgacactgaaccgacgggctccgggtcctcctcatcatccgaatcgcatcggcacggcgggcgagcattcggcttgcagcatacggcgtagaccagtgcaacgaaaaaaacgaaaaaaataaggaaaataaaaaatgccgaaaaaaacattctaaattatacattttaaaaggcaaaaaaaatgcaaaaaaaaaagtaagcttacattaaagtgaatgcgttgtccggccggagagtcttgcttgttgctgtgatctcattcctgagagattgtcccgaccgataagcaatgggggggggggggggggggataacggcaaacgttccactaaagcataacggaagggaggggtaaaaggcagctaatagctggcggaagcaggaggggggggggggggtaccgaattctttgtcataatgagatacttgtcgtcacaaagttgtgcatcagaaagaatagtaaccctttctccactgagttgaccgactatcgataggagaacaattaactgacacattactgacaaaattcttaactaatatatcggacatcgggcgaacctttatataaaccatcaatcgaatc

SEQ ID NO: 24084 - DNA, 2132 bp, Heterodera glycines
  unsure (1)..(2132): unsure at all n locations
tgatctcttgaaaagcagcaaaatgcttataaattagcagagtcccattttgtgactataaaaatgtttgtcttttcgagtttcctctcattgtaaaaaaatttctaacataattacctattcttctctttaatcattcgaaaaaccgtcaaattgtgttaattgtctcaaaaatgaaccgacggtaagcatttcaaaaattaaatccatttccctgttatttttatcgaaatttcagctgggtgtgtaacgatgttttgatggatctcttcccattttttggtcgtcttcaactcggcctcaaattggcgctgctttcaccacgtttcaatgcgcttgtggacaaacatttcgatggaaagaacgaattcacaatttggagatggattggatttcgcaagaacaatggcacagcagcgtcagaattatctgtcctcatcgattatgccaattctgtacaatttccttggctcgaccttccgctgccacacaaaattcgcttcaaacaccttcagattgagtaattaaaaatgcaaagttttacatggaaacaaaaacattccattttcagttacattgaccattccgtcatcgcttttctccgctccaatcatcaaatttttgacaaaggcaccaatttgcggttgtggatgtcttcttcgcagaccacggatgaccagccgatttgggaagttttcgtccgtgaaatatggccaatcttttcgacaaacattcgccacttgggttttatcggcgatgaacaattggacaatttgagtcgtctcatttcaccggcaattctcactgatctccatcagttgaattcaatcaattccggtgatttgttgcctgatgtgatcggtgattttgatgggccaaatgcaactgctggtcaaattctggccaaatggctgcatactcctagaaaagacgggcaaccgaagcaattgcgttgtcgtgatcaaacttcaggaacggttgcatgggtcaacaatttcaaggaggtaaaatgaactgacaagttttaataatctgttctcgatttggttccaattttagggccttctgcgtgccaccacttcagccgactacaaaattcagtttattgttgctccgccatcaatgtcaatggtgccatttgaattgacgaacggacgaaccaacgaaaagctgacaatgaccaaatcaagcgaaaatgcatgggccagccaatggataattaagcgatgccaaattggggagacggcggcggtgcaatgggaagatgaaaattggaacgatttgagcactgtccaatttatgatttttggcaataattgtatagggtgagtaacaaaaagcttttgactttgcctaaacaatttaaatttcgttaatctaggccattatctcctccagaagaagcgggacaaagcagcgaaaaagggacgtcttctgacaaatgagtgacggacaaaagagcaaaacaacaacagtgatcagcagaagaaatgaattaattaattgagaaatgatacgtcataatttatcagtgataaaaagtattttatgaaaatatcacaaatatgtataatatgtgcatatatttaaataaattggatataacccgtctaagaccttcctcaccaaatttctaaaagaattcataaaatttgacccaagttgccaattttttccgtatttttcattaaaattctttaacaaaaatccaataaatccaaaaaattctataaataaatcggattaacaatntnaatnttnaaatatanaaggttnttttaaaattttaatntnattaaaaaaaccctcaattttccanttaatnnccaccnttttttttcttctaaattcatataaaanacanaaaaatnccaatnactattaatttttatttnttanctaacanaaataaaatatnaaaatntatttcttatnattnttttacttaaatncccactctttttttctttnttaaaaataattttcacatcctcanccaanctnnctctaacccancccataatatnacccctaatnnattattctaataggtggaaaatcatanacaaaataatngattttgacctatgttggagaagattcgtgatcagcacatttttaccctaaactca

SEQ ID NO: 24085 - DNA, 1760 bp, Heterodera glycines
attgcaacaccaacaaatcattatttagcaaatgcactttttatagtcatcgactttcaaaaacaagttttcattttttaaaacaaaatttttcacccataagtggggggaggacatgtcatttttgtggaccagtaaaaccgatgattacggtatcggcagtattaccaataaaatgcttcgaggacaccaaatcttgaagtttaaaaaacaacggcccaaatagaggtacaattcgcagaattacagtcgtaacagaaatttaagtataaaaattttctttccaaagatttaattttccgggaggagcgcaattctgcgatatttaccaagtccggacgtaattaagggccaattgtcatcggaataatttaatttttaaatgaaaaatgacaaacttttgattgcctgcccatggcgctgcacatgcgccggcgtcagatgcaaaaagttgggaattttcatcaattccaagttcccgtacggcccttttggcgcgaaccgttccggcctacggcggaagcccatgcggacgggcaacggcaccaccgatgaacggaaggactgcgcggtgggccaaacacttggccagtcctgcgtggtcgacatgtcctcacgacgggggttgcgttcctgcaaaatttggttgccatgggcattttgcgctacttaaaaggagtcacccccaactcatccatagacccaactcatccatacccaactcatccatagacccaactcatccatagacccaactcatccatacccaactcatccatacccaacatccatacccaactcatccaaacccaactcatccaaacccaactcatccatagacccaacatccatacccaactcatccatacccaactcatccatagacccaactcatccatagacccaactcatccatacccaactcatccatagacccaactcatccatacccaactcatccatagacccaactcatccatacccaactcatccatacccaactcatccatagacccaactcatccatacccaactcatccatacccaactcatccatagacccaactcatccatacccaactcatccatacccaactcatccatacccaactcatccatagacccaactcatccatacccaactcatccatacccaactcatccatacccaactcatccatacccaactcatccatagacccaactcatccatacccaactcatccatacccaactcatccatagacccaactcatccatacccaactcatccatagacccaactcatccatacccaactcatccatacccaactcatccatacccaactcatccaaacccaactcatccaaacccaactcatccatagacccaacatccatacccaactcatccatacccaactcatccatagacccaactcatccatagacccaactcatccatacccaactcatccatagacccaactcatccatagcacgatacgagtcgtcgccgtggcatttaatgccacgactaagaccgtacaaccaaaaaatgccacgaccgagaccgcataatcaaaaatgtccacggtcaagaccggcataatcaaaaatgtccacggtcaagaccacataagcagaaaatgccatgccacgacgatgactcgcagcgttatggatgagttgggtctatggatgagttgggtatggatgagttgggtatggatgttgggtctatggatgagttgggtatggatgaggtgggtatggatg

SEQ ID NO: 24086 - DNA, 1280 bp, Heterodera glycines
tttttgcgcgtttctgtgtcatcaaaagaaggacaaaagcaatgggaaaagccatctaaatcggcgatgaaaaaggcaatttcgcgtttggaagaagaacgacgtaaacgggaaaaagcaacaaattccgcggcagcgaaattaacggaagaggtgcagaaagaatactcaacaaaatatttttgttttatttaaaaaatattaaaacctagtatctatacgtgattttaatatgtaaaacactccaaagtttttttttgtccggcgcgccgctgagaaatgagaaaaacttatctaaaccagttcattttaagttttaggattaggtgcctcgaaatcagtccaattcttcgaattaagtaaactttgaataaataattgtttgttaaggcaaagtcagtcgcagaacagcaacaagaaatggcacgagaaaaacgtttggaagaagcaaagaaaatgcaagttaaattggacgaatccttgcccgaagcgaagcgaaccaaaattcgcgaatgtccggcactgtgtggccagcgggtgaaagtgttcgcattcgtccatcggatgagacagcaaagtgcgtagcctcacgctcaaaacggaaatggcccatttttagggaaaaacttgatgttcctcgtccttcgcgatggctccggcttcctccagtgcgttctcaacggcactctctgtcaaaccttcgaagcgttgacactgactactgaaagttctgtttgcgtgtttggccaagtcagtcggttgtctttcttttgagtatttatcccttcgaagatcaacaaattgcccattggaaaagttgcgcccggcggcatcgaattgacggccgatttttgggaacttatccacggatcaccgcccggaggggttgacaatgtgctgaacgtggaggccaacgtggacgtgaagttggacaaccgccatttggtggtgcgtggagagaattgctcagccattctacgaattcgcgccgctgtgacacgcgcaatgcgtgaacatttccatgaagctaaatacatggaagtgtgtccaccaactttggtgcagacacaggtcgaattttcaaaattgtgtctacaattgctcagaattagaggtcggcacggacgggaacccgcgtattaggttttacgggcttatccctcacggaattccgtcttgcgttttcaataaaaagaccggtactaaggcgtccattggaaagcaggtcctttagtttgcatatttaagcaagggcgtggctacccccccccccccccccc

SEQ ID NO: 24087 - DNA, 1756 bp, Heterodera glycines
  unsure (1)..(1756): unsure at all n locations
tgtaagttagtcctttaccggggagtatccctgcatctacacggacgcttctgctcaattagcaaaaaatatgagtgatctaattttcactaaaaaagttaagcctacattttttggcatatttaaaaagcaattaaaaaattttaaaatttaataattttcctgcaccgaaggtactcactcggcctcttcgcggcctcgtggtgggccttcgcccccccccctcccacgcccttcagagcacgacaaatatttcaacaaaaattttgaaaaattgactagagcaatcgaacgctaacggacgacctaatggaaaaaaatccccgaaggagagaatttaattaaatccattccttcgggggaccgtgccgggtgccgcggggtaagcagtgctggttcgtttcatcacggcaccgaaccttttggctagtcagcaatcgttgcttaacttgccagatcggacgggtgcgcatgactttctgaaaaaaatatttatgaaacaaaaaaatcgattttttcaagtgtccgtttggggtactcaaacatttatggggagcaaaaatccaacgcagaattaaagtacaggctatagggaagctattcccgaaggattcggtctccccataaatctgggcgcatcggttcggggggactgccccgaaaacaaaaaaatcgattttttcaagtgtccgtttggggtactcaaacaattatggggagcaaaaatccaacgcagaattaaagtacaggctatagggaagctattcccgaaggattcggtctccccataaatctgggcgcatcggttcggggggactgccccgaaaacaaaaaaaatcgattttttcaagtgtccgtttggggtactcaaacaattatggggagcaaaatcccacgcaaaattaaagacaggctatagggaagctattccggaaggatcggtctccccataaatctgggcgcatcggttcgggggactgcccccaaaacaaaaaaaaaaccaaatttttcaggggcccgttggggggccccaacaaatttggggggaaaaaatacccccccaaaataaaaaaaggggttttatggaatttttccccaaaggagtttgcccccccccaaaaattggggggccccggttgtggggggggggcgcccccaaaaaaccaaaaaaaaaaattttttgtggaaaaaaaaaatttttaaagaaggagggcgaaaaaaaaaaatatataaaaaaaaaggggttttttttcccctttttttcccaacccccaacccaaaaagaagggggggggcgtccctctgatttattaaaaaaaaaaaaaaaaaaaaaaaaacacaaaattatttttttttgttctgtaaaaaaaaaaaaaaaaaaaaaaaaaataaatataaatattattttttcccttcctctctttttaaaaaagaaaaaaaaaaacagaaaaacgcaaaaaacaaaaaaaaaaaaaaaaaaaaaaaaggggggggccccccccccccccccccccccaaaaaaaaaaaaaaatttttttattaggcgccccccctcttttttttttttttaaaaaaaaaaaaaaaaaatataataaccccccccccccccgcccccccccccccctttttnttttttttttctcctcccgcccccccccccccccccccacaaaaaaaaaaaaaaaaaaaaaaaaaaaaattttttttttttttataaaaaagaaaaaaaagggtgttttttttttttttttttttt

SEQ ID NO: 24088 - DNA, 1898 bp, Heterodera glycines
cggagggtactgttgctgctgctgctgttggtgcgctccccccgggtggaacattggcccaactgcgcctccgcccccccctccaccgcttgtcgaactgctcgctgtcgtgcacggggaataggaggacggagacatgctcaactgctggtcgacctgctgctgctgctgaattgccattgatgatgacccactattctgttacggaaaatggatattcgaaaatcattttaattcggaaaactcgagaggggtctcattcagaatcctaatgatttgaggggatttatgaaatggcattttttgaagataatgcactgcgcctcatctttgtaataaaggcttttgcaccttcacttaaaagttcccttctctcttgtgctgcattaacaacaaaccattggcattggcattttacacagcaattgtgcattgccccgctgtttgaccgatgcgtatgaatggacggacaaacgccgttgttgttgttgttgttgttgtggcacgttgttgttattgttgttggcatccgttatgtttggcagtccttcgtaaaagctggacaccatcggggcgtattctgcaaaataattaatttatggcatttattattattatggttctaattaggattatcattatggtgttccaattgaccaattgtgccgccctccgttccgttgtccgtcttcgcttatccaaaagcccacttgctgctgttgctgctgtgctttgctcccatttccatttttcgcctcatttgcgacgcctccgtacagcgaggaagtgagcgttgtgtgggaggagtgaccaccgacggcactcatctcaaagcattggccaatttcagtaaagcaaaagttaatgctttcattcaattttaatcaaaatttaaaatttgaaggccaaagttgaaacggatctaatgactgccgaattacgtacaatgagtaaacgtgaaaacggacaatcaaattaggcgaaatttttgctagtgatcttaccaaaaacaaaaaactttatgtggcaccagcccattttttcgtgtggcacttcgttttcgatttttgcaatttctttttcaccactttctgttgcgccgggtggtgtcgtcggccccgcttcgttctgaatggcatttgcagtgccgcactgccgccgcctgtctcggcagcggttcgtctacgacccaaacagcacatcagtaaattaaagaggcaaccgataaggaacagagcgcacaaagcgatgcccaacatgtacaggcgcgagagttggtccatggagacgcactgaaggtgagggggacgaaggcgggcagagggagcggcagcactgtgagggagcaatggcacaaattaattccaaattcagccggctgagtctccccatatttgaataccggataacattatcacatttcttagttattgaccttatacaaatataaacattaaaagcatttatgataccaaattaacaaaaattggtcaaccaacaaaaaagttgccatgaaaagtggggatttattcgatcacattttatttacgctcgatgacaaactgattaattttaacaaataaatattattattattattcatgttaaagtcgcaaatgttaacgtactcctgtggcgaactggtggaatttgtgaagttataagtcggcataattgctgaatcggttgacgaaagcatgacaaaatccgttgaatcgttgatgaacaggggattatggtcaagggcggtactgtcgtcggtgtgctttgaagtgtccgccggcggttgggatgcttaaaaatattattaagtaatgttacaataattatttaaatttaaggaaaggacattgggtgagggaatataatttttgaatttattctatttttttctttct

SEQ ID NO: 24089 - DNA, 1833 bp, Heterodera glycines
aaaacaatcaaatttttctttactcttcggtgccctccgccgcgtgtcgcccattgtccgtcgccgtcgtacgaaaaatggccaccatttcggcatttccgctctcttccgcgaaatcctgtgcccgtttgcctgaaatgggcgaataaaacgctcgttagcacaacaatttggccacttccgctgctgctcaccttcaatgttccgttggttaatgtccgcgccgatggccaccaaatgccgcgccacttccgtcttccctttgatcactgcccacatcaaagcattgtgtccctccacgtcaacatgttgaaggtcggcgccatgttcgacgaggaaattcactgaaaattagggagattacatttttggcactttgccacaattctctcccaccgatggccaaatgtcctttactggcagcgcaaatcacaggagtgtatcgctcttgaacggtttgttggttgacatctgcggcccactcttccaccagcagacggcacacctccaaactgccgccaatggctgcgtcaataagcggaaagtatcctgaaaattagagacaatttcattacatttttgagtactgctgtaaaacccaccttcgaaatccatttgctcgacatttgcaccatgtgtcagcaacaagcgcacaatgtccacctgaattcaaatggaaaaatgttggaaaacatttcaccaatggaaatttttccttacatttcccgtgtaacacgcgtacatcagtgctgttgccccatcaccattctgcagattgatgttggcaccattctcgacaagaaatgtgactgtggggggaaaaatgacgggaaaaaattacgtattttttcaaaatttcgtctctctaccaatttccgtttgcgatcttttgcaagcgtgcatcagcggcgttgtggcaaagtccgtgcccaagtcaatgttggcaccacgcgcgaccagcacacggcacagcggcaaattggcatggcggacagcaaggaaaagaggcgtcatatctgcacaaatggggaaacaccattattttcagagcaagcaaaaatataattattttccggtatccgtttcgaccaattccgagccgaatccagggacccgaattagatgcatggtaacaacgatttcatcatcaacaccacccactcactcgtgtttatgttgttcacttggtcagccactggctcatccggatcggcgcccttctccaactgaaaatgccatacaaaattagtgccgacggataaaattgttcatttcactaccaagagatcaacaatttcggtgtgttgtcgtaaaaaggcactccaaagagctgatcgtgatcgggtgttgtcgcgctccactggatcaaccgtccaccgcagcaaaatgttcagctcgtcggcatccagcgaatcgatcagcacacgcaattgttggatgttgccatcgttgatcaggtcgaagaagcggagagtgagcgtctcaaagttgtccacaacagcagcagcagtgggatgttcagtatctgccttaattgtgggggaaatcagttattgaaaaagaattctgagttgaacccgtgcaacacatttttcagggagggggggggggttcattatcacggatcagtgaccccaaaaatccccagtggaaagatgatttttaaaaactaaacattcgaaaatatgaaggggaattgcacttgttgttcgtgttgcaatcacaaccaaaacatcaatgttaaaaaggtttcatggaaacaaaaaactttaccatgcgaatcagcgcagttgaacagtgacgacgaatatgcattggcaattataaataata

SEQ ID NO: 24090 - DNA, 1297 bp, Heterodera glycines
  unsure (1)..(1297): unsure at all n locations
ttgactcgttgtagacctatttctaacaaaaccaaatgaaatttccgaaattttttgttttttaataganaattgtaaatattttgcttaaaattctttccattaccctgcagagtgagcaggttaatgaaattggcctaacgtttcgggattatttttgtcaccctttttaaaaaagcggaaaaaccaatggattctttaaccaatgtctaataagatcctaaacaagtcagtaataacagttgacagggacgaatggcaaatttttaaaattttatagctaatattatcgggagaagtgccatttttattcggaagttttttcagaagattttgggtctcgatgatgttaaaatttatatccgatataaagcattgatcaatttctataatattacccaagcatggattgcttgggtcggtttcactattattaaatgaattggcaaataaggtggcaaataattcacatttctcagcactgttatgatagcatttattttcataaattagattaggtatttcaaagggattgacattgaattttgtatatatttataaattgaatttcttccctttgaaatagcctttttctcaatttggctatggtatttatttgtttgtatttttatatgtaaagaaatgctatcgtgtatagtgcttttttggatgggtcagttttagcttgcctgaataatttagccttttctttgatggatgctattaaatgttgtgggtatttaggagtcaaatcattcttggttaaacgctttattggaatacactcatttaaaatttttaacaacgtactgttaaaggcggaatatttttgatttatgctaaagcattcatatgacaaggcatttagccttgatgctatgactatattaaaatgtaacacattcgatggacaataccaacgaaagtttacgatctttgttttcggttttgttttaggagtaattaatgtaaaaaattgtgttaaatgatccgatgaaaatatgcctcctttaacagtacaatcagtaataattttttcattggcagataaaatcaaatctagccaggaattaatccgtgttggctcattcgtggccaaaacgtaagaaaatctattgaaaaagtcacaaaatatttcaccatatttactcattgaatagggatgcccatttttccataccaaatccttattcggtaaattaaaatctcctaaagtcagtgaattttcattaaaaaatttttgtaaaaatttgaacaaattttctgtttgcttaagtgttgttttgggtggtcgata

SEQ ID NO: 24091 - DNA, 1116 bp, Heterodera glycines
  unsure (1)..(1116): unsure at all n locations
atgtaaagtataattttaggaatctgtggcagctgctgggcaatcgcatcaacaccggtttttgcgacggcggtttttgatgcgcgcattggtcaccagcaaaggcttttcaaatactcggagcagtatttggttgactgcattcagcgtgtgggagaaagcctagaagggtgcaatggagtgccgcctacctatgcgttcatgtaaaaataaaattgtccaaaacaatgattgtgttttttaattagagtccgactttgtggcagtgaaagtcctagtgtttggacttagaggctttgggtactcgttggaaatgttttttagccatttttggggtttttaaatttttcttggaataccatataattccgaaattttttaaatcgtcggctgactccctttggcgctgctgtgctatacattttgctctaaaattcttaatttttcaaaaccgtttaggctcatcgaaaaaagatggcttgccattaagcacttattatgaatataagagcggtgggacgggactaccacaaccgtgcggtttggagcctaaggttgcgctcggtaaaacaaagaaggacggtctgctgtacaaagcgtcacagtacgggactgtacagggctgtgctcagtttatggatctaatggcctccaaccgaataccgctgatcagccgtgcgcgtttttataataattattttaaatactttacaaagctccaaaatgattataatttattttaggcatatttgttcctccgtccttccatgaatatgttggcacctttgtttacgacccgacaactgaagaatgcgaaaaggcggagcgcgaacatgacaaaacaatgcatgccatcactattataggatatgggagagaggaagaaaaggattactggctaatccaaaatagccacggaaagggttggggcttaggtggcataggcaaatttatcaggggccaaaacaagtgtggcatagaagagttcggctattatataaaaaatgtcgtgcctattgngcaataattattttattgcttggcacggctttttatataaagtcagttcctctattccatatntctttaggtctccgataaaactgatattatgat

SEQ ID NO: 24092 - DNA, 2896 bp, Heterodera glycines
  unsure (1)..(2896): unsure at all n locations
ctgcaaatgattccaaaattaatcaaataaattggggactccacccggcccgtagaatttcatttcagctccaaatttttgttttaagcatatgagataaatggtatttggagaatgaaacttcactttttatggccaaaaagcctgatcaaacaattaaccaaattaagcttaatgacgtgcgaatatgggtctcttgaaaatttcaaatactgaaattaatcaaatttaaatgatgcaattaaataaaattaaaatgcagtgctcaaactataattgtatagaattttatctaattagcatttcatttatgaggagtatagtttcttaataaacagggatatgaaggtaatttttggaaatttctggaaattattattaataaaaacattggagtttagattcggtttctacaaatttatcaaaaatttcaaatttttctttaaaaaatttatatccaaaatttcaaatgccaacaccgctttaaatgttgaggttaccggtagcccaaccgttctttacaatacaaattcagtaccggcatcgccggcggttgggctactgtaacacggcaccgtatcaactctcatctataaattttttaaggattcgtccgaaattgtgctggcatttggccggcttgaatcatccgcactgtcatcagctcattccattggatttgttggctgtttgggcgacctattgtttggcgctcagcaattgcttaggtttgaaaaattaaaaaatttcaaaaaaaaatttttttgaaatttctagcctgngcttcgagttcgtccaatgagcttacactggtctggttgcacaatgggaccaccgaaagcattttctgcaggcaaagcggcgcccaaaaatgaggtgggttagaaaaaaaaaaactaaaaaatggtaaaataatttaaaaaaattttccccaggtggacgagctgaagaaagcggaagatcttgagggccaaaagattgaggaaaaatcaccccaaaaagccaagtgggaaaaatatctataatttaaaaatttttttgttttccctaaccaaaattttttagttttttttggtcaatttttttagaaaatttacggaaactgatgagccgttgaaaatactttgctcagtcaaaatccataaaattcataaaaaactaattttgcttcttttttttttaaattttaatttaaagtttattattctctgaattctttaaaaaatttttgtaataaaaactttgtaaatcaatgccaatctgtctacaggtgtgccacaaattccatcatcccaagtccgtccagaaggagcttgtgcccttccacttcaaccgcatggagaacggtagcaaaaaaaaaaatataaattttttaagtgatttcaagaaaaacatttctaaaatttttctaacgattttttcaaaattttatgatgaatttagtaaaattttttcaaattctatccatggaaattactaaattttttttcgctatccttgctatcttttaaagcgaggattcggccggcatgcgcttcggcctgacgccaaatgcacgcgttgaatttgcgctgcccgacacgctgcacgagtccgcggcatccgatttcacgcttgaactacaattgcgtgcaacggcagcaaatggttaaataaaattttttttttaaattttaatgattttttaacaatttttacgttgatttttggaattttctaaaaattctaatttttaaatttatctatttattgagtcaatatttcatttaataaaaatgccaaaaatatgacaataatcacatcagtaattaacatttcatagattattgaaagtacgtattattatatgattaggccgtgttagaatatttctttgatgaaaatcaacgtgttttgctcatcgtaaagtcggagtaaagaatggatgatacaagcgattaacaagtggaaacatgagaccctgaagcaccaaattttcaaattttgaggccctgtaacttttgaagcaggcggaatgcaccgctaaaattaaaaattcacaatacaagtcgaccccgctctatccaatggtatatagcttatatgcattttcccactcacagctcggaatgttcccttgtcaactgaaattatttacaaaaaatcttttgtatgcaaaatttcgatcaatttctaaaaaacccaagtttatttaatttggcggcgaaacgtaaaaaaacttacaaccacttgattgcaaagtctttctatttcttcctgaatcgtattgacgcaaccattgtaaacctgtaattaagaacataatattgcttcgtgttttcggtttctaattccaactatattttgaaaaaaactcattatggtgtttttaaaaccattgaaataaaacaaaaagacgtgatgtgaaatttaaaaaaagcgccaactcttaagtccaatctgcagtgaaagcttaattaatactatatcgtcctcgttttttaaatattttggattttcataaatatataaattttttgaagtgatcatttttggcattttttatttttagccctttatggcagttttataacgagtcatgcgaaggcgctaactttctgctctaaaacagggctgccaagtgtccttatttctaagatttgtccttatttggaggggccagatcttagaaaatgaaaatgtcctcatttctatttcttatttttaggcttgcccaaactttttaaattttttgtgcttattgatttatttcgctgatttaaatgctacaaaaactcccaattttcaaattttttcccggcggcgcctatcggcaactaaaatatttttgtttctttaaaaaattagctcaaaatcacaaaaattcgtcattttttggtcaaatctattaacaaat

SEQ ID NO: 24093 - DNA, 1930 bp, Heterodera glycines
  unsure (1)..(1930): unsure at all n locations
gatgggcatataaaagcgntgcgnactttccttttccgccatttcattccgtcttcgtcttccattttcactattatttccattgcatattcgtcgtcattgttcaactgcgctgattcgcatggtaaagttttttccatgaaatcattttacagtgatttttttggttgtaatttcatcatcgtataaaatttaaatccccctcccatttacgaatttttgtttttaaaaatgatctttccactggggattttcaaggcgctgatcagtgatcacgaacctcttccccttctagaaaatgttttgtacgatttcaactgaaaatccgttttcaaaaactgaaagtcatctttccactgggattttcggggtcactgatcagtgaaatgaccccccccccccctgaataaatgttttgcacggtttcaactcagaatcctttttcaataactgatttttcccccacatttaaggcagatgctgaacatcccactgatgctgctgttgtggacaacttcgagacgcgcgctcgccgcttcttcgacctgatcaacgacggcaacatccaacaacttcgtgtgctgatcgatgcgctggacgccgacgagctgaacattttgctgcggtggatggttgatccagtggagcgcgactacacccgatcacgatcagctctttggagtgccttttttcgacaacacatcgacattgttgatctcttggtagtgatcaaacaaatttatcacggcactaattttgtatggcattttcagttggagaagggcgccgatccgaatgagccggtggttggccgtgagaacgacattaacacgagtgggtggtgttgttgatgaaatcttttttaccatgcagttttttggtgtcattcagtgatcacgaatccggcggcaccatttcgaccagctccgaacttcgttatctgacaataaaaattggattttttttcttcgaatttggtcaaggattcgaatcggaattggtcgaaattcggatgccggagagtttggcaaaaaactgatcacaaatctgacatccatttttgaacaattccggaacacgaattcgaacaaaaagtcgaaagttcaaattttcgaatttcacaaatttcgtctaaaaaatttaaatgatcttttgttgctggatggtgactttcagtttgttactgtgtatttaacccttttcaagaatttgaactttcgactttttgttagaattcgggtcggaattggtcaaaatacggatgccagagattaattatatgtttgtctgtcttggacataatgttgtttccccatttgtgtgcagacttgacgcctcttttcgttgctgccctccatgcacattttccgctgtgccgtgtgctcgtcgaccgtggtgccaacgtggacttgggatcggactttgccacaacgccgctgatgatggcttgcaaaagatcgcaaatggaaattggtagaccaaaaatttgaaaaatgcgtaattttttccgtcattttttccacaacagtcgcatttctcatcgagaatggtgccgacatcaatctgcagaatggtgacggcgaaacggcattgatgatcgcctgttcaagggcaaatgtaggggaaaatttttcattggcaaaatgttttccaacatttccatttgaattcacaggtggacattgtgcgcttgttgctgtcacacggcgcaaatgtggagcaaacggattacgaaggtgggttttacagcactcaaaaatgccatgccacggattttgtctctctaaatttcaggattccgtttcgcacttaagaacgctgccaatgagggccatttggaggtgtgccgtctgctggtggaggagtgggccgcagatgtgaaccaatcaatcatccaagatcgaaccactgcactgatttgagctgccag

SEQ ID NO: 24094 - DNA, 1014 bp, Heterodera glycines
agagaattttaaaatttatcttatatccaagaaaaatgactatctcttattttgagaaattttatacgttataaatgctctcgagcatgataggaagtgcggtgcgcaatcgccattttatttcacagagaatttttaaatttatcttatatccaagaaaaatgactatctcttattttgagaaattttatacgttacaaaagcgctcgagcgtgagagggagggcggtgcgcaatcgccatttaatttctcagagaatttttaaatttatcttatatccaagaaaaatgactatctcttattttgagaaattttatacgttacaaatgctctcgagcatgataggaagtgcggtgcgcaatcgccatttaatttctcagagaatttttaaatttatcttatatccaagaaaaatgactatctcttattttgagaaattttatacgttacaaaagcgctcgagcgtgagagggagggcggtgcgcaatcgccatttaatttctcagagaatttttaaatttatcttatatccaagaaaaatgactatctcttattttgagaaattttatacgttataaatgctctcgagcatgataggaagtgcggtgcgcaatcgccatttaatttcacagagaatttttaaatttatcttatatccaagaaaaatgactatctcttattttgagaaattttatacgttacaaaagcgctcgagcgtgagagggagggcggtgcgcaatcgccatttaatttctcagagaattttaaaatttatcttatatccaagaaaaatgactatctcttattttgagaaattttatacgttacaaaagcgctcgagcgtgagagggagaacggtgcgcaatcgccatttaatttcccagagaatttttaaatttatcttatatccaagaaaaatgactatctcttatttagagaaattttatccgttccaaatgctctcgagcacgctagaaggggcggtgcgcaatcgccatttaatttcacagagaa

SEQ ID NO: 24095 - DNA, 1314 bp, Heterodera glycines
tcttttgcatattgtaacaaattttgtcccctttccaatggccttactaaaattttccaaaaaaatttcctaaccccctaggaatttttttctaaaattttcccgattttcagtgtattttagggtgtcccgatcactatgaaggagtgatctgatcaagttgctgtaaaagacttttttggtcagcatcaaaagttagaacggcaggaattttttcagaatttttggccaacaaaatattgacgcattcattgataaagtgaaaaaaaattatggttaaatttataaaaaatttttggggtgtgttaaacatatgaccatgactgtaaccgcaatttaatttacaattattttcgtcagttaattttggctttttaacaaatgctttttatttttgtgaaattttctttttctcagcactgattatcggagtgcgttcaagcgtgagtttggcttggtcaagaaattgttgcgcattggaagcacgacaacagtgcccattgtcagtgccaatgttgtccatgttaattccaatagtcggcagcaacgctttcgttctcaacattcgccagcgattgtctgtgctgcacactaacgatgcctaattgactaattaaaattgttagatggactatacaatttcacattagacctctttttttgtcttcctcaactgagcttacaacttttacttcattgatttttcaggaagtaaaaaaaaagcaatttattgacgaattaaacaatagacaaataaaatggtaaagaaggattattttatttgtaagaggatccgttcaatacgatagtttaataataaaagcatttttgaaaattaacagagtagatcatcaaaatgacaaaaaaaaacgataaaaatgttaaaattactgatccaataattccttctttcaataaatatggtctgttattccctccatttgagctgatccaatcgaaattccgttcagcgttctgtaaactttttggtcactttgtcagacaaaaaattgcgcatcccttggaacaactcgagcacccatttgcttggactctgaatttaattaaaccaattaaaaatacaaaaaaggataaaaattccaaaaaaccaaattttcaccctttccttttgttcgtccgtctcctccgttggccatccgttgtttaaagcatgccaattgtcccatttgtcagctttaaatttgtataaaaatatctcagaaatactcttaaaatcacttacccccttccaaattgctgggtggctcatagccaagccaagagatccagcagatttcggcttaaaaatttaat

SEQ ID NO: 24096 - DNA, 1211 bp, Heterodera glycines
agaaataacctattttaaatattatctagtcagttcatttaaataatttttatccaaaaaaaatttttttttggatttcggggcagtaccctgaaccgatgcgcccagatttatggggagaccgaatccttcgggaatagcttccctatagcctgtactttaattctgcgttggatttttgctccccataattgtttgagtaccccaaacggacacttgaaaaaatcgatttttttgttttcggggcagtccccccgaaccgatgcgcccagatttatggggagaccgaatccttcgggaatagcttcgatatacctctactttatttttaccttggatttttgctccccataattgtttgagtaccccaaacggacacttgaaaaaatcgatttttttgttttcggggcatttaggcactctgatgctttttctatcaaaaagggagatgaataaaatttttaaaaatttttaattcctttttaaacaggccaaaaagtttaggcttaacttttttttcagaaactgatcagaagcgcaccaaactttgcagggatactgaaaggaagagaaataacctattttaaatattatctagtcagttcatttaaataatttttatccaaaaaatttttttttgggttttcggggcagtccccctgaaccgatgcgcccagatttatggggagaccgaatccttcgggaatagcttccctatagtctgtactttaattctgcgttggagttttgctccccataaatgtttgagtaccccaaacggacacttgaaaaaatcgatttttttgttttcggggcagtccccccgaaccgatgcgcccagatttatggggagaccgaatccttcgggattagcttccctatagtctgtactttaattctgcgttggatttttgctccccataattgtttgagtaccccaaacggacacttgaataaatcgatttttttatttcataaatattttttcagaaagtgctctaaagcgcaccaaattttatttacatgttagtttaggcactctgatgctttttctatcaaaaagggagatggagaaaaatttttttaaaaatttttccttatattttggttatatcgttttgcttttggtggggtgcttggaacagtggaatcatgcgctcccgtccgatagggaagttaagcaacgattgctgactagccaaagaggttcg

SEQ ID NO: 24097 - DNA, 2019 bp, Heterodera glycines
taaattagtttaaattaaaaaaaaagttaatttatattttcaattaatacaaattaacaaataattatattaattatttaatgaataaaaaattaaagacaattttttttattcgtttaattatatgtaaatatatttgggagtttaaaggtagataattaaatcaatgttttaaaaccttaaaattaattataactgaaaatctatgtatattaaacttaattattattcatgtttaatcataaattaattattttttaaatgtttaattaattaccttcaagattaaacattttttggtagttagtgatgaccttaattcattagggttaatcattagttctttcatagtaatttttttttcttgcaaatcccataaatcggggattgctggagaaattttttaaaaatttgaggagcaaaacttttataaaaaatccaaaaaagtaatataataaaaaatttcatagaaactcatttaagagattagctcattcgattttgagtgcaaatgggccgttttcataattacttcccccttcaattagtgaataggtaaagctcacttttttcttgttcatcatccggtctgtcaaactttgttgggcaatcttttttgcttgtccacatgcgatcctcaaaaataatttttttaaaaaaatttgtatttttttttaccaatgggcaacgagaagaacgggaatgagttcggatgcacaggtgacaattgccgattttaaaagaccataatgaagacgataccaaatgtgctgctctttgtgcaacgatgttttgctgcaactgaagccatttttgctaaaataaatataaatttttaaaataataaataggacctggagcaaaaaaaaacaattactcaaaagtggtaaaaaaaataaccgaaaaatttgcaaaaaaacactagcgaaaaaacccaaaatagtgggtaaataatgatgaaataccaaaatgttggtgttatgcctaaaattaaaaaaaatgcaataaacacagaaaatagacccctaagaagcgatctcgtgcatttttcagcgaaacaaaatctgcataataaaaattaaataactaaaaatctccaccaaattcattaccattatgttatatttttttattattcttagggtcggcaattaaaacattttttaggctggtggggggacttggcttcaagcggttgaatttatttgtaaaatttcgaggcatgaaaaaaatatgtacagttttttaatttttaataaagccctaagaaaaaaaaacttcttaactccaacacttcggctttatatttagcattttctcaattatgagtaaataattacaagaattcctaatttccttaaaaatatatcaaaaaattattcccttaaaaatttacatgtatggagggcaaaaattcttgataacggagtctacatcggtttgatcacgacaaaattgctgaataaataaataatacatttaatacaattaattaatttttttttgttgttgtataatttgcctcaattataaaaagagcctttagcaaaagaaagcggaaccaaatcacaccaaacacaaaatttattgtgtttctggtaatccgatcaaaagttgctcgtaaattgccgacatatgaactgaaactttgcagaaaatttcattattaaataataatcattaataatttacattttttattataaaattagtttttttttttacaaccgttggatgatataaatgagcgaaacaaaagcataagcggcgattgtcaagcgtaatattgagtctatggtcaaatgttgccaatcttgtgactcaacagccctgtcgcatccataaagtgcaattttataaaccttaatttatcttttaataattaaaaatcctaaatttttgataattaaaacttgttaaactattagtaataaatgtaagaaaaaaaaagatttttcttgtaaataaatttttttattgtgctaattgttctccataataagcttcgaatttcgtgaa

SEQ ID NO: 24098 - DNA, 919 bp, Heterodera glycines
gattttgcaagaacccttcattttgtcgatgatttttcatcaagtaccataaaaaaataatttcagccaagcgggctcgaaccccagccctcgtctcatatgacccctaggtattaagatcaaaatttcaaaaattcatagaaaattaaatacttgacttctcaatagattcaatagctcattcgaaagctttttttaagctctacaacatctgtgtattagtttttacgcccgactaattttcttaaatttttggaaaaaatcaagtacttgataaaagtcatattttcaaaatctgagttcagattcgtgatgagcctatttttctaccccagaaaaaatgctttttaaaattttactatttttcccatcgggaccacaattctgcacctttgcccccatttttttctgatttggcctgcttattaattgaatttttaagcaaatcccattttaattacctactattttttcaatgctgctctcaggccgtctcagccgtgcattttctccacaatttttgcggtatggatttgcacatttttttaaattttgcattgtagagcaaaattcgaaataatttgtaaaccaggagcgaaaaatccaagcgttacattgtttttaaatctaccattttggatacacaaaaataaataaattgctccaaatctatgcaaaatggaaaattttaacgcattttttcctttcgtttttttttggagggtccccccgaaaagtgggtacttctgtgttttgctacccccccccccgcggaaattcatgtctggggttttcaaggttactgaccacgaaaaaggtgtttgttttgattttgatgacattctggtcatcgatttaacaaaatgtcaatgatttttttgaaatttaaaatttttcgagggctggtggtagcaaaaca

SEQ ID NO: 24099 - DNA, 2016 bp, Heterodera glycines
aaaatattgtcatttgctaatttttctttaaaaaccatttaaggatcccaaaaatttccacagggctccaaaattccccttaaattttcaaagtttaacgtaaaagttggccattttgttatggttggatttaaaataaaagtaaaattcagtcataataatgtataggaaaaaaagtaagattaactcctagaaaaaaaatcaaaaaaaaattagaaaaaatataatcaaaattaaacctaaaatttacagaagagattttaaaaatattaatttttcgaaattaagtcaggcgttacttgaaaatcgaattgatttatcaataaactcagtgttcaccgttgaacagaaatataaagaatttttaaataaagttctgaaattatatgatatttttatacccaataggcctataaaatcgataataataaaacaatcgtatcctcaaaaaataagagacttattttcagagaaattacgtttgcataagcttgtaaaaaaatttcctgaaaaaagtgatctcattttaaattacaaaattatttctagggaaatgaaaaaacaattgtacaaattaagaaatgaacaagagtcaaaaattatttcccaggggcaaaattcagttaacaaatttattcgaaataagttatcaaaagttaatgaaattcctacgttaattgataatgctggaaatatgttttccagcaatgttcaaaaatgtaagatattagcagaaatatttcaagtcttttttaagaaaatcaattgttaatggtccacaaactcaatcaacacagaataagattaaactttctgacattgaattgaatgcgggaataatttggaatatattaagaagacttccccggcgtaattccacttcaccggataatgttccttacattttattaaaaaattgtgcagaaccaattacaaaaatattagcagatatatttaggctaattttggattccggtcaaattccggaaatatggcgaacatcattggtggtaccaattttcaaaaaaggtgaaaaaactgatccattaaattatagaccggtttcattaaccagcactgtctgtagagtttttgaacgaattttgagtagcaaaattttagaatttctgaacagtacaagattctttgataaagaacaatttgggtttctaaaaaataggtcgactacaacccaaatattaaaaacgatggacgatatatataattcgatacaaaagaatcagcaaattgacatcatctatattgattttgtcaaggcgtttgattctgttccaattgatttattacttcaaaaatcaaaaagattggaattgaaggaaaaattcaaaattttttaactaactttttaaaaaatcggagttttaaagttaaaattggcgaagaattgtcagaaagtttcaaaatattttcaggagtgccccagggaagtgtcttagggccattactctttttaatttttataaatgatctgccgtcctttattacaattgaagcggcatcagttggcataaaaatgtatgccgatgatgttaaattatattatgcccatgaaaatgatgaccattcgaatcagttggataaagcaattgaggctttggaaaaatggtcaaaaataaatgggttagaaatttcaactggaaaatgttttgttttatatttagggatatgaaaaaagaatattttattaactcaaaaaagatttcagaatcggataatgttcgtgacttgggaattataattgactcgaaactgaatttttcagaacatattaaaaaaattgtacgaaatgcatatcttagaattttccaaatttcgagagtgttgaaaagcagggaaataaaaactctaacagcagcctataaaacttttgtacgacctcaattagaatatgctactgaagtttggaaccctaatcttaaaaaagacatagataaaattgaacgtgttcaaaaattttttaaaagaaaagcacttagaaaatgtggttttgtgtac

SEQ ID NO: 24100 - DNA, 1720 bp, Heterodera glycines
  unsure (1)..(1720): unsure at all n locations
acattatggaaaaaaatcgatgcgataatttccatttttaaacacaatttggaaatatcaagttaaattgagagaagtttttctctcaaatttccttactatttttctcttctctgcccgccgctaaaaatggtagcagcgacgagtcagagaagagaaaatagtaaggaaattgaagagaaaattttatttttttattcaaaacaatttaatgattaaaagaggtacaacagtgattagaagcggtacaaaagtgattaaaaaacgtacaaaagtgattaaaagaggtacaaaagtgattcaaagaggtacatcagtgattaaaagaggtacaaaagtgaaaagaggtataaaagtgattaaaagaggtacaacagtgattagaagaggtacaaaagtgattaaaaaacgtacaaaagtgattaaaagaggtacaaaagtgattcaaagaggtacaaaagtgattaaaaaacgtacaaaagtgattaaaagaggtacaaaagtgattcaaagaggtacatcagtgatgagaagaggtacaacaaatggcagaagaggtacaaaaatgcattaataatttttaaaaattgtaaaataaatgcctctttttattattaaaaaaaactttgaagcttataataatttaaatttatttagattgaaatcaaattagtttctgaaaaactcaaataaaaaaaaatatatgaaattatttaattaaaaaaataattaattttaataaaatttttcataaaaaaataatttaatttaaattaaaaaaatttattttttattatataacaaacactcttttaaatgaattaaaaacattaaaaataaccataaatataacgaaaataatgtacaccgcccggattcgaacttccccacccctcccccctcaaatgatgctcagaatccccaatcacacagggattctgaggtcttatcgatgttaaaagtaaaatctgatcacgtattcgtgatcagcgtcataaaatagccctaattacatgtttttgaaagatttttggtgaaaaaatttttccactcaaaaatcctggtcacccccctttggactggaatcccaaaatcacttttatttttataacatttttcaaaaaagtgataaaaatgtgaaataaaatttataaaatagagctaaaaattgcggatttttgtagcattttacttttcctgaatatcttttcagaagcgagttataaatttttttctgaaaatccgaatttttacagaatttctagaataacttttttcatatttatgttacaaaagccaaataaaacccataaaattctcctgatttttctccatttttaatgctttatttaatcaaaattggtcaaatcttaggccagatatgaattttcaaattttaacccaaatttccaaggaccaaaaaaataaaaatattttcgaatttttaaaaaattccaaaaatcatgaaacgaaaaacaaacatcatattcgtgctcagcaccccaaaataccccagaaaaaaattttacacccacattttcaacccaaaaaaaaattccgaaaatttctagggggcctagctcgaaaatttttgaaattttccaaacatgtagtacaccattcgatagcatttaaaatgctctaaaaaatgtcctaagtcaatttttcgctnaaatcaacccctgacgangtatgggcccgggactcaaatgtcccgctg

SEQ ID NO: 24101 - DNA, 1105 bp, Heterodera glycines
  unsure (1)..(1105): unsure at all n locations
ttttaattttntggacgaggaatttttcttagcctgtctattgaatttgtcgaacatacgtcggcttgtctattacaataatgctgttatctggagaaattgcatctttaatcaccttggcttacaaaattgtcgaaattccgaattgtcaaatacgagttatttcggtgttcaatagcgatgaaaattttgttcagcaccgattgtgcccgtggcaatgtcgttttaatttgcgttatttacggcggcaacttcgaaagggcgtatattagaatcggcaaggtcagaaatgaaaagcagattttcttctcttggtgatgttgatgtctgccttttcgcattttagttgactaaggcgccaaagtcaaaaacattctgagatggagcacaggacagctgaaagcactgcaacaaatcaatgcttatgtatttcgtgacaaaaacaaattctttaagcctatattgtctcttgaaaatttagctcatgtggattttcggtaggaaatgtgttcataacgaacatacgcagtggatgataattacccaaaaaccgcacttgtatgtcctctactaacaccgttcatataatgaatggttagcgcaaatgttgagtcctattctgtattatagcagaactcaaagatagaaattattagcaaagggtgccgtccgattagtaaaggcatttaataaatccataaattgcttttgcttcgcctccatttgcctttgttgttttagctcatctgagaattagatgaaaaagagaaaagacaaggacatgaacaacaaggctttactctgataaacagagaaacgtagtcaataatatgaactgaaaagatttgcgctttactcaggaaaaacatccggatttactgtgttctggcaccgtacttctgaagacaacagccaaaagcacagtaatcattggactctctttaatttctctctgtcaaatcttgttgtaagtttttgtttcaattccaatcagttcacgtggtgttatcatttatggtcactcaaataaatgtttagatcagggctgccatccgtccttgaatggcaaggacgtcattgaaattgggccctctttcttgaatat

SEQ ID NO: 24102 - DNA, 1026 bp, Heterodera glycines
ccagtgactaaaatgtggtggattgagtcccagtgattgaatgctggtggattgagtcccgttgactggaatgttggtggattgagtcccagtgattgaaatgttggtgggttgagtcccagtgattggaatgctggtgggttgagtcccagtgattgaaatactggtgggttgagtcccggcgattggaatgttggtgggttgagtcccagtgattgaatgctggtggattgagtcccgttgattggaatgttggtggattgagtcccagtgattgaaatgttggtgggttgagtcccagtgattggaatgctggtgggttgagtcccaggtattgaaatactggtgggttgagtccaggcgattggaatgttggtgggttgagtcccagtgattgaatgctggtggattgagtcccgttgattggaatgttggtggattgagtcccagtgattgaaatgttggtgggttgagtcccgttgattggaatgttggtgggttgagtcccagtgacttgaatgttggtgggttgagtcccagtgattgaatgctggtggattgagtcccgttgattggaatgttggtgggttgagtcccagtgattgaatgctggtggattgagtcccagtgtttagaattccggagatttaagtccattgtttggaatgctggtgggttgagttccagcgattgaaatgctggtgggttgagctccagcgattggaaagcctgagaattgagtctcagagattgaaatgctgatgggttgattttcagtgattggaatgtcattgaacgttagtgggttgagtcccagtgtttggaatgccggagatttgagtccattgtttggaatgctgttgggttgagtcccagagattggaatgtcattgaaagttggtaggttgagtcccagtgtatggaatgccggagatttgagtcccagagattgaaatgctggtgggttgagttccagcgattggaaagcctgagaattgagtatcgagagattgaaatgctgatggg

SEQ ID NO: 24103 - DNA, 962 bp, Heterodera glycines
gcagttaaagttcagatggttcccttgataagtgccgtacttcatttgccattttgaaaacatttaatggattttaaatgtatagcaaaaggaagtaaaaaagttttacagacgggatttgttcgaaagataaaagccgacaaagggagcaataaagcaatgctcatacgaagaaacactttaaatttctcatgccagcctaattctacggaaatttagaaatttaaaaacagtaaaaatgttctctcagctttaattattttggccgacaatttgatttcgttgattatgaagatagttctccaaagtgcatgttgataaactatttctttcaggcccaaaaaaaactttttgccctttccccagcagcagtgtcaatcatcgccttatttgtcatttatggccattttaatcattttgtgtttaaccgagtgattttcgccatcataaatactaaagtgccgtttaatttgacacagtgttaataaaatcttttttgacaattaggtgttaattataagaaacttatatttttccgtagactgactgtagaaggcctgaaattcatgaaaatatattagcttagtttgaagcttatagggtggacttttattattttgcgattttatatacaaataatcacagatatatgtactaataaatcaaaataaaaattaaattaaattaaaatttttttatttgtagctttaaaaaatatgattgaaattatttcatttttggtttattttgtcttaatatttttttcgccaacaccggacgacgaaggtacgtctctttattttcgggttactcaccgaaccgattcggggattgtttgacttcaaatgggaacggtcggggagtaaccctaactgttttttataaataataaattaataaataaagaaattttttaaattacaaatttttcagaatacgtgtatcctgaacagctggacctg

SEQ ID NO: 24104 - DNA, 994 bp, Heterodera glycines
gaaaatatgcttacatgatactcataaaaaatacaaataattcaccccacttattctatgaccacattctgaaaaaaatcccagaaatacgaggaaagatatgcttggtcacaataaaataaaaaatggctagtgtgtaaaaatttgcggtcacaaataaaataaaaaatggctaatatgtaaaattggcgtccagaaatttttagactaatccgaagcaaagcacgaatgaattaaagaggcgaaagaattcacagtatcgtttctaatagggaaatattgacaggatattcggctaaaaacgggtttgatcatttttagcgcatttttaggtatacatttgagacaattgggcaggacaagaaaagaatgaagttgatgcctcatgaaactcggaattggttatgtttagtcgaaaatatccttacataatactcataaaaaatacaaataattcaacccacctattctatgaccacattctgaaaaaaatcccagaaatacgaggaaagatatgcttggtcacaataaaataaaaaatggctagtatgtaaaaatttgcggtcacaaataaaataaaaaatggctaatatgtaaaattggcgtccagaaatttttagactaatccgaagcaaagcacgaatgaattaaagaggcgaaagaattcacagtatcgtttctaatagggaaatattgacaggatattcggctaaaaacgggtttgatcatttttagcgcatttttaggtatacatttgagacaattgggcaggacaagaaaagaatgaagttgatgcctcatgaaactcggaattgattatgtttagtcgaaaatatccttacataatactcataaaaatacaaataattcaacccacctattctatgaccacattctgaaaaaaatcccagaaatacgaggaaagatatgcttggtcacaataaaataaaaaatggctagtatgtaaaaatttgcggtcactaataaaataaaa

SEQ ID NO: 24105 - DNA, 2287 bp, Heterodera glycines
  unsure (1)..(2287): unsure at all n locations
aatgatcaattttaagccatttccccttggtatttctcttattaggatagtccattttcgacctttcgtttctccctgggctaaagtcgtagagacctgtggttttttgaattttatagctcattttgttctcattcggttttcaatattgtcgcacacgaaaaaatttttccaacccactaggattatttttctgaaatttcccggttttaagccattttagagttttcagatcaccctgaaggagtgatctgatcacgttgatgcaattgagttttacgataagcacaaaaagttatatggaaatttattttttagatttttcttctcctattaaaaaagttacatcttcagatttttgacctatatttttgttacagcaatttggcattcgggaaaaaatcatatacaattttttctgttatacattttcagattttttttctgtggatcttaataaagtctcaaataaaagaatcgggcgattccgataggcaccggtggcatttttttgatatttaaaagaatttaatgcgcagatttagcaccaaaaaaattattattattagttttgttttttaatgaaagtttttagaggattggtgtcccgattagcccatagggggaccgaaaaattgaaattaattaaattaagggctccaaactgaaggttttcaaaatgagcatttggccaacaaaatcctgcttaaaaaaattattccaatgaaaaaatatatttgcgattttttgcaaattttttgagaaaaattggaaatttgaatttggattttgggggccggcgttgtcgataggcgccacaaaatcaaaaagtgaaaaaagaataaagacttgaaaagatttaaaaaatccaatttttctccgacggtgcttacgcggtagaggtgagctctgtgccagcaaaattctcaaagctatcttgttttcgttgttgacaaaacttaacaaaatggtatcattcgaaaaaattggtaaaatgcggcgttgaaacgccccgcaaaattagccgttgacccccccagactttatgaaaatactcaaaatgttttaaaacctattgacataagaaactaatttttaaaaattaggaattgatcacaaaactattaatatatctaaacatggaatccatctccgaccatgagcctctacaagggaaaaaaattggtcaacaagaaatatagaaatcaatataattcataaaaacaagaaatacactgataaatttatggaaatacacccctaagaattgctcanatattgatcgccaaaatttagtttaattctttcttgaaaaattttttgatttaaaattatccttattcgaaaaaacattattaaaatcagaaaagaaactgagacaattgtttaaaataccgaaatatggagaatgaaagatcaataaaaaggaaaaaaataaaatttttaaattaaaattaaaaatgatagaaatgaataatttaaaaatgaatgatgatgaaaagttaaaacgaaaatttaaattatccgaagcaatttatctttttattgttaatgcacgaatgcattttaattaattattattttttataaaatctaatatttaacagccaataaaattcgctcagtaacaaataatgaattaatagctaaagtatgaaaaaatacctaaatatttagcgaaataattattttaaaaaaattactcataaaccatctttttaaatttaaaattaatcaacaaaactaaagtattcctaacccacttctaatatacagatgttataagagagtataagaaacaaaatattgaacaaaacctacccatatgatttattaacaagtaaataaaataatttattaattattaataaaaaaggattaataatgacaagagaaatttaaagaaaaagtaaaaagcaaaaaaaaagataacaaaaaaacatggacttaaaaaatgaggtagaaatcagtaagaaaataaaaaattaaggagaatgtaaataaattcttataactttcattacaaaaaaatatattacagacataaaatataaagtaaatatactcttgggagtactaacaaataagatgaaaaattaaatcaaatcataaacaataaaacgaaataattaagtaataaaatagcgaaaaatacataactatcaggcgaatttaaaagcaatcaaaaaatataaaaatggtggggccagtcttgaagttgcttctctattggtagcattcaaacttctattcaccgagaaaatcgagatagaggaagaaacaaata

SEQ ID NO: 24106 - DNA, 1013 bp, Heterodera glycines
tgcagtaggatttggatttttgaatacaaaatgggagaccggtatagtggaaaaagaaaggaaaagccgagaaaagtcatgggaaccgccatccaatgctttcttaaaatggttcgggtgtgcttcgatccctcactctttcgtcgcccttcccacactttttcttggccacgaaatgcccccctttggccattgtttttgcctaacttcgaatcaccaattgatattttgttggcactttcttgacttgcttttctcagagtgtaagtcgcgaaacacgtgccctgcgggtcccgctggtccgccgggcgacattggaccctcgggcgtgcccggcatcccgggaaaagacggcatacccggacaggcggccgaagactcgcaaaacgcaccgctcaaaggctgcttcgtaagtgccaacacgggagggaaaatatcatgtgtacaaatgttaatttttacgcatggttcagaattgtcccgccgggcccaccggaacgccaggcaccgccggaaggcccggcattcgcggaatgtgagcaatacaaattcataaaaagggcataattacacagtgtgtcaacaaaatgccgaccaaaatatgagtgacataagttaaacaaattgttaactaagaatgccaaatttcggcaaaaaaaaactaaatcctattttgtctataaatattttaaaatattttatttattaatgtaacaattttattgatatgcttttttcttgaattggcctttttgttgggccaattatttgtccgcccgtttaattcaatttaattttattttaggcgtggtcctaagggttaccctggccaacccgggcgtgacggaggtgatttttcggcatttttgtgttttaaactcaatcaccgtccataattaagtgcccggccttcccggcgaacaaggccaagtgggagagaatggattggacggacggctgggacccaccggattcaaaggcaaagacgaggagaagcaattgggacgcaaagg

SEQ ID NO: 24107 - DNA, 1847 bp, Heterodera glycines
ttttttttttgattgatttggttttatttttgtttgattttgtcaactgtttcagctcactcgtgttttgttgttaggttgaatgtttgacggcggtttggtcaggttttgatgagcaaatggacgaatttctgttggtcccggcggtcgtggcaccactttttgtcgttctgacgacggcaaaaaagtttgaatgggctgggcggacgtattcagagcgagttgacaaaaattaaagaccaaaggcgccaaaaattcactttattttgtaccctcaaactcaaacttgggtaattaaaccataattaattaatgaacaaatataatccgacatgataaaatgggcacaaaggggaatggtaaggggaaggcgcagggcacggcacagggaaggcgcagggcacggcacggggaaggagcagggcacggggcaagcgcacgggcacggcacgggaaaggcgcacgggcacggcacggggaaggcgcagggcacggcacaggaaaggcggacgggcacggcacggggaaggcgcagggcacggcacagggaaggcgcagagcacggcacggggaaggaatggaaacttcggagggaaccaatgagcgatctgaaatcactgaaaacccagccccttttatacggcttttttgaaaccatagtacgctccaatttataatttttaattaaaatctgtttttgttatatccgtttgggttttgccattttcccattaattgtttgttttccactttttcctttacaattccaattcctttaatatattcaattaattattaataatttgtttacgaacgcaatccttaacagaattcgccatttaatattaattaattttcgttcctttcattcctgaggaaatgcacttttccttttcaaacaattttccgttattcatttcaaaaggtttttccatttttatgtaattatattttcgatagttttttataatattatttttccaaaataaatgtaaaaatattttttattatttatgttttatttttccccattttattttctattgttttttatttttccccttttttattttgggttttatcttaggatttcgcgttgtcgcgacatctccaatgtggcccaaattttaggcccccagccacagccccttgcttctcccagttttaagtcttggatttgtcaaataaattcaagacttcaaattaatattcaaaaattctcttaaaatttttttgaacccaattcaaaaaaggaaaaaaatttgcagtcaaaaaattattcgaatttctccaattttgtttccataatttccgaaagttattcggtatcataatgccaaaacaaaacgaaatcgttttaaaatattcctttctggacttgacttggtttcttgatatcgaagctgttttctacgctatttctaaaacggttataccaaaccccagatttttgaatccggttttcagaaaaaatgccttgtggtgaaaacaatatttcacatttcactccataactttgtgagttcggcacggatcgagaccgggataagaccattggaaagagcagctcgagctctacaagaaggtatggaaagaaaaaatagttatttctgggactttttcagaaatcagaattaattctccaatgtggcccaaattttaggcccccagccacagccccttgcttctcccagttttaagtcttggatttgtcaaataaattcaagacttcaaattaataatcaaaaattctcttatttattttttgtctgtacaatcgtgtcagcctgtactctatccgagctgatttgtctgctattataagtgaatataaaaggctaatcaaa

SEQ ID NO: 24108 - DNA, 1759 bp, Heterodera glycines
acttttatttttgaacttttttcaaaaggtgataaaaatgtaaaataaaacttataaaatagagcaaaaaattgcgaatttttgtagtattttacttttatacagaataactttcccgaagggagttaagatttttttctgaaaattcgaaaatttccaaaatttctggaataacttttttcatattgatgctaaaaatcacaaataaagcccataaaattctcctgatttttctctatttttaaagctttatttcatttaaattgaccaactcaatcatatgttatgaaatattagcccaaatttccttggccaaaaaattggaaaatattttcgaatttttaaaaaattccaaaaattttgaaacggaaaacaaaggtaatattcgtgctcaggacctcgaaataccccaaaaaaatatttttcacccccattttcaacccaaaaaaaattagaagaggtacaaaagtgattagaacaacagtgatcagaagaggtacaaaagtgattagaagaggtacaatatggtttgaaagtaaataaataaggaaaagtttttattaaaattaaaaatcgaattcatttaaatttaaaaaatttttataataaaaattttttagtaattaaaaacaacattggaaattattaatggaatatttatttaatttgaaattaaattaatttttttacaaattcaaaaagaaataatgaaattctttaattaaaaaaaataaatttaaataattaaaaagaaatcttcaaattaattaaaaacagtgaaaataacgaaaaaattcatagaaatataatgtgttgccgtccggatttgaacttgcccccacccccctaaaatgatgcctcagaatccccaatcacacggggattcagaggtcttaacgatgtcaaaagtaaaatcagatcacgtattcgtgatcagcggtccaaattacccctaaagacatgttttcggaagatttttggcgaaaaaatttcttcactcaaaaatcctgtccaccccctttggtcccgaatcccaaaatcagttttatttttgtatcttttttttaaaatgtgataaaaatgtgaaataaaatttataaaatagggctaaaaattgcggatttttgtagtattttacttttccagagtgacctttcagaaccgagagctgaatttttttctgaaaattcgaaaatttccagtttttctggaataatttttttctaattcatgtagaaaacccaaataaatcccataaaattctccttatttttctctatttttaaagctttatttcatttaaattgaccaactcaatcatatgttatgaattttcaaatattagcccaaatttccttggccaaaaaattggaaaatattttcgaatttttaaaaaattccaaaaattttgaaacggaaaacaaaggtcatattcgtgctcagcaccttaattaacccctgaaaaatatttttcaccccaattttcaacacaacaaaaaaattccgaaaatttctagggggcctagctcggaaatttttgaaaatttccgaccatatatcacaccattcgatagcattttaaaagctctacaatttagctctaaggcattttttcgattaaatcaacccctaacgagttatgggcccgggactcaaatgtcccactcaggccaaataatttttctatttccgggaaaaaactgaaatttttccgaaaaaaataccattcgatagagctcgaaaaactatgtgttggaag

SEQ ID NO: 24109 - DNA, 1544 bp, Heterodera glycines
ccgtaatggttcaacttgccgtattcggctgcacttttgaagagtttgatcagcctaaggggggggaatgttctcgaaatcgccattgggtgggacttgccttcccaattcgatcagtgaaagagtcaatgccatctgaggggggggagattggcacttttggaaaagcaatgggagacggacatggaaaatgaccagcacaattggatagtcgaagaagaattttgtcatcacaatgcgcgagagaaggccattgaccagcgaaacaccgccgtacaaaatcaaactgagaaaggaaaagccaaaggcatcggcggatcaaacgaaggaaaattttagggggcggggtacagtaagaggagaaaaggggaaagggtacagtaagaggagaaaaggggaaagggtacagtaagaggaggaaaggggaaagggtacagtaagaggaggaaaggggaaagggtacagtaagaggaggaaaggggaaagggtacagtaagaggaggaaaggggaaagggtacagtaagaggaggaaaggggaaagggtacagtaagaggaggaaaggggaaagggtacagtaagaggaggaaaggggaaagggtacagtaagaggaggcaaatggcatttaccgtaacaaagactgaccttttgaccggcaccgattgttggagaagaaagtccatttggagaggaaacgggaaaattgtgagtgaaaatgaatgaatgagaggagaaatgtgcaaaaggggggggggaattcgttcaaatcgaattttgagggggtaaaagggaattcgggcggagatacgaatcttttggtgtaaatgacctaatttgggataaatggaagaccaagtcacttttggagcatttatttcgcaaaataaataaataaataaatttaaaaaagtgaaaataaaattaaaataaatggaaaaaggcaaaaaataaacaaatgtttggttgtgcacaggaaaagctgttctgtcaagtgagatcaatgggtgcgtttaaagcaatgcttctcagttctcagctgttcctttttcccttttccgtgccgtttcgccttccgccggtgccattccctccgtcgcccctttctttccgtttgtttcttcgtcatccgaagaaatgataaaaatcgccggagggttaaatctcaaaaattccgctgagtcattctgccgattattcggttgaatgtttccgtttttcgtctcaattgccgccatttcgtcaccttttgggatttgatcatttattatcaaccttttacaatgctatgattttttcccgctttttcttttttttctgttggtttttccttttttttcccctccgcttttccttttcctcctccgttttttcttttctctctccattttacctttttctcccgcttttccttctgtcttttccgttttggcaccttttgccaaatgtttcaccgctcctttcagtatttccgatgcttttctgactctcagcccaacactttctctcgtcgtaatgccttcgtcagtgcaagtcgactgactgat

SEQ ID NO: 24110 - DNA, 1976 bp, Heterodera glycines
  unsure (1)..(1976): unsure at all n locations
ttctcaaaataagatatactcatttttctcagatataagatagatataaaaattctgagaaattaaatggcgattgcgcaccgccctccctctcacgctcgagcgcttttgtaacctataaaatttctcaaaataagagatagtcatttttgttggatataagataaatttaacaattctctgtgaaattaaacggcgattgcgcaccgcgcttcctatcatgctcgagagcatttgtaacgtataaaatttctcaaaataagagatagtcatttttctcggatataagataaatttaaaaattttctgtgaaattaaatggcgattgcgcaccgcacttcctatcatgctcgagagcatttgtaacgtataccatttctcaaaataagagatagtcatttttcttggatataagataaatataaaaattctttgagaaattaaatggcgtgtgcagcgccgccctccctctcactctcgagcgcttttgtaacgcataaactctctcaaaataagagatagtcatgtttcttggatataagataaatttatataattatctgaaaaagtaaaagaaaatctttggtcaaatgtcttttcaagatttattctttctattattaaaacttaatttttttttttaattataaatttattggataatacatatttagaggtcttgagtgttagaaaatttaaattttgggtttaattaagacacaattaattcgaatgattaactaactatacataatttactgacggaacccgtcagttggcccccggcacgtttgggccccagcggttttttggttataacttttttctttgtcatccaaatcaaacattgttgctatcattcaaaagctgtaaacgtcctctattagcctgcaaaattttgaaaaattttgtaaaagttcaaaaaaattatggccagaacaactcaaaaaaccagattttccaactttatggccataaatttgttcaaaattgacgaatttttttggaaatttgcatgctaatagagcatctgaagggctttcgaatgataccaataatgtgtttgatttggatgacaaagaaaaaagggtactttcccattatgtgaccgcaagccaaaattttaaaaaatcaacaaaggggcgcgcaaatttgttgcaacgccaaaccgggattcgtttgtcatgagagctgttcttatcacaccgcgcatatcactgccacaattatacactctcgattgacggactatccctttttcttgcagaaaaattttagcttgcggtcaaataatgggaaagtaccgtccgaggcgcaaatggaaaaaaaaacagataatgccgacaaaacatttgatcaatgatcatttacaaaatgaatgtcaagtaaaaaaggcaaaaattgcagcatagattaataaatgttcatttttattcaaaaaaaaaaaactcgtagaaaatgcacatgaaagagatctcagcagtaaaattcaattttgaagcagaaatgaaggcagacgaacgcgatatttgcgcaacagttccctaagttcaatgtttgggccggcaaaaaatgcttccaaatgctgtctgagcctgttggacattggttcatctaaacaaaaaaaaaagactttctgacgcacgcatttgtgtcatacaaaaaatatctttaaaaaacataattttatcgggtatgcgtatcaacatttttgaacgtgggagtggggagtccggcgaatttcgccgataggcgcgcgcatgggaaaatttttttttcttcgaaatctgagtgcaatttgttaatggatttatttaaaaaggacagaatttttcgattttgacgtacaaaattcttggtgcaacggaagaaaacaaaaaaattttggttgaaatatgctttttatatgcntttttccatttctttaccatgttnactgtgntctttgattttgngaaaatgactaccatacatgt

SEQ ID NO: 24111 - DNA, 1481 bp, Heterodera glycines
  unsure (1)..(1481): unsure at all n locations
ttatgagggacaaatgaagccgatccaatttgggaggaaaagcagcgtttgcaaaagtgcgcagttcgccatgtttgttggtcgacggtccgaccatcttccgtttcatcgacttgctcgacaatcgcgaactcttcaggtccgttcattgttttgcactatcaaaccagacagatntcatttcgagtctcaaaaggatgttttttggtaacaaaggtcaatttcgccccttttggaatttgtcaaaaggaaaagtcaaagttttgaattctttttttctcccaggaaattttgcataaattttttgaattttttttttttgataaaaaaggaccagggaattccacgcctggaaaaaattaaataacactgattttgattaattgaaaaaattaggcaattacaatacaatatttttgcttatgatttaatcacgtgcagttttttagaggcttgaaattttttccctcctaattaaagctcattttaaaataattcccattcgacttttttcttgaatattttttgattaattttttttcttaaagaaatgtcataattctccaaagtgtttgggcgtatgtgaagaaaatgaattcgtcaatttacaagcggatgaatggcatttacacggaaaacgttggtcgaatgtttgtgtttctcaacgaattcgtcggtgggactttcgtcgagtcggcgtccattacagtgcccgaattacagtcagccgatttctgtttgccctttcttttccttttcaccttccgtttttcttcagccaagagcaatgcctcgtcagaagtgccaattatttgttggaccattggaatgccattggaattcgtccgttggttctttgctcatcagaagagacaaaactgcgacttgacaaatcatttgaacacacattgactttgctcgactacgcccgaggtttttcagagttttggttttaaagtgcaatttatgaaaggaattgactgtgaaaaatcgcttcttgaaagggtggaggatttatgcagaaaagagagccgaggaaaagcactattccccgaatattggacgcaggaaaaattgttggagggcatttccaaaggaacgctcaaaaaagggaaatttaaggtgggcggacggagaaatgcgaatgaatgaccgtttaaatttaaaacatttcagatttccttcgaaaattatttggaggctttcgttgagttcgaaatggaggaccaatggtttgttaaggtcggttgacccaacacaaaatgcggaaaacaattctcctcccaaaaatattaaaaggggtcgaaatgtatgaaccgcgcggtgcacggcgacgttgtggtggccgaattgctgcctgaggagcaatggtaccacaatttctcctccgccctttcccaatttaaattttgcaggtccgcccctgacagtatcattcggttgagagacgcggaggaaggccaaacggcggagatggcacc

SEQ ID NO: 24112 - DNA, 1381 bp, Heterodera glycines
catcgcgtctacaaatgccacagtagccgacagaccagacgctgatcgcacctctacaatgtctctgtagcgcctgttattaatcctggttgccgaaaaaatgctggtccccacatagaattgtttgttaacactattttttggtttttctattattttagtagaaaaacaattttatattttggaagtaatataacttctagcggattttgaattttgaatccagttatctgcgcccatgcttcatctacaaggtccagattttgtagatccggtccaatttgatgcggaaagaatcgctggtttatgctatcattactctcatcatcatatacattaaaatcgacatcaattgcttttatctcatttcttacactttttataatattataaatagtcccactttcctcttttgggttttgtgagtataactcataattcgaagaactaaaatattcaagcttttccacttttggtactgaaattatactgcctaagcgtggatactgattcagttttaaattttgatgaactagtgcaaaatatggccatttgtcctccttatccagctgaacagccaatgcataattatccattctctgaaaaataatcatccttagctgatcatctctgtttttatccttttttttgtcttatttggtattcatcgctttctggtttaaccattgcccatgcaatagtatcagtacatcttaaacctattccagaactagaaggacagtctatcaggggtggggcgcgcacagaaaaatcccgcggtcgcggatcgcgcatcgcggattcaatttgccgcggtcgcggatcgcggtcgcgtcccagccctgcagtctatgttattaataggttctgttggattcttttcatcactttttttagtatctctcagttcagatgttttttcagtatcacattttattgccaaagctgccattgttttctaatcatttctctacaatgatttatttctgcaattcttttcgtttccttttcattttcggaaaaagaatacataacccataaaaaaaaaattgtcaagaaagatgaattatttaatacatgaattatagaatgccataattaaaatctataattattatgcgtagagagagaagaaaaaggaaaaagaaaaagaagagaaaaaaaatttacaaaaaattacaaaaattaaaaaatcattttcatttaaaaaatgaattttagagtgagagagaaaaaaaatttacatttatgatggttttccaaaatttttctattttaaggtcgtattttacaaaaacaaaaaatattgagtggtgtctttgagatttgtaaaaatgccgtaatatgaatgtacaatatggaaatatagacaaaatcagaa

SEQ ID NO: 24113 - DNA, 1582 bp, Heterodera glycines
  unsure (1)..(1582): unsure at all n locations
gcttagtgctatcgaagaaatgaataaaatatttagttcgtctttgagcaaaaattatgggtaatttttcgtcaaaatttttcatattggtggttttttaaaaaacgactctgacccattaaaaataaaaagatgtaggcataattatcatggtgaacacttaaaaacaaaattacttgttaaaattttgtggagaataaatgtcaataattaaaattatgaggtgaaaaattctgccaatctttcggctctaacagccacaagcacgctggaaaaggtgaatcgtgcacccatttaagaggttgcactccttcaaagtacggctgttatcaagccgacgtcctgaagaattttaatttatgcgcaaaataagaatcaaggattatcgaaacaagtttaaaaaattagtttctcttatattggcacaaatcgctaaaattagtacaaattctgttaataaattgccactcggaactctgtttttcgaaattgggcctcttaatgccaaatttttccaggcccctatgaatttttatatttttttccaagactttccaggttttcaagacatttttagttttcagatcaaccagaaggagtgaccagatcatgaattaatacaaatgttgtattagcattattttttgtcagatcttatcaagtacacaaaattaagtgtctccaaatttgaagttataattttaaacgccgaatttgtgcgaattttcatgaaaaaatgcaccaatagtttttcttctacatatttctcaattttttttgtggttcttaatctttataagggcacacatccatctcaaaattcgtctacattaacgcaaaaaaaacagtctaccagcgaaaatcagtctttgatgatcatacagaatgccttcaatgcgctcaattttggttttgatttcctcgatggtgttgcttggaagaagatcactgaatgtgagtgttttgccggacataatttttacatagattttaaatccatgccgattctgtgcacggaaaagggaaatgcaattaacaaaataataatgaagatggatgggaatttaattcgaaaggcatcacggcaatcatctgattttagtcccacaaataagggaaaaaccaaaataaagaaatttaaagcaaaattgaggcgctgagcacaagtctgaccacctatttgtacantttcnatactttgaaatctccccaatatatctcctttttatattttattataattggtaaatgttgaaaactctagcgaaattaatcgttttataaaatgcaatttaaattgcttgaaaaatattttttttacttttaactaattttttataacttttgttggatttttttaaatttttaatcgactttttattaactgattggttttcagagattttttgaaaaaacttagtagttcatcataaaattctgaaaaaatcgctgaaaagtttttccaaaaatagtttcatgtttctgacgaagaaatttcctaagtattttttttgaaaaaatttctattaatatatttttttaaatatttttcggaaagaggaggacctgctccgcaactgat

SEQ ID NO: 24114 - DNA, 1384 bp, Heterodera glycines
tgcgtcagcaccgtgatgtcgggcaatttttttacaacctttacagtcaaaacaacacaaattcgtatgaacaacatgtcgacgaaaaccatgttcgttatttgatttctctccgtgcccgtgtggagggaggcgtaagtgaaacgaaacaattaaaatttattaaattacataaattatacttcctaattggtcaggtcgagagtgtccgcaattactttaactccaatggtgttatttctgcatattcgtctcgtttcaattgcgactttgtgtttattatgctgggtggttctgtggtgagtaaattatccaagtttaagtgtcaatttttaacgaaaaattagaagttttatgggctcatagtgtgtcgatagacgcttctgggtgaaaaattggaatttttgtaatttttaacattgtttcaccgaaaattgactattttaggttagcttttgaaaattttaccctagaacctttaaaaataagtcgaacagtgattttttgatttataatttccctttaccaacagcatcttttattaattttttcataggatgtcgataggcgctgctgggtgctcaaaaaaactaaaattttttaaattttcttaaattttttttttttcggtgacattatatcccgacgaattttcggcggtgacattttgtgtgcactgattttctacataaaattgatgaaattttgggggtttttcctaaataaacatgtgaaaatttataatttcgactaacccgtaaaccggtcccgggtccagaaatttgaaaatccggtttgaccggtttttgagaggcatggccaggaaaccggtagctcctgaaaaagtcagcccggcactgcagattcggaaatctcggtctctaatttttaacatattatcaccgaaaatgacttttttcattacctgcggcatcttttattaatttttctctctttttttagccgtgggatatagcccaagtgacgttcagtgtcgagactttcgttaacaattgtacagcgctgatggaatttatctttttccgtgtcattaccatggtgtgatataagtggcaataatttttaaatatttaaattgctcttacatatttaattttcaaattgcctttttcagatcgagtctggtgatgaaccgcaaatccctccaatgcaatcggattcaccgccgaatttggacgaatgatttaattactgtctcgacaaaagaccaatcatttatttatctgttttgtttcgctttcaaatttttttcccattgattctctatcaagtaaatcattcgccaaaaaaagcaatttaattaaagttttgaattttaattaaaaaaagaattataaatatagttgatccaatgatccatgga

SEQ ID NO: 24115 - DNA, 2191 bp, Heterodera glycines
aaaaattatataaaaaaattaaaattaagtaaaatttatttaaaatgtagacaaacaattataacggaaaaaataaaataaatcagctaattctttaaataaaaattaatggtagctattataaataaattaatatagctgcggaataagtattttagttgtaaagaaacaaacaaataaaaaataacataaaacggatgtattgttttgataggtagaaacttttcagcgaacaaagagggagggcttcaagtttaatgttaataattattcattagtatttttttggtaaaattaaatcagtattattaaaaacaacactaatgcatcaaagagtaataaataattatatttctaattaaaagcaacaaaaaataaaagctggctgattagtaggtttcaatcaatttaaatatataaaaaaaaattttaacaataatccaaaaccatgtaattttgtttgccattcatcgctgtgtcaattgccaattgtcaaatcatttcgttaattggcaatttttgttcattatccaatttcacttcatatttcaacctctgctcattcaacaattttggctcaagatcatatgtaaaaaaattatttaatttgtaatccgaataaaaactcttatgtgaattaaaaaatataagaattgaagaacaaaacaccgcatttattattgttgcttcaatttcattggttcttcggccgtggttctccttagcttgtttcccttttgtcctctttcctactgttcgtccagcggatctttggccttggttcgtcgctgggactgtacgggctcctttatttggctctcctcccgtgtctgcttgtcattcccaatttgtccttccatctccgaacttggggccagcaattcggttgtggcgccatttggttgccgtagcggagaaatgtcatgggcacgtggatgtcggtacttccgcccagtttggctctcattaaggtgccgtccacggtgccatttccgccttttgttgatccctcgatgcgtggcataatgcacctttctcggagccattccgcgtggtagttcccaacgcatccgctccttctctgcatttctctcggctctccgtttttcgtacatcttcctctgttcaagtgccatttccttatcaaatttctcctggcgtgccaattcctcaaaggaatttctggctcgaggtctccgggaagcacttccatcggttcgaaagggttacgtgtcgttccgcccgatgatgattcgacattcgtttgccgttgagaatcctttcatgatttttccactttctcctgtgctgcctttctttcactctcagcgacgcgcctcgcgtcatcttccatgaatttgactttatcttttcgcagcctttcttctcttagagccgggttagccttctcttgcagctctcgtctcacaaattcagtgccgcccaatccagcgaacaacttcctcaatcccgaaagatcaatcgtcctcccccgtcgtcgtcgatacgtgcgtgtttgctcattgtacgcaacttgtgacggaaagaacgggtttcggcgaggaattctgtagttgcccgggcgcagtggatcatatggcccattcgtctttggtttgcgcttgcctctgacgtcttcggtcgactgtctctttcgaattctctccttccttggttgccgctcattcctccctctgactggagatagactcgattctgtcgtgacgatttgagaatcctgcatcaccgtccctggaggcaaactggactccattgtgacagattgcaagtacatgccttgcatcacagcacttggagaatccataatggcagtcacttgaatttgactgacttcgtcctccgcagaagggttaatttctagagggtacaaaaggttaatcgctcgcacaagagtttttgcttttgggtgtactcgggccgggcgcgcgagaccatccctccccttcaagagattttcgacttttcgcattaggcaaatggacagtggggcttccccttcttcgaccaagacaatatccccctctcttgggagactttctccagcttggttgttacgatctctttctctgagcgaaagtaagtactccgatctccacagtttccagaaaacgatcaattcgttttattgcaactctcatccaaagaaggaattcccccccttttccggggt

SEQ ID NO: 24116 - DNA, 1672 bp, Heterodera glycines
  unsure (1)..(1672): unsure at all n locations
gggtgtattttcgctttttcgcattttcttgtgaaatctcncaaaaatgaccaaaatatgctctaaaaatgcaaaaatggcaaaatatgcatntattcttgaaaaccccccaaaatatgcttaatatgcactaaaaactntcaccaaatcaaaaaattttaacgtagaaatgctatttttgagcccctttgttcatagcatatgcgcagaaaaaatatgcaaaatcatacaacttcgaacccctattaattaccatttcaaattgaaaaactaaaaaattaaaatttagcaaaaaatgataaaaattattgcaatttatccacaaatctccaaacattgaatgcactgaattctcaaagaattggtgagcattgaaacgaataatttggataaatattgcattaaaattataaaatataaattatttagccaaaggaaaaaggctaaaaattgttcaatcattggaaaataagcgaccaaatttgacgcataaaactcactttgattacatgaatcagttgaagattatgctggcaaacaaatcggaaattgaaaaagtgcgaaacgcaacaattgctgccctcgggggagaatttgaaaaggaaaaagtatcgtaaaacaaaaataataataaattaaaaaagtgattaaattccacaggaaaatgatgcttattcaatttgcgcattaaatgaagcattaggaaaagccaaagaaatggccgaacattcggaagacaaattggacgaaactgaacgcatttttgaaattgcaagagtaatgtggaaagcgatcaaaaagcatgacaaagtgcgaaaaagggatgtaataagtcaaaaaaaaattgaaaaacatttacagaatgccgtgggcattgtgccgcggttgcgcttcatcggtttagtgctttggcatttggcggttcggcaaagtccgctaattgaccagcagcagcagcagcacaacggggcaccactgctggagttcactgccaaaatgaggccgaacattgacccgcatgacccaacggaatggcaaacgatgctttggcatttcgaccaaaatttggcgaacgcagcgatggatgcggaggaaggccaaaaagaggcgaatgaggggggaattgaggacggaaaatgggagggggaggaagagcaaaatgatggggaagaaatcaaattgctgagagaattgggggagaaagtgggccaaggccgggcacaatttggggaccgggaaaggcacgccgaactcggcaaaaagttcagtctgttgaagaagtcgactagcaacgacggagcagcccatgggatggtcaacttttgtgttatctatcgagcatttctcgtgttcggctcacaatcagtggacattcttttgttcatcagggtaattaattaattattaattgagcaattagtttttgattgttggcactttttcactctccagggcgtttggaaggtcatttcaatgcaaaaacaatggacgaatatttggagaatggcaagcaaactgagaccaattcgtacatgttgaccactcatttgtcacttcgaaagatgaccattcattcaattgctgacagtgggagaacattttggatacaaattttaatgtgaagaattaagaaagtgatgaaaactcataattgttggctgttaaatttaat

SEQ ID NO: 24117 - DNA, 1306 bp, Heterodera glycines
caagcaattatctattttggttttttacggcactgatccccttaatgcgtgtgccaatagcccagggcgtgccccgtttcgtgtgccaccacatattcctacatggtcagaggaagtgccaaccattaaattttgccattggcaccaacacgaaacctcggcacattccgagccgatgataatgtcctggaagccgccattgcgaccgatgtactcagtgaagcagctaaaatgagcagggatttcatacattgatcacacgctgctgatcaaacagaatgagcccaacatggagaactatcggagttatccgagacggtgatcacttcccttgctactcctctgatcagtgcctagtgatcaatcatgtcttcttctctgatcagctaatactctttctcttccattctccgatcaatttccttatcgctctctgatcagacctgtcgccccgctctagcacatatctaatcgcatctgttgcctgaacattctcgcggaaccgtaagcaggtcgactcctcccacctgaaaagcgggagaaaggggggggggaggcaattacggcggaataatcgatgcacgcacattttaatgccccttctgatcagattttgaaactttgctaaattggggaggtgcatcaaacagtttgggaaaagcaattaacgagacgagactctcgaaaaagtaacaaaaaaataaaactgactatcgccgccccaaatttggaatgggattatgttggagctccattcgtacacctggccggcgatcacctgagttgttaataacagcattatgcccggcttttttgtcggcaatcgaaaatattttaatttttttgttgtaaaatcattaaaaatttaaaccattaaatcagcaaattttttttaattcagaaataaagcaattaactgctgtaaaatttaaagcacttaaataaagcaattattaatatttgatgcatttaaaaaaattctgtttagaaaatgtcttaaatttggcattttcattcaatttttctataactattttagcattagcaattcttttagctccgctttgatttttttgcacaaaacccgagtgctaaggagcatcaatttcaaaaactgcttttgctcacccacctcaattaaagttgaaattttgtaaaattctttatcaaagcaatcttctgctaacggccctctaacctgaaatccccgcgattttttcatttgggcccagaagccctttgagtgagcccatatctcccccagctgttgatgaacggtccggtccccttccctcctcccttcggt

SEQ ID NO: 24118 - DNA, 517 bp, Heterodera glycines
ttcatttcgttttatagccttgtcaagttgtcatgttttcagttttgaaatatactttcttccaatttccccccccccccccgcttcttttgcctgtctccgatgccgtttttgttgctgctgcggctttgtcctcgacacccgctccacaatggcgtaatattggggcccaacaaatttgtcggagccgcccataggctcaaggccgggcagaagcggaaaattggtggtggaggacgacgaattgggatgaagaagcatcggacgaacaaaagggggcgcaaggaaaaagagaagggcaaggaaaagcggaaaatgaagcggaacgaacgaagcggcacgaggaagacgatgaagatgatgatgatagggatgaagccgaggaaaagcagtgccagaaaggagcatcttttttggggggaagggaaaatggggaagaaccagtgaataaatgggaaaaaggggggggggcggtgaagagggataggaaaaggatgagataaagcacaaaagggga

SEQ ID NO: 24119 - DNA, 1964 bp, Heterodera glycines
gtagagttcgtcgagaagtacaaaaaatcagctggtatcggcaagcttagcttgggttgcccatcgacagggtcgggggcgaggctgagggtcctccggcagatgtgcccgacccatgacgggctccaagtgaatggattaagaaccggacccggcctggtagatagctcttaaaaaactgaacaaaaaattgttcttaaccgggccggtccgggttccggatcaggcacttttggtgcccgaaagtggtgcgataggcttccggaaaatgaccaatcaatcactgagttttttgtggatcgcccacactgagtttttttgtggatcgactcagcacgtatttaaagtattaacattttttcaagtttaaaaaattaaaaatgaccatttttattgttttcacttctttaaagctaaagcgaacaattaaatcataaatagacaattaaaaaaaaaataataataattaaaaaatttctattcattaaaaaattttgcttgtaaattagctaaaaagcaaaaattaattcttggtatcatattcgatcccccagtgttctccattagtctgatacatcacagtttggaagtcggttcaaatcccaccccgggggccagttgtcttttacacaaaagatcagcagaaaaatttctgaatttaaatgggaataaaattcgtcgatttttttactaactggtccttctctttttcaaggtgatgatattgtgttgttgaaggagggcacaagagtttgtggctctggtggaattttgggtatcgataaattgtccgaaaaagagggaattacaattggtttttaaaggaaatgtgccacttctacaaaacaaatcttacttccaagtgcacatccatcagtcgggtaggccaaaattccactaaaattgaattgtttttttttgatgccaaaacaaattcaggaatttggggaatcggattgggcaccagaaaaactgatctttcaaaggcaccaattgcggacactgcgtggatgttgctaaatgatggcacaattttaatggacaatgaaattgttgggaaagtggagcagcccattggagaaggggaaacaattgtaaaaatatttatttttcaaatccccttaaaaaaggcgaataattaaagaaaatttcccattttcatggcgtcgcatttgaccatgttgagctgcacttctacagggggtggcgtgccgatttggactggtccgatcaaagcgtccgatgttggactcgttttctacccgtgtttgtgcattgatgagaattgtgttttggatatctgcttcagtgcggctaaatttagcccaaaagcgccattgggctatcaggagataatgtctgaacagacattgctttaatttttttggggcaaggacgatcccgggggcgggggaaaattcttaagaaaaaaaagcaaaaaatgatgaaagatttttttttcctacgtttacctctccccaagccccaaaaactaaaccctagaaccatctctgtctgtggacaaaataaccagacaagttgccgcaccgcctagcttaaaatgagaattaaagggaatttgtgggttaagttcgtttaaaaaatgccaaacttcatgcaaattgattttttttaactcctttcattttttcaaaatggatttatatatattttataacaaaatagcataaggcttcttaaaaatttcagtatttttaatcaaataaatacaaattttacaaaaatccgcctgctttcaaaacagtgcgggttttgagtaaattccctatgctattaatgtattttgcttttttcaatcttttcatcatgaataccctacaccgttcgttattaaatgcataaaaattgtagaaatgtgaattaaatgctttttatttacacaaaatataatcaaattcacactaatgttaaaataattaaaaataaaatcccgtatctcaaaa

SEQ ID NO: 24120 - DNA, 2067 bp, Heterodera glycines
tagaagtttttcacgagtcgtgccgccattttgcgcctttgccctgcgtccgtcggcacaacaccccgaaagtggctgggaatggcaacaaatcggctggacgtcctcgccttggtgggtctttgtttaggatgattagccagccaaatgtcttctcttgcgttttttggttacatggcattttacgcgttaaaattgccaaaccgattttaatgactcctttaaaagccatgtaaagacgcataaatcaaagaaaactcaaaattgccaattttacaagaaatccgcttattttcaggtgatttctgtcccgactcccgcccgatggttcctccgctggtcattttctgcacttacttcttggaccactgcaaaacatacatgccgtacagggacttgtaccaaattgaggggtaattctttaacgaaacgggcaaaaagaaatttggagggcaaattgatgaccatttgattattttgggccttaaattgaaaatttccaaggaaaacattggttccgataggtgccataagtaaaaattgcattttcgacaaatcattagtggaatttcatcatttttagaagccccgctgaagtggaggccgtcacaaagcaatttctcgccgcaaacaaaagctacccgaaattggtacaaatttacaaattatactaattattatttgcccctttttaggacgcttttcctcccgctgtcatttccgcttgtgtcaacaaatttttgatgcaaatccgcgacccgttgatcccctattcatatggcaaggagatttgtgcacttttggaccgctgtttggccatcgatgggcccattttggagggatttgccggcattgtcgaggatttgccagtggtaagtgtttccatttgctgacttttttagacctattcccattaaaaggcgcacatggacacgttgggtcacttgtgtcgccattggaatcgtctggtcgcgaattcggtgagaaaatcgtccaaaatttttgcatgaaattcactgacattcgtaattatgccataaaattcgttggcccaattttccactggggttttcattttgagacttttcttccatttcatttggttatggggcaaattttatggtccaaattgctctttcctgaattttcagcatttggcaaaattctttctactgacaatgagtcatgcatgcgttatttaaaaaattttatgtccattgaatttttggcataatttcctagtttgattgtcgaacccttaaaattcggacaactctgacaattattgaaaattgtttaagttcggtctgctgaccatcgacgcgctgtcagttccgcttggtccgctcgttttcggctccgctcgccctgactgtccgccgctgctgcgccaccgctgcgtcagtgccatggcccaattgcttcggtttggcaacgacgacttctggaccgacacttctgtccgcacactgaccaccagcagcagtgggggcacgccaattgtgcgcaatccgtcgcaacgctcggcacggagtgcggtggtggcggacggcggcggcggaacgccacagcagcccaattttggtaatactaattcattttgaaaaatggagtacgtggtcggtacccacattctattatttcagaaacctaaagtccaattggtttaaaaagatgacatttgaaagataagactcaatcgcattccattagcagataccgctaatgcttgattattcgcaaatctacacggtcagcaactaacatgtttatcttgaaatttgcgaaaaagctatcgaatatgatcaaaaattcaaattttgataaaaaaaaaacagataattcgcttctaattaaataaaacacaaaaaatcggccaaaaactcaataaatgcaaacaagtcaaaaaataagaccaaaaagattaatgaaaacaagtcaaaaaagaggaccaaaaagattataaagattaaattcaaaaaaatccaaatatagccaagggtagcaaattaaatgcttttttttaacgaatttatacaattatgcaaatgtttttatttaaaacac

SEQ ID NO: 24121 - DNA, 1270 bp, Heterodera glycines
gaaaaaaatttggaccttcgtatgaaaataggtcccgagacacccccccccccctgtcccaatcgtccgtcgtatggcccttggcttgagacaccccttgcacatgtatgaatggcattgttagatcaatcgattgttcttttttaaattctttcgatcgcgatatctttcaataaaataccgaaaaataaatacatattgaaaacatcgaccgataattatcgatacaggtggtctttaatttttgtatttaaggaaaagaattattttttagttaaaaaaatttctttcatcttcccaacttaacctgctgtgtgctttttgcagttgttgtgccatgactttgtccaattttgttttttgtgttcctcaactgttgctgaacagttaccgtcgtcgatggttgagttcttttcttttcatgagttcgttcaaaaaccggtgttagaacaaactgctgaaatttttaatagaaatcagcaccaccacatttattgttagggttcggaattgtatggaaatcccaacttttttcctggactgtgactaggctgcctgaaaaacatatttatagcttggtttgaagcttctatgatggatttcaatatccatattttccattattttctataatatttcgcgatttatgtccatatttcaattccacattttttcaatattttggggcattatggccatatttcgtgattttttttgtatccgtattttccgagccctatttattgttagttatccccccattttttatcccaccttttttgtgtcattagccgacgcggaaggaagccattcatttttctcaaaaaccaacatgtcccctcccggaaattcttcctctaaaatttgggatttttccgaaaaacctaaaaaacatatatgtatttttatttaccctcgggtacactgtcaatggcctcggcaatttcaggcaattccctgttgaagtcaatctttgtctgagttgacgactgcactttttttcactttccaccttcggttttgtgaattcaacttaaaacgtgcaattggataaaatgaataccaatccggagcagatcgttcctccgagaaaataaaaatttatcaaaacttaaaattttttttaacctagaatttttcaaagaaatttttctatagaaccttagaagttatgaaatcatatattttatggtaacatatttttttaatttgctggctagaatagaaaaaattctttgtttttttttgagaaaaatttttgttatggtaa

SEQ ID NO: 24122 - DNA, 1770 bp, Heterodera glycines
ttgaaattgaaattaatttaatttttaaaataaaaataatttttaatttatgcaaaattggccaagtaatagtgaaaaataaccaaaaactgcatgaaagacccccaatttcgcctttgtttggctcaattttttatgtccgaccaacacaaagcccctccggggatttgcaaatgacttggccacagatggggcggcaggcacactgcggaaccaaccccaaaaattgggccaaccactcactcagagcaaagccagcaaatttggcatcataaaaatccaatttttcaaaattttaaaatttatataaattaaaattaagcaaatgttttgattatgtttaatgaattaatattttttataaaaatctgttttattattggtgccattttatgctgcaaaatttgcatttaaaacacacgcaaaaattggaatgataaaaattatcagaaaattcacgccaatttcccgcgctgaattgcagagatctgttgcgcaacaacacacaaagtcttttaaaaataataatattacaaaaataattattaaaatttaataaatttacccgtcgttccgtcctcgtcgtaagtaatcggtgcacatccatcgccctataaacaaaagttttcaaaatttttcttcaatttaatttaaatttattaaatttctagaaccaattttttccattcttattgatttaaaaatattttttattaatttaatggagcttttcaaaataattttttgcatgtgaaaaattaattgttcattttattttgaaattcctaaaaccaattttttttttttcaattttcttagctttaaaaatttatatgttattttttaaatttaataaaggtttttaaaatattttttgcctgcaataaatatattatattcaagtttaatttgaaatcgctaaaaccaatttttttcattttttaggactttaaaaatatatttttttaactttaataaacctttttaaaataattttttcttgcgagaaattttgttcaatttttttatatatatcacactgcctgagggcattgtgcggcggaagcgcagtcgcgcaccactcggccatcgtacacatcggccttgaggcaatatgttggactgccgggcaacgaagcggcacaacggacctgaaaagatttggcaaaatatgaaaaggatatcatcattagtggatattcgagaccgaaaattcccgagagttgagactttttttttaaatttctcttgttccttataaattgattaaaattttctatttattaaaaaaaagagaattttttgaggcttttcctaagatctaaactctcgaacatcaccaataaacaacatcatacataattgatgaatttggcaaattaaaaaattaatccctaaaaaataaaattcagaaaatgggtgtctaaattaaatgtttatctctctattccttgtctttttaatattcttttaaaatttggtgctgttctgctgatcatttttaaaagaattaatgagtacctaaatttttgctgaaaaataattttttttttaattttcattaaatttgttaatacattttgccgtaaataaaaaaatctcgattttttgaaacaatttttaattggcaaaaatgggagaataaatttaaaataaaaattgaatttcgttgctcccgccacatgctatgctttacctgctccacgcccaacgcgtaaccgttggtccgataacagtccaccgggccaagctgatcaaccgagcaaaaaa

SEQ ID NO: 24123 - DNA, 1262 bp, Heterodera glycines
agagaaaggaagacagagaaagatgaaagagggagcaatggaaaggacaaggcagaagagaaagaaaagggaagagagggagagagaatacagggacaaaagcagaagagagaaagatgagaaaggaataacagaggataaagcaatgaagagaaagagagagagagagagagagagggagaacagagcgcaagcttagtgtagagagaagagtaaagacagacagagagagggagaagaccgaaaaaacactggagaaaggaatggaagagaaagagagtgaccaggctaattccgtaattacggcttttttggttccttcgtaattacggattacaggttctacggtatccaaaattaaggaaaaggacatttggcgccaagccaaagaaaatcaatttaataatcacatgattcaacaatggttgtcctttttttagcttcacccaccgaaaaataaaaaatgaatttataacagggattatacagatttcataattgaaaatccagttacgttctcaatgttcagtcctactggtgatgacccaatccgacagccgacattttcccacttctccccctcccccgcccattgatccctcatcgaaacactgaccaactgatcatattttgttcgacacatgctacgcagcaacaaaaatgaatacctaaattattttgccattattcaaaaattgaaggcacaatttggtccttctcaacattcaatgccctccccctcctccctccccccattatctctctctcttcttcttctctgtgtcgtcccattgcctttctctaccggtttgtccccccccctctctctgtcaattggctgtactttctccgttcttccgttgttttgtcgcttataaccatccgaatcttctaatagcgaagaatgggagaacagacagaagcggaacactgcttcccaacggacggaagagaacgaaagcccttcacaaagaaaagcattgagtcgcccccctcccctggcaattccttatttattactattgttgtccttaggtaactaatttgatccatggcatttgtcacacttgctcctttttcccctccccaccccttttttttgctttttcagccttttcacaaatttttctctctcattctctctctctctctctctctttctatgtttctctcttcgtcgtttctttctttccgccgatggaaatgctgcgcaatgcgatgatgatgatgagcattcatccgcagcagcagcagttggtctt

SEQ ID NO: 24124 - DNA, 1529 bp, Heterodera glycines
tgctgcggatatcggtacgatcaggcaggagattcaaatagctcccctcgcatttcaagggccgtgtggagcgcacgagacaccacaggaaccgcggtgctttacgggcgcaacatccctatctcaggctgagccacttccaggcacgcacaccctaaaccagaaaagagaactctggctcggactccacacgacgtctgcgagttcatttgcgttaccgcgcaaaacagctcttgcgaaccgtcatttccctagcctggcgtgggaatgttaacccacttccctttcggcaaccggatggaccaactgcgcaagcacagaaaagtcgtcatccgtagtgtgttacggcgttagccggtgccttaggatcggctgacccacattcaactgctgttcacgtggaacccttctccacttcagtcttcaaggatctcacttgaatatttgctactaccaccaagatctgcactggtggaagctccggccgggcccacgcccaaagccttcaacgcaaccaccacgaccctcctacacgtcatggccagactacgcgacaagcacgtgtacaagccaatgacggtggagtataggtggcccgctccagcgccatccattttcagggctagttgattcggcaggtgagttgttacacactccttagcggattccgacttccatggccaccgtcctgctgtctatatcaaccaacaccttttatggggtctaatgagcgggcactttggcaccttaactccacgtttggttcatcccacatcgccagttctgcttaccaaaaatggcccacttggagctcaaacattcaacgcctgggttcagagtcaagcaaccctggcttcatacccatttagagtttgagaataggttaaggacatttcgtccccaagtcctctaatcattcgctttaccgagtataactgcttaacgagctccagctatcctgggggaaacttcggagggaaccagctactagatggttcgattagtctttcgcccctatacccaagtcagacgatcgatttgcacgtcagaatcgcttcggacttccaccagagtttcctctggcttcatcctgctcaggaatagttcaccatctttcgggtctcagcgcatacgctctgtctccgccccatcgcatgcgatcgagacgggactatgttgcgccccaacaccgcagtgccagggatcacacatcagctccgtaagaagccttcactttcattgcgcctttgggttttgaacacccaatgacttgcgcatacgctaaactccttggtccgtgtttcaagacgggtcgaacagatgaccggcttttacaccgagaacgcacaactgagagcccgagctggaccgaactggttgctggtacgtgtcgcacgcgaccgccaccgacccccagctcgagtcaacacggacccgaaaccattgcacaattcacccagagtaaacagcactcccccgatccgggtaccagaccccgaaaggctggcctcaagaccgagctcacgcag

SEQ ID NO: 24125 - DNA, 1474 bp, Heterodera glycines
  unsure (1)..(1474): unsure at all n locations
tacaaaagtgataaaagaggtacaatagtgattagaacatgtacaaaagtgattagaagaggtacaaaagtgattagaagaggtacaaaagtgattaaaagaggtacaacagtgattagaagaggtacaaaagtgattaaaagaggtacaaaagtgattagaacaggtacaacagtgattagaagaggtacaacagtgatttgaagaggtacaaaagtgataaaagaggtacaatagtgattagaagaggtacaaaagtgattagaagaggtacaaaagtgattagaagaggtacaaaagtgattaaaagaggtacaacagtgattagaagaggtacaaaagtgattagaagaggtacaaaagtgattagatgaggtgcaacagtgattagaaggggtataaaagtgattagaagaggtgcaacagtgattagaagaggtacaacagtgatgagaagaggtacaacagatggtgattagaagagtcacaacagtgattagaagaggtacaacagatggtgattagaacaggttcaactgtgattagaagaggttcaactgtgattaaaagaggtacaaaagtgattagatgaggtgcaacagtgattagaagaggttcaacagtgattagaagaggtacaaaagtgatttaataaatttttaaaaataaaataaatttccttttattaattaaaaagagtgtttgaaaagtacaaggattgaatatttatttaaattgaaattaatattacaaattctaatttaaaaatacaggagttctttaataaaagtaaataaattattattttaatttaaaacatttttcacaaaaaaacaatttaatttaaattgaaaaattttattttttatggattaaacaaaactattaatatttattaaaatgaaagttaataatataatatttatttaatttgaaatgaaattaaacatgtaaaagtaatcaaaaaatgcttataaaaataatgtacaccggccggattcgaacctgccgcccccccccccccagaagatgactcagaatcccctatcacacagggattctgagggcttaacgatgtcaaaagtaaaatctgatcacgtattcgtgatcagcggcccaaataacgactaaagacatgtttttggaagatttttgacgaaaaaattttttcactcaaaaaccatgtgcacccccctttggtcccgatgcacaaaatcacttttatttttatatctttttttaaaaatgtgatagaaatgccaaataaaatttatataatagagcaaaaaactgcggatttttgtagtattttacttttctcaaatagcttttcagaaggcagttacgaatttttttctgaaaaatctaaaatttccagaatttctggaataacttttttcatattgatgttagaaaacctaaataaatcccataaaattctcctgantttttctctnattttaaaggctttatt

SEQ ID NO: 24126 - DNA, 1421 bp, Heterodera glycines
  unsure (1)..(1421): unsure at all n locations
acatttcaataatataataaacaatttnttgaaaatatcttcgtatctcattgttgacccatcagaataccacagccgccgaaagcaaaactctttctaccctcttacacgttttcatttaacaaaaagattttctatatatatatcaataaaatttgattttaattaatttataacttatacaaaacctaatgtattagcaaatatattatgattatttttttgaagaatttactaaaatataaaatattttttttgaaatgttaaaaaatcaaagtaaaagtcaatgaaaattttaaaaaaataataaaagtttaatagattttaagcaaagtcagatcatcgggtctttaaaaataacgactttttaataaacaactccatctttaccaatacgaaagaatttaataaaaacataaatttttgaaaattaatatattaataacaaaaactttaattttacgggatgaggtcaaattacttaaaattaaaaaaaccatttctattaatagatttcaaattgttcaattaagaaacaaactaaagaaatcaaaagtagttaactatatttaatttaaattaattcgaaatgaggtaagaactgtcgcgaaaaacagtttctggacgagtgaattaaatataaattatatttgaaaaaagtttttactaaaaattactaagaatacttttataaatcacttgcatttatttaagtttaataaattcattaaattgaaggcaaaataattaaaagattatttgtcagtgtttaaatttaatcttttataatatgaataaattcttaaataaatattttaaattttgtataggaaataaagtactcaaattttaaattatttattgcataaggtatctttactataaatattgaaaagcacacaaaaaataaaagaaaatttttatgaatttttttcacgaaaatcagcacttttttatctgatataatatgcaaactttatgctatatcaagcaaaaaaattttatcataaagtgacaaaatttgaggctttttgaattgttttctaaattaaccaccggtcctgtaaatattttttttcaaaaaataaataagacgggccctgctggggggtctgtatcgtttcggcgccgccgtttcggcgccagcccttgtttttggactataactttttttgttgtcgatcaaatctaacaatcttggtatcattcgaaagctgaacatgtttagaagctatttctaagcaattgcttagcgattagtcgcttactaaaaaagttctaactgaaaattgcaaaaaagtcaaaatttttgtgatttgttcttaataacttctttacaggtcaaattttttttttgactttttgtaggtctaataggtcttctgaagggctatagagtgataacatgattattagaattg

SEQ ID NO: 24127 - DNA, 1677 bp, Heterodera glycines
ttttttcagttgataaagtgctgttcactttaatgagttgtgtacccacaaggtcagcttgtgcccgtggctactatgaagacgcatttgtgacatgcactaatgtcaagtgctgccggaccgacctttgcaaccgcgtgcccgaacgtgtggtcaaacagtgggtcgaaagaataggggtcaaccaaggctttgtatttctggaccaatccaagtccagttaattttttggctgtgtgctttttgctggcctgtgggttttcatgaaccaagccaggtccggcaattgtttgactgtctgatttttcctgggactgtaagttttcctggtcccaggcaggcccgggcaattttttggctgtctgatttttgctggcctgtgggttttcatggaccaagccaggcctgggtaatttttttgctgtctgatttttcctgggccgtgggttttcctggaccaatccaagtccagtcaattttttggctgtctgatttttcctggtcctgtaagttttcctggaaccaagccaggcccgtgcaattgtttgactgccagatttcctggacctaaaaggtcaaggcaaatttttggctgactgagcttcacagaaatttttggctgctgggttcttggacctatgggttttgctgaattttttccccgggaaaaaacccaggctccggtcaaacatgaaacccaggcaagcctggcaatttccacaatttatccatcattaatacaaaaagaattttcgaatttcttacatcataaggtatgtacatctaccctgcccggttgggacgcttagcccggcttggacgcttggcattggcggcaccattttggtcgtgttaattgccataatttttgcgggtaaataatgatgttgttattaattaaaaataagattgcatctctgggttggatctggctaattagaggcaatgaaaaaaacgcgccaatgttacagtatcatttaataaaatgagattctgtagcacctagatatttatcaagaaatcgaacgatataggaaaaattggtggcgctggcgaatggataattttagaaatttttatttctgttaattatttaaattttaattaatttcacaattaaacagggtttgtcaaatggtactggtcaaataataatgaatgaagaaacaaagaatgaaaaattaaaactatcaaatttcaattttatcgatcaaactctcattaagattgttcaagtgttaaagcaatttatcccttaattaatggttcgcttataattaattagtgtcaaatcagacttttcgatcactaattcttaacgtggattaattggaacgaaactgttcgggtggtcaaccccgagagataaaagtacacaaatgcattcattttccctttgcatgtgtctatttcttttcctctccatttccccactctctaattattgtgtcttcctttatttatgtaagacactattgatttattatgtccattgcatatcctttcccctcattcattcagttgcttttgaagcactcaatttcatcgcctaaatttattttgctcctccaatatttattccgcctccgacttcgcccatttttattttaaattgttttaatttatttgttctacaaataaacattttattgagtcggttcaaagaccgaacagaaa

SEQ ID NO: 24128 - DNA, 1961 bp, Heterodera glycines
  unsure (1)..(1961): unsure at all n locations
aaatgccaaagtggcgtcatctactgtaccaattatgcattcttatgttcagctacagtatccgtcaatatgagtaccaccgtgttttaactcactcattgaatttcgtccagcgactcgtgcatgaaaatgaacgtaaaattgttgcggttgttgtcttcatgtttggcgactttttctcgtttcgcgtacagctcgacagaatcgccataattgaacaaggtcggcaattttattgtgaaatcgttcagcacttttatatttttagaaagcattttggttttgaccagaaaaatcttggaaaaaatgaaaaattcttaggcctaaaaatgaaaattttatgaattttgatattttatcgacaaggaattttgacttggtaaattgagctatgataaaaaaaattacaaaacaattttgtcatggcaaaaaccaaaaaaaaatcgatattttatttaaaaaaataattggggatttttttttggtatgttttgccttaacccatttgactgggaatgttacggtcaatttaagtagtactgtattcttccgaaacattcgtggattgcttttaacaaaatttttaaagttttttcatttagaatattagagaaattgtatatatttatatcttttttttttgtacatttttgccataaatattttacctcattcggatcagtgttttcgattttgccgctgatgattttcatcttgccactcagctaaagttatttgatcgatttaaaatcttttaaaaataaataattaatatattaattacctggtcaatatataaataatccgggtcgccaaatgctgtaacatttccttcgagcttaaaaacggtaaaatatttagataaaaaatgaatgaaataaataatttaaattcatttctttttattttgttaaaatatgttcaaaaaaaaacttggtttttttttgtttgtcaggtcataacttttttcgaaacctaatgaattttttttgaaattttgcagtataatagaaaacatttggagctaccgaaaacatgaataaaatttaaaatttgattttcattttgagggaagttattgtatgaataataataaataatgtttcgtccaaaattttccatttgatgcttttttgactaatatcccagcatccagcagcagttgtactcacccggatgtaattcgcggcccaaaccggaagttgccgtttctgttgggtgttaactgtgacattatttataatcacgtagagcagttcctttttgaacaccgtttgaaattcaaatgtgcgctgctctccatttttaaataattcattgaacttgttttcgatcgttttgctgtcttcaggcatatccttttttttatttttctaaaatttatatgtattttttaggaaatttgtattttgaaaaaagcaatgtgcctggattccatgctggacctggacaaaaacccaagaaaatacaggttgcaggaaaatggcctggacctggactttgatcaaagaaaaatccaggcctggatccaggcccagcaggcagatagatctctagtatttttaagatttttttttcagcaaattgtatattttggtgctagattatttgggttcaataaaaatcaaccatccaagagcagattttggatgccgttaaaattctcgagaatagaacccggacgagtcgggttcctggaatggagcccggatttttctgagtcccaaactgagtacatttgattgaacccagattttttctgggttcctacataccggatacatttttcaaaaaaaaactttgtctaaatcattactaagacaaaatccagtacaaatcagaacccggttcaacctcaaggatcaacaaccaagagttcttttacgtataatacatgccatgctgaattaaaataattcttactanaaactcgtaaagttcgattctcgaaacgttctcct

SEQ ID NO: 24129 - DNA, 917 bp, Heterodera glycines
  unsure (1)..(917): unsure at all n locations
actttatgagtccaatcgacttttatgagtccaatcaattgacaatcccgggtttttatacaataactttgttcatgttcgaacaaaccctatctttttggtatcattcgaaagtacaaagtctaacgaagctaaaatatataaaatcgcagcgtttaggcaattaccaaaaaagatttgattatttaagtaaatacttattattttcgtttgtaactttcttgaaatgttagaattttcttgttttctcgtattattacattatttagacttcgtactttcgaatgataccaaaaagatagggtttgttcgagcataaacaaagttattgtataaaaaccattgattggactcataaaagtcgattggactcataaagtgcactagagccgtgattagtgcttcaacattaataatactttttgttatgagttcgacaccggttgatttggcttctaacaaaattcatatacacggcgattcaattttgggctccaagtacaaataagtttattatttatttagtaatcagaacgccaaaactttgcaaaacttaaaatttattggggattttcccttgtaaaaatagaagagccgatctcgagttaaaaacttaactttcacaaaataaactttgaatcgctagagggggccaaaatatgggcctaggcaaaatttcaagaaaagttacccacaggaaaaaattttttcccagggcaaagttttttctttttctctcattttgacgcactatttccatgtctctaacatataaaataacacatggttcatttttttgccaataaacaattttttaaacttttgactaattaagaaatattcttcagaattttcccttcaaaatgagcacaaaatggttttgtttggtctattattggccaangttataagctaaa

SEQ ID NO: 24130 - DNA, 1948 bp, Heterodera glycines
  unsure (1)..(1948): unsure at all n locations
ccttaggggatttcatttgtaaaataanttcggtcaatccttcaaagaaatcgacttaattcaattgaggattcagtggcctttttgaggttgcgcaattcgctatgaagattttctctaattaattggggggtttccgtaccttgattttagtaattttattacgatagtgtaatttttattggtaaggggatacggtgacactattctgtacggttcatcatgtaagagccctcgaaggtatttgagtttttgtatattttctaaatttgggtcattgtccactgaggatttgaagtcatcccagaaactgggccattgggagaatttgccattaaaatgcgtaagcgtttggggtggaagctttaatcttgatcggtaattgacaaatggtatacgatcatggtgtatttggtcattcaaggaaagttctggcgattcgtcttcattgtcactttcatattccttttcttcttcttgttcttcaacttcgtcttcattttcatgttcataatcatttgattcatcttccgggtctgagtctgaagatgatttttctttaagtaattttaatctcctttttacctccaaatttacgtcttttaatgtatcgagaatttcatctatttctttaatggttttaaggtagtcgtgtttttcacgaaagattttttgaactttccattcattattccattcttccttgttcatttttctcattaaattttgccatcttttatttaaggcttttaatttttcaaaatttggctctattttttggataatttcctttgttttattgaatatccgcatgcattctccgggattattttgatcatattcgaatttgttttcctcaatttttgttttgatcgtttctatttccctttttaatacgcgattaaggaggggtattttgctacgaagcgtaccggacatagtttgtattttaaaaattcaaaataattaactaagtacccttttatggttatttagtggataatcagtatcgagtcgaattttaattggtttatcactggttaaataatttttattaaaatttaatgatcacagaattaataattgttatcacaaatttaaaaatttgatcacagaattttatttgtttttgttaattatttgctcctttttttcataaaattctttcaatatattctccgtatgttttgggcgaagtttcgttaatttgtattccgtttgtgtttttaattttataagttcagtcagtgtagtgcttttcgccacttgtttctttttcgtgttggctttggtagtcggagtaaatgaattaggagtcgctctgtccacttaattatttaaattagtgatgggtttgctgtagggtttattatgacttttaattatgtttggctttttatggtgtcctttttcggttttttgattgggtttggtgatccgtgtgtgtgtgtgtgtgtgtgttttttttttaattgggtttgtcaacccttgattttgtatgggcttggtgacccttatacttccggatgacgagcagttgcgcaacggtgaatttgacgttttgacgtggcaatcaggtgcagaccggacaggcagcacagtaagacgaatgggcacagcaggacaaacgggcagagcggcaggcacggcaggacaaatgggcacagcggagtggacaggcacaacagggcgaacgagcacagcgggacgcacggcaggacaaatgggcacagcgggaaaggcacggtcccgggtcgtggcaccaatttttgtcgggacgacaaaaaatcgacgacgggctctgcggggtggtggggacggaaaggagaggaattgagcgaggcgcgcagagggaccgttgggagggacgtagggggtcgggaccgagcggagagcgttgtgccgtgcctgggttttttcagaatacgccaagtcgggcacaatttca

SEQ ID NO: 24131 - DNA, 1242 bp, Heterodera glycines
ccggtaaaaaaaattttccgggaaagggaaaacgaaaaagaacggggcgggattcccgggttttcccgcgggaatcccgttcccgctggtgagtctgtatcgtttcggcgccgccgtttcggcgcgagggtcgtttcggcgccagggtcgtttcggcgccaagccaaaattaaaaaatcataaatcagttggaaattttgagcgatttaaattttcaaaaattaaaaattttagcaaaaatgtagaataacaataaactaacaaaagaaaatttaacaaaaattcatttgtttaccgtacttactcgtttagaaccccacccctctaaattagaagcccccccccccccaaaaaatatttgtttgccaaaacgagtttaaatttcctggctatttgacacttaaatgtggaccaattatgttacaaaaaaggtctaaaataaagaaaaatctggagaattttatactttttatttgaattccctattttcaataaaaatgattttgaaattcaggaccaaagggggaggacatgatttttgagtgcgaaaaattttcaccaaaatcttccaaaattttttttagaagttatttaagccgctgatcagtgatcacgaaaatataatcagaaggatcttaagattcgttaagacctaagaatccatccgtatcagttgattctgaagggatggcgctggtcaggttcggatcctttcgatataattttttgtgcattttgggtcttgtaaactttattgtgaatttttaaccattttcgtctgcttcaaaagttgcagggccttaaaaatcagaaattttttttggcgccgaaacggcgtcgccgaaacggcggcgccgaaacgacccgttcccttttttagaacctaaaacccggtgggggtcgattgggccccgccggttgggccccgccgattgggccccatggggcagtcacttttttagtcgacttttggtttactttcactaaagaaaaattattacctatgtatatttttaaataaaaaatggtttttttaatcgttaactttgttgcacattaattacaatgtattttttgtttgttggggacgaacctggacctccgaaaaatacgaatttaacccactgatccaccggtttttgttaattttccccacttcaccaccgtccctgaaaagcgaataaaatgtcaaagatttgaattttgaggtgcaataaattatctatttagcttcaaaacacc

SEQ ID NO: 24132 - DNA, 1272 bp, Heterodera glycines
  unsure (1)..(1272): unsure at all n locations
tgaatcgctaattagcttgcactttcgattattacatataattagccctctcaatttcctttcgggcctcagaaaatggctatctctttttcggccaattttgtacgaatcaaagggaaaatggcttaattcaggccccaatgtgcgcctgaatcgctaattagcttggcactttcgaatattacatataaattagccctctcaaattttccttcgggcctcagaaaatggctatttctttttcggcttccttcgggcttcagaaaatggctatctcttcttcagttttgtaccgatcaaagggaaaatggcttaattcaggccccaatgtgcgcctgaatcgctaattagcttggcactttcgaatattacatataaattagccctctcaaattttccttcgggcctcagaaaatggctatctctttttcggccaattttgtaccgatcaaagggaaaatggcttaattcaggccccaatgtgcgcctgaatcgctaattagcttggcactttcgaatattacatataaattagccctctcaaattttccttcgggcttcagaaaatggctatctctttttcggccaattttgtaccgatcaaagggaaaatggcttaattcaggccccaatgtgcgcctgaatcgctaattagcttggcactttcgaatattacatataaattagccctctcaaattttccttcgggcctcagaaaatggctatctctttttcggccaattttgtaccgatcaaagggaaaatggcttaattcaggccccaatgtgcgcctgaatcgctaattagcttggcactttcgaatattacatataaattagccctctcaaattttccttcgggcctcagaaaatggctatctctttttcggccaattttgtaccgatcaaagggaaaatggcttaattcaggccccaatgtgcgcctgaatcgctaattagcttggcactttcgaatattacatataaattagccctctcaaattttccttcgggcctcagaaaatggctatctctttttcggccaattttgtaccgatcaaagggaaaatggcttaattcaggccccaatgtgcgcctgaatcgctaattagcttggcactttcgaatattacatataaattagccctctcaaattttccttccgggctcagaaaatggctatctctttttcgggcaattttgtaccgatcaagggaaatggncttaatcaggccccaatgtgcgcctgaatcgctaattagcttggcacttt

SEQ ID NO: 24133 - DNA, 994 bp, Heterodera glycines
ttttgctgatccgctttttctgctgttggcattgtgccgcccccatgctgctcggcttcacctcctcctcttcctcctggtgctgctgatgctgttattcatcatttccgctggtcaccatcgccgctgtctcatcgtcgtcctccggcgcacattcgcgcgatgacgcgttggaaaagcgcttgttcatgctgtttttttatcttgaaatttttgaaaaatgcctggattagaaaagagtttccggtattaaaaaacgaagaagcaatttttaacgaattttcaaaaattttggctcagaatttctaggggaaatcgaaactcccataatcccagggttggggggggggcagctattttgtcacacccctcaaacgcggaggggcttattctagtggagaagcattaatcaaatggttactgtacctattttggaaaaaaatagtacagtatttaggggtaaccgatttccaatataaaaaagcatttgaaaatttaaaaaaagtcatttttgtcattaaaaagccaagcctaatggggggggggggggtgaatggtgtgcaaatgcatcggttttcgggacaccatcgaaaatttcaacaaaatgccatttggaaattttaaaaaccatatttttgtcgtaagaagccaagcccaaggggggggggggaatgaatggtgtgaaaatgctttttctgtgttcataaacaccgccacacattgtaaatgaatgaacgaatggatgaatgggaatggaggatgatgggaggatgatgatgaataatgaatgaataatcattgtcgaattcacaattttctgataaaatcgagatcactcattctcgaaatcactcactcactgtcgaaagcacctgggacgattttttgtgctaatatttctagtttttttagctctataatgcaatcatctaattttatatataatatatatatatatatatatatatatatatatatatatatatatatatat

SEQ ID NO: 24134 - DNA, 1337 bp, Heterodera glycines
tcggcgttcgaattcgatgtggcgcgggttgacaagcgctcgaagcggcgataaagcggagtttgtcgacttccctcctcctcagaggaggagtaattggacggactccggctgcgcggagcacggaaaagaggctcggatggttaaatttctgttaattctaacggaaagtgatcatgatgaatacagccattcatccaagtcggaattccggtgcggagacggcgtgccatgcttcgacgggaagtcccgcgaattcctcttttctggacgatagtcggcagttcgggacgacgcagaggaattcgtcggtggtctcgccagtgatcagccaccgacacattgggctgaactcggcgtgccagtgccgggacgcggtccaaatagtgccaaacgatcggctgatgattaagagaatggcggaggaggaggggccggagaatgtcttctgcctggcgtcgtccatcagcattaatccaccaaccggttccgaggcgagagtcgagaaattggtcggcacgcagtcgatcaatgattgcatgtgggcgattgacgggagacgaatggtggacttggcggattggcggttggcgaaattgctggccccctttacgatagacaagcgatgggcgacgggggttagagacggatcgccagatggcccggcccaaaacacagagaagggtgaaagtggcgaaaacaaagacggcggcgcacagcgaagttaatgcaggtgtcgacgatccgtcgacgggttgagggggtgagatggaacttgggcatgttaattcgaacgacaatttttggggggtgactgacgggataagcagtactcccgcacaaattcgaaaaattagacgataagtggcgaaaattggcgaaaatttgacgaacaaaataagagcaattgccgcgacaatggcggcggcgagaatgacgagaaggattggcccatttccgaggagaagcaggggggaaaatttgtcgaatgcaaggttcgaccagaaaccggactgttccggatcgaggatcagcgtttccgaaattctttgtcgatgtccgaaacgaagttggcggggaatgtactgtagtgttccgttcagccaaaatcgggtttcccctgcggggcatctcactacacattcagtggcaatgttggaatggtcataaggcaaaatttgcctccccctggtaccatttggggcgcagttaacgacaaagagttggccatcagtgcaggaaacggtggccaacgactgatcgaaatcggagtggcaaaaatagtcgaattgtgcccccgtcgagcagctgaagcatccaatcagcctaggctgttc

SEQ ID NO: 24135 - DNA, 1411 bp, Heterodera glycines
aaattatgatttttttgttcaaatttagattaggaaatcggaattgatcaaaataattgaaggattcgtgatcggggacaccaaaaacccagagaataaatttttatgactatcacaaaaaaaaattttgcaaaacaaaagggtcccaccttttgtttcaaaaactgtcactttccatatagtgccaaaattcgtaactctactgatttgattgtctttcattcacaaattttccatttcagttggtcgacgcgggccaaaacaaaaaggcaatttcggaggcggacagaattttgaaaaaacatccgaaattgcacacagcaaatgcgagtggagaggggcgggggagaaatttaatgacagttatttttcatttttaaacaattttaggcactgaaagcgctttcattcatacgaattggtacgcttctttggatacaaaattaaaaaagaaacaatattggatttgtctgggaagggtgccagagggctttttgttgaacgtttaactgcaaaaaatcatcggccccaaaaaccttcaaaatatttatgctctccaattggtgcatttttgaagaacgcttcgtcgacgcggaagcactgattgacacgttggaggacatttgcaaaaatgaagacgttgacgagccatttgtgcaggcattgagccactgctataaggtgaaatcgaagcaaaattataggaaatctaatctaactcatttcattttcgaaaacagattaaatacatttatttgttcatttttgcgtgcggatcaactggtttttggggtatgactcctttcataattgttcgaattgaaccaattcattatttagtcgattcttctaacaatacgtattctttattagcctgccaaatttcaaaagattttgatgaatttctaagaaagttatgtggtcaaaaatgttcggaaagccagtttttgaagtttttttgtgcataacttttttgaaactaaataaatttttgaaattttgcatgttaaatagtgaagacttattgttaggctatcgagtgatatcaaattcattcaactcgaacaactatgaaaggagttatactccaaaaaccggtatgggaccaagtccgtcattttttgctatttcgggcttaatgaaaaaagtgaaaataatttgacccaaaaatataaatttactttggttgaattgcaggagctgaacaggccggaccgcattgtggacatgtacacggagttgacaaggcgccagcccacctacgagccgttcatgcgcgagctgttcttcgccaacacacggtgtgccaacctgaaggagcagcagcgggtggcactgcagttggccaagatttgcaccacgacggagccgtccacttattacatttgggccgtgttagtcatccttgtcc

SEQ ID NO: 24136 - DNA, 1955 bp, Heterodera glycines
  unsure (1)..(1955): unsure at all n locations
ctctccgaccccgtcctcctccttcccccccttcgttccttttcctccgcgttttcccctccatggccccgggccttttctttcttccccccccttatgctctccccttcctttcacttggtcatcgtccactcgtcccttctccaacagttccaaaaacatccggtgatgttctctgtgcaattgcgtcaccgctcgtcggtcgcccgccaaaaatccgccgcttagcaccgccacgtcctgctaaagtgggggaaatgccgctgaccagcagcggaccaaggcttttgtgctcccacccgatagagttgcttcagcgaatagcgtgacaacaaatccctgggcggcgttaactgaagagagtgattaggcatgcctaatgagtggcggctcactttgatcacggacattttgccgcgcgggaatgttggacgccattcccacgagggcgggaaaatggcgcggtccccgtgcccgtagccggcgtccagccaaacgaagaattcggtgccaaacggattgtctgtctgaacattttatgtaatgcctagggagaatgcgccgaccgccgcttgggccagaaagtacggcttggagttgacgaccaccacatattcggcctgagtcgcctcggggtgacttcgcatggacaagtcccaatcggagggccaattggccaattcggagtccatcagaagggaaatgcgcttttggaagatggccaagggcaattgatcaagtgataattggacgacctaatcaaaattaaaaaaagaaaaattaattaattaaaataaattatttaaaaattaaataaacaatgattaaggcaaagaatattaataaaattcttcatttctataacaacaaataatttgattaattataattaaaataatgttgcttgttaataacaataataaatatttaatataattatttcatctaaaaaaataaaaataatattaattaatttactgcacatactattttatcaaattatcatttgcttaataataattatttcacttttgtccattgtccccaattaatccgtgcgcgttctctgtgcacaaactctgctgacttttcatccacaatgacaatctgtgaacaaataatgagtatgaaaatgaaattggaattgcacacttcctattttcggttcttcgttttttttttgaatttgccattaccattggcacgcgaagttggagcaggttgcgcatgaattggtggtattggcgaagtgtccgtccgtattgtctccaccggtccctgccaatgtccaaaagtgcggtgaccaccgtcaccgaatggtcgcctttctttgggaattgcgacaaaagtttggcgtgcgccggcactcgctgccgtgccaaagccattcgatcggtcgctgtgacccgaatccgtggcgacgtcgtcgtggcggacgacgccaactgcgaggagaaaaaatacttggaggaacggctgacgttcaaacgaagacgagtcgaagtcagtggaattggggacgaagcggagggaatggcactgattggagacgaagcggagggaatggcaccgattggagatgaagcggagggaatggcaccgattggagacgaagcggagaaaatggcaccgattggagatgaagcggagggaatggcaccgattggagacgaagcggagaaaatggcaccgattggagagagataggacgacggagtggaaggaatggcaaattgcctgtttactgaagccaattcgcttgtgttgtttgtacggctgtcattggcattctcttgtgccgttgttggcattagccaatgtttgcttaactgtcaccaccgatttgcccatttttgagttgccaattcccaccaatgttttgaccactttgtgaactttgtcccatcgnttttttgttgtccatttccattgtcggcacattttcgtcttaacat

SEQ ID NO: 24137 - DNA, 1498 bp, Heterodera glycines
  unsure (1)..(1498): unsure at all n locations
aaaaagatagtcagtaaaataaagctttgtttaggaatatttgagtatatttacacaacaaatttttgagcaatttctaaagatgaaggaaaataatttttttatcaatattttatattaagttatgtttttgaattgattgaccctatcaaatgaacagtgatgcagttgtaaaatttttcggcttctcgcgcaaagtttttcctggactgtttctgacagattgttgagataatttttctagatgtttgttcatatctcaattcattatttatcgcttttaaattgaatggaaatgaattgtcagtaacaaaaaaaatattttgtgaacatttataacaaaaattttttaagcattttctaaagaggctttttgacttcaatcataattatattgtcaattgtttgaaacgcatctgttgcagttggaagaggccgatggaaaatttttcggcttttcgcgaaaaagttttcccagaaaatggcgtgggacaaataaaaattgtacttttattatgagcaatatatatttcctatcaatttcgggtttgctttacacgtttgccaatgaaaaaatggagttttgtgaatgcaaattttaacggattttctttcgacgtgtcataagctggttgtttcgggacaaatgcaaaccaatttgatgctattcgaatgagctaggcgcgctctaccctttcaaatgtatcaacaaagggtctaccgccactccctggcgagatatggccagtcaaagcagagtgggtctaataaaacaagaatttttaaaattttcggcatttggccttatttcgagcctgctctacgtgtgcttcttttgccaatatggccctgctatagaaatcttgtaatggttcacgactaagtgatgaaatatttttagcccatttcttttctatccaagcatgcgaattgtttattgcattttatagccttctggaaaaagatagtcagtaaaaataaagcttgttttaggaatatttgagtatatttacaacaacaatttttgggcaatttctaaagatgaaggaaaataatttttttatcaatattttatattaagttatgtttttgaattgattgaccctatcaaatgaacagtgatgcagttgtaaaatttttcggcttctcgcgcaaagtttttcctggactgtttctgacagattgttgagataatttttctagatgtttgttcatatctcaatacattatttatcgcttttaaattgaatggaaatgaattgtcagtaacaaaaaaaatattttgtgaacatttataacaaaaattttttgagcattttctaaagaggctttttgacttcaatcataattatattgtcaattgtttgaaacgcatctgttgccgttggaagaggccgatggaaaatttttcgcctttcgcgaaaaagttttcccagaaaatggcgtgggacaaataaaaattgtacttttattatgagcaantatatatttcctatca

SEQ ID NO: 24138 - DNA, 1393 bp, Heterodera glycines
ttaaatttttgaatttttataaaattttatttttttcgttcatcgatgacaaattattaaagaaggtaccagcctcaggaaataaaaaaacaaaaaaagtaaagaaaattttcgaattcgggttcgggattcgaaaaatggatgtttggaacatatccgaccaatttcagtcgtaaacaggcactcacgcgaaaacgtaccccacgcgaaaacggccacgcgaaaacgtaccccagccacgcgaaaacggccacgcgaaaacgtcctggccccccatagcgtgggtttcgcagaaaattaattttcagatccctctttgagattgggagttcaattcccgtggtattaatcccgcaaaaatcccgcgcgctgtctatgttttttctatggatagatagtattttattagaaaagtttttctccatataattttcaattataatgatttgtaacataaaaatactacttacaattagttagatttgaaagccattgttttctctatttgcttgcaatatttcaaaaaaaaatttcgttacttttcaataatgaaatcttgcaggttaatggagaaaagaatgtttgattatttttgtcagagagcagctgcggaatggctgacgaatttgccaagccgaaatttgacggcaaaatcttccaaaaccccgacagcttcacaacatggaaaaacccgccttcggcaggagacccgagaagttggcgggacttcattaaatggaaatgggatgcaaagagcacgaaactgcccaatttgaaagtatgtttaaaaacttcgttttttgtcactaattgtaaactgcaagaatgccgcatttcccatttaggtgcttgaccagactttgccggtgttaaagcctcggttccaaacggattctcggctttcggccacttggctcggccatgccacactttttgtgcgcattgacggcatttcagtgctcacagacccagtgagttggacacaataatagacaaagacatctttttgaggactttaagtaaaaaatatttttcattccaatggatgcgagaagggtaatgtgctccaatttgtccaaggaaaacaaaaggactaattttaataaattttctgtttcggtgtaaattccgccaaaatttccaaaggtttgggcgatgtttgccactccttcgttccttcccttcttcaaattttgcccgcgttttcgtccaccgccgtgtaaaattgaggaattgccaaaggtttgtattttgtataaaaatttgacagttttttgcgtaatcattattaaatggaactaaattgactgacctcatattgacattgatctcatctcccacaactattactaccatttggacgtggacgccattggcgatttacaatgaatgt

SEQ ID NO: 24139 - DNA, 1202 bp, Heterodera glycines
aaacttccctttttttgataaaaatccaaaaaaacaaagtttctttagctgattttatagttaattaaatgaatttatatatgtattaattaattaatgagcctgtttaaattaaataaaacctggaaatacccaaattgctttcagtaatatgcatattgaaattagataaataaataccaaaaacggataatttggaaaaattcgagttatgctaaatggcaaaaaaaaaatcaatttggaggacagacttttccctcattagtcgtcaactgcttcttttgcgtgccatttggctgttcagcaaagatttccggtcttttgggcccagggccaaacccaaaaagtgccgagccaatgaatgagtgagtgatgagcaaaagtggtggtgagtgcctaacaaatgtttggccaaatgatgagaaaaggcaagtgaacttttattgtaccaccgtcttagcaatggcacttggggagaaaaataataatatttttttttattaaaaattgtaaaaaataatttattttaatgttttttaatgtaaaagaaattatttaaaataaattatattaattttgaaaaacattttttattttacaaaatatcaaaaaataaaaagtactaaattatttttcaaaggtaaaaaataagaaaaaataaattttagataataaattgaaaataaaaatttatttaagcaaaaataaaaaataaaactaaataataattattactaatgaattttatttttgaatttttcttgcccaaacttccataaaatggcactaaaaatgccatggaattgctgaaatgttcttcctttttttcctccgtgctttgtgaatacattaggccataagaaaagcccatctgtggtgggacatatggtcacggattcagaaaaagaagcggatgaaacatgagacaggaggaagaaaaaattttttgttgtgtcgtttttatgtgcttttgtctactcatttactcatgtgaagatgaatgattatggcgtaacgttaattttttttcaaaattttttgaggccaggttttaaatttcttaaatttcttttttcatgagattttcgcataaaaaatagctttttaaattgaatttaaattgtttttggttacataaaaatagggttcggaccccgcccccgtccccgggggcgggacaggtttttggggctcacccccgt

SEQ ID NO: 24140 - DNA, 2236 bp, Heterodera glycines
gcaggtctatggcttaaaaaaaaaataataatttcgggtgtcaatttcattgagagccgcttcttgtaagtacagtagtccgagacagcctgaccatggacaatcgatcaaattttatttattcattggttggatttatgaattgacgaccaatgttcagagcagagaagcaattagttgaaagtaattataggattaggggttggaaaaaccgacggattaaaagattggatcccttaaaaaattcaacaaaaaaaatcccaaaaaaggttacaatatactggagcagtacaagagacaaaaattttccgtgcaagtcgacgaaattttttgaaattttttgcaggctaacagagaacagttagagctttcgattggtacaaataacataaaattctgttacttttaagaacagtttgaacaaatttttgttgaaaaattgtacatggatttttacgaaacgatcgaaacggttggaatttgcgaagattattggtcccgcccgaaaattttttttttaatcttttctgaaaattcttataaacatatttctatggctgttttgaggcgctgagtacgaatccgcccacctttttggcgaatttcgaacccgaactcgaacatttttcgaaaaactcaaaatttcacatttttattctatgtgaaattgccggtagcctcgggtatcgaggacccaaataatgccacaggcttttctcgactcgaaacccaatgcctcgggggactctctcgtccggccattccactgaccattcccattgccccccccccccaccgcggctttgtccaacatgaaaaattgcaatgtgccattgtatgtgtaaaaaaaagcgtaagttcgcggggatggcactcatttttggcggagaatgggcgaccacaacaatttgaggcgccacaacaattccccgtgggaatctctgttatgtgtgacgacgcgctttttttacagcaaaatttgctggtggttgtgagtcataaaaatggccccccccccctcctccgtgccctggggcggggagagagtgccgttggcaccgcccctttcactcgccaaccccgccccctgagtgggaggaggcgggggtggatggttcggacgctggcgtccaaaaaataaagtttgggtcgtaaaccgaataaaatgcgggtcggtcggtattcgagtcgaaaccatataaaacgaaaaaaaaattttatttttttttgaggttaagttatttcaaggttttcgggttcagtgcattcgatttctggtctctgccatttttcgtgtgtgtgttttttagctcgaaatttcgaagtggtaaaatgaattttctgctttttgttcgagtccgggctttgcaacaggccaaaatgggttttagaatctagttctccaaccccgaaaacccctaaaacattagttacatgtggcggactcgaacttccgcccttttcccttcacttttttacaaaaacacttcgccatacttgtaaatctttcacacctttaaacttgtgagcaggggacgaaaatttcatttacgaaacattttctttttatatgttccatggtaaaacacccgaattgtgagcgttcagattcgaatcattttaaaatgtttgagtgtttttgactaatttttcaaacggatgtttgtcgaatatctcaaaaaaaaaaaaatgggaatgttcaacaaataatattcatttttcgcatttaacaaaatcaacaacagtggccgatcggtggatggtcaggtcacacatcaaaaagatacggacgcaaaaatcgtaaccgatcagaacagacgcaccgcggggcccatcgtcgatttgatgttcaacgagcgcacattttgccaattcttcttcagcaacgagacgaggaagttgacgcccagcgaaatgttcgagaccagttcgtcctgcgacatctcaacatgaccaattgcaaccgccagacagagcacctgaaatagtggacaaaatgcattattttttaagagtttcatttattggaccatcctaattaatgttgactcataatcacggatggactgaaaactattggtcaaagttttcattcaaaagttaaaaattagaggccgaaatcctcaaaaatgccggaccggctgaaaaagcaaccggtttccgggcctgcccagcctctccaaaaccagtcgaaccaaggtttttgcataagatcaatcaccggactgtttgccag

SEQ ID NO: 24141 - DNA, 517 bp, Heterodera glycines
cgcttcgcggcgtcaggacgggcgcttcgcgtccgttttttaattttttggggggaattcggacacttcgcggcatcaggacggtcgcttcgcgcccgttttttaattttttgggtacattcggccgcttcgcggcctcaagacgggcgcttcgcgcccgttttttaattttttgggggaattcggccgcttcgcggcctcaggacgggcgcttcgcgcccgttttttaattttttggggggaattcggccgcttcgcggcctcaggacgggcgcttcgcgcccgttttttaattttttggggtacattcggccgcttcgcggcctcaagacgggcgcttcgcgcccgttttttaattttgtggggccaaacgggcgcttcgcgcccgttttttaattttttgggtacattcggccgcttcgcggcctcaagacgggcgcttcgcgcccgttttttaattttttggggggaattcgcccgcttcgcggcctcaggacggacgcttcgcgtccgtttt

SEQ ID NO: 24142 - DNA, 1364 bp, Heterodera glycines
  unsure (1)..(1364): unsure at all n locations
gcctgcannggtctttattgttaacncgagcaaagcacaaagaactctctctctctctaagtaatgaaggagaagcagcacagcaccaactcaattagcttggaagggatacagcccccgggcaacgaccttttttttgttttgttttgcttaacccttcatttttgcggcgcggttcttttaacagtttttttagcgaagcgtacaagcgccgccgggaaaaaatttgttaaattttgaccattttaaaccgattttcatcataaaattgctacttttatgggattttttttttaatttagcgaaattttttggaaaatttgggtgaagaaggccttggatcgtaaattagatcaagctattttcccttaaattttctattgtggatgggtcttgcgggtggggggatacgtaattcgcgtaccccctccccccgggaccgtccctgattattagccgagcaaagcacaaagaactctctctctctaatgaaggagaagcagcaaagagcaaagtgctaaatgctttactgctgctgtagctgaaaaatttatctccatctccaccaccaatggtcacacacacacacacacacaaatgcttcatctcatcattatatgtgggtgaagcatttgcagcagttgcgataaaggcctcacctccccccccccctctcggatcccaagcttgtaagtgtctcctgctgtgggtgacttcattattgttttttgaaactaatttcttttgttgtccaaatgatataagttttctagctaaagatcggacttttgaaaaaagtagttcgggattattgattgacatcaggccgggataggattactagggcgggattgtgaccccgggaaaatcccggcgggatctatatcccgtccgagtctctatcgctatatacgaccccggatggtttctaccaattagaaaagatgtaaataacttgccttagaatgcatttttcgtgaattttttagtcaatgccaaaacgcgggaggcctaaaatattacagtcccacatattgttgatctgataatggatgttgtatgtgtatatgaacatattaattttatttgtttttttaaaattaaaatagatatgtatgtttatttgatcagtgggatttatttatcccaggcaaaagaatcaaaaaccattaaaagcaaaaaatgtgtgcataatatgaataccttaaatctctcctctataattaggtggataagtgaaaacccttctaaaatgggcaaaaaaaactacgtaaaaatttgaaaaaaaaaacttctaaaatagacaaaaaattgaaagattaatttttttcactgtttaattttacaaaattcgatttaaaatt

SEQ ID NO: 24143 - DNA, 2432 bp, Heterodera glycines
  unsure (1)..(2432): unsure at all n locations
gatgagtaagttcactcattctnttttgaaattaaatagtaattttggccttctcatccttgactcttgtgccgaagactatgtccaattttgaacttttaagtctctcttctccccgacatcaattttgacgaaggcacggcaagtgtgacccattttgtgcgaaatttgctgaacacattgaagacgagttcggacgatattgcgcggttggcttccaaagcaattctttacctgattctcgttagtttaaattgttagattgtgttttttctgtaactattttaaattttttcatcagacctccaaatcatatgctgtcgaattggtcgaaattgctttcaaccattgctttgaatggctggaggaacagcaaagcactgaccaacgacgattagcatccgtcattttggccaaagatttggcacttttcactccttcccacttcttccagcgggccactgcctttttcaacgacattttcagagtgttgcgtgacccgaaactgaacgttcgactcgcagcagccgaagctttccatgccgcgttggccgtcacttctcagcgcgaaacaaagcataaaaaggaatggtcggccctttcacttgtttttaatttatttttgccatattttccgcatctatcccctcaaaatggtattcaggtacaaaaagtccttccacgaagcctgtcggtcggacttcgcctccctcggcctcccattggacgactgtgtgcacagttcattgctgattttcaacgaattgcttcgcatcgccgattacgaatatgagcaaattcggattcaccattcggtggacgggccaattgtgcagttgggcagtcgcgcggattcaatcattggccaaaacccaatcggatggcttatcgtgaaaatccggcctgccaccgtggagtcgagcacttcgcgcactttgatcatcgattgttttttctcagaggcaaatttgtttggtcccttgcccttttaattattagcaaaaatgattgcacacttatccataaacatgtcattttcccttaggttgtcaagcgttgtatggatgcattgcccagcaaatccgcccattgccaggcaattctgctcgaaattctgccccgattggccaacttcaccgactcctccaattcgcacccattccaaaatgtgcaggaggcggctgatcattttatcgccatcaacaacaaattcccccaagcgcttctgacccttggccttttgtcattaaaccgtccgcttgaaatgcgcactcgaattccacggatttttcaaattcttattcaacacatgcaaaccgcggtcaacaagttagttcattctgttttaatagagtttcaatttttgatgattttcgtcaccttttgaaaactaaaaaatttggtcctttgctctgaagttgacgccgtaagaaattttaaaatatacttcgaataggtcgagaaatcagtctttttttaaatttaaaatcgaagtatacataaatcttaaattcggtaacattgttttgtaaagagcaagctcaaataattaaagcataaaattttaaacggttggaaatttgcctaattttcagaaaaaagcaaatgccaatgctcgactttcattgtttgtcgctgcttattcagtctcaaaagagccatttgtgcgaaagagttcgcgagtcgctgccacttatgttttccacgggtatttcagagggacttatccaagtaaaaaatgggtgaaaatatccaaaaatttaattattttttaggctctccatgtcacaattgaacacattccggagctannagccgatgtttttgacgggttaatggatcatttgtaccaattacttatggtaggtactgacttgcattgaaagaaattccacattttggtttatattatttaaggatcgtcctcgtcccagcaaattggctcctccaacgcctccacccattccaattggtcccattcagccgaaaaacatcccacaaacccaattggctctcaaaacactcggcgaattcaacttttcccggcactctcttcagatgtttttgcgttatgttgctctcgtaaatcattttaaaaattattcaattaaaaccaaattttaagggctatttgacaagtgattccacgaaaattcggctcacttccgtgtttagttgtggcgaaatgttgaaaccattcgtggacatttacgagcatgtacaaacggagcaaaaggcggaactgtactcattgatccgtaatgtgttggaatgtcttgtcaagacggcaattgttgacacaggtcccgtcattggatagccaaatggaggctttctcattcgagcaatcataagaattgagagggtcactaattcaatttattattaattaaagtgaagttttatcatttgcacttttttaatttaaaacc

SEQ ID NO: 24144 - DNA, 983 bp, Heterodera glycines
cgaaaaaaggtattacccaacttggataacaaagacttaagaatatttaaattggaaactattgcactttcgattggattggattataaaacgtttttctcccgtaatttcagtgcacatcactcgggaatatatccgtggagagtgttcctacgaatttactcgtaaacagctgccaatgtctaatgttgcgctcggtgcatctgtttgattgtgaagaaaagcgaacttgtgcattgtgatgaaagaattctaacttatgcatcacaaagaacccaaacatgtaataaagcagggatttctctttaacttttattatgcgccgttatgagcgcttttcataaaatgcacggtgatttaagtatgggttttctgtttataccaatactaacactttttaaaagttttttgtcgcatacttttttggagtaaaaatataatttttgcaaagtaaaaaattctcatcgactacaacttaaatgattaaggaaacgcgttactgttgatttggcgcgtttctttgtatgtatttcatttcattttagaattgatttttcgaagcgaatttcttttctgtttctctcatttccgtcaagggccaggggtttcctctctcaacactgctttttttctcttctgctgcgcctttttccctttttatgctggcgtcggcgacgcatcgttttcggcgaattaatgaagacgaatggttttcggaaatggatgtcgactgctaattgacaactgcgctggcgagcgcgtgttgctaaatgttaaatgcatgcgattgggtggagcggtcgccttttttgtcacacctttattttcctttcccttttcgttcgtcctttttgagtgcatgtgcacgtattccgataatttgttaatgaattcctttccatgttaatccttgttcgttcatcagaaaatccttaatcgtggggtgggggatgaatgaggaatgttcaatttttgaagactaa

SEQ ID NO: 24145 - DNA, 1095 bp, Heterodera glycines
ttaattttgccttggatttttgctccccataattgttgagtccccaaacggcccttgaaaaaatttattttttttttttggggccagtcccccggacccatggccccagattttggggaggccgaatcctttgggagtactttcctaataccctgtactttaattctgcgttggatttttgctcccccataattgtttgagtaccccaacggaccacggacacttgaaaaaatcgatttttttgttttcggggcagtccccccgaaccgatgcgcccagatttatggggagaccgaatccttcgggagtagcttccctatagcctgtactttaattctgcgttggatttttgctccccataattgtttgagtaccccaaacggacacttgaaaaaatcgatttttttgttttcggggcagtccccccgaaccgatgcgcccagatttatggggagaccgaatccttcgggaatagcttccctatagcctgtactttaattctgcgttggatttttgctccccataattgtttgagtaccccaaacggacacttgaaaaaatcgattttttttgttttcggggcagtccccccgaaccgatgcgcccagatttatggggagaccgaatccttcgggaatagcttccctatagcctgtactttaattctgcgttggatttttgctccccataattgtttgagtaccccaaacggacacttgaaaaaatcgatttttttgttttcggggcagtccccccgaaccgatgcgcccagatttatggggagaccgaatccttcgggagtagcttccctatagcctgtactttaattctgcgttggatttttgctccccataagacctgtttgagtaccccaaacggacacttgaaaaaatcgatttttttttgttttggggggagcccccctgaacagatgcccccaaatttatggggagaccgaatccttcgggaaaaacttccctataacctgcactttaatctgggggggatttttgctccccataattgtttgagcaccccaaaaggacacttgaaaaaaccaatttttttttgtttttggggcaccccccccaaacc

SEQ ID NO: 24146 - DNA, 1305 bp, Heterodera glycines
caatggaagacgacgttccagcagtgcgcacagtgccacggcgtccttaaaaacgaatggtgaatgatcaaatagaaatttggtacatcaaacatacgcttagaagcagatgccgtgccggttgtttgagatccatgtccacgatgttggtgtttcggatgtgtcgaagtgccagcaatggaagacgacgttccagcagtgcgcacagtgccacggcgtccttaaaaacgaatggtgaatgatcaaatagaaatttggtacatcaaacatacgcttagaagcagatgccgtgccggttatttgagatccatgtccacgatgttggtgtttcggatgtgtcgaagtgccagcaatggaagacgacgttccagcagtgcgcaaagtgccacggcgtccttaaaaacgaatggtgaatgatcaaatagaaatttggtacatcaaacatacgcttagaagcagatgccgtgccggttgtttgagatccatgtccacgatgttggtgtttcggatgtgtcgaagtgccagcaatggaagacgacgttccagcagtgcgcacagtgccacggcgtccttaaaaacgaatggtgaatgatcaaatagaaatttggtgcatcaaacatacgcttagaagcagatgccgtgccggttgtttgagatccatgtccacgagttggtgtttcggatgtgtcgaagtgccagcaatggaagacgacgttccagcagtgcgcacagtgccacggcgtccttaaaaacgaatggtgaatgatcaaatagaaatttggtacatcaaacatacgcttagaagcagatgccgtgccggttgtttgagatccatgtccacgatgttggtgtttcggatgtgtcgaagtgccagcaatggaagacgacgttccagcagtgcgcacagtgccacggcgtccttaaaaacgaatggtgaatgatcaaatagaaatttggtacatcaaacatacgcttagaagcagatgccgtgccggttatttgagatccatgtccacgatgttggtgtttcggatgtgtcgaagtgccagcaatcgaagacgacgttccagcagtgtgcaaagtgccacggcgtccttaaaaacgaatggtgaatgatcaaatagaaatttggtacatcaaacatacgcttagaagcagatgccgtgccggttgtttgagatccatgtccacgatgttggtttttcggatgtgtcgaagtgccagcaatggaagacgacgttccagcagtgcgcacagtgccacggcgtccttaaaaacgaatggtgaatgatcaaatagaaattt

SEQ ID NO: 24147 - DNA, 2133 bp, Heterodera glycines
ttttgcccacggtcagttgtacacggcgctttcaaggtgtacaagtcgtgataatataaaaatttttgctcccaacaagccaaaagacgataatggaaaccctttgattagaaatgttattgcccctggtcttaatttggattaaaccttttaatttaatatcaatacatttaaaaaattttctcatcaatgtgcgaagatccccggtaatgcgggaggtgccgccacccttaaagtgcgaggagccccggtaacgcgggaggtaccgccacccttaaagtgcgaggagccccggtaatgcgggaggtaccgccacccttaaagtgcgaggagccccggtaatgcgggaggtaccgccacccttaaagtgcgaggagccccggtaatgcgggaggtaccgccacccttaaagtgcgaggagccccggtaacgcgggaggtaccgccacccttaaagtgcgaggagccccggtaatgcgggaggtgccgccacccttaaaatgcgaggagccccggtaacgcgggaggtaccgccacccttaaagtgcgaggagccccggtaacgcgggaggtaccgccacccttaaagtgcgaggagccccggtaatgcgggaggtgccgccacccttaaaatgcgaggagccctggtaacgcgggaagtgccgccaaatcttcagagcttagctcctcgccgggggcactaaaaattaaaaataaattaacaaattacagtaaaaaataacacacccccggcgagtggggtccatggtttttgccagtttcccaccgtgctcctccgcgtggtggaccctgggggttggacagtttacatttacaaaaaaaaattgtccaaccgctaatgacggttaataaactggcctcatgtccgcgcaagaactagcaacgaagtcctttgcgcgaagcgcttatgtcaataccgattatattggggttccagaagtattttttctactttaaagccaactggtcaccctagttatatactactaaagaaacaaggagtttcgtttccaaaaacaaaatctccttacggtttgccgggagggattcgaaatttcgaccttgggggtaacttttgacggcgcattcaggaaaactatagattttccgatccgagggccaactgagcgccaggcgccgaaaagtcacttttttcgaagcagtttttgcagtttttgggattcaaaaattttttaaaggcttaaatgaaaaatcggcctcgataggattttaagttggacttttttggattttttttgtttcttgaccgaaccccaaggtcttgtcagtttttccgaaaaactggctaaaaattgcatacttttttgggccatttcagcgccggctgaataactcgccggggtttgaccggaggaggtcggtgtaagcggcttttttgtacagcttgacgagctctatccaaccatgcttttagatttcagaaattttcagaaattttcgagctaggccccctcaaaaattttccgtttttgaattttataattttttacagatttttccggggaaaacggagaccactttcaagcaaccgtttttcatgctctatcgattggtgtcattttcagaaaaatttttaaaattttttttggaaatagaaaatttttggttgctaggcctcaatttcagttctggcgcaataactcgtcaggagttgattttatcaaaaaatcgtctacgagcttttttgtagagaattttaagcccaatctaatgtgctttatctcatgtttttatcttgaatttaaaaaaagttataaaattaattgtgattttgaaactcaaaaccaaaggggggaccccatggttttgcatttcatgaaaaatttttttgctcctaaattagccaaaatgcatttttatggcctaatttatggtgctgaagacgaatatatactttatttttggtttcagactttttggaaggtggttacaaatttttgaaaaatcgtctaaatttgagccccggaaaatccagtcaaatttcgaaaattcataactctcttcgtttttgatcaaatttagtggaatgtagtttgaaaaatagcaaaaaatgaggagaattttatgagattcatttggaatttctatcttc

SEQ ID NO: 24148 - DNA, 1429 bp, Heterodera glycines
tagagcaatcgaacgctaacggacgacctaatgtcattaaaatccccgaaggagagaatttaattaaatccattccttcgggggaccgtgccgggtgccgcggggtaagcagtgctggttcgtttcatcacggcaccgaaccttttggctagtcagcaatcgttgcttaacttgccagatcggacgggtgcgcatgattccactgttccaagcaccccaccaaaagcaaaacgatataaccaaaatataaggaaaaattttttaaaaaattttttctccatcttcctttttgatactaaagcatcagagtgctaaaattaagttgtaaataaaatttggtgcgctttagagcactttctgaaaaaaatatttatgaaacaaaaaaatcgattttttcaagtgtccgtttggggtactcaaacatttatggggagcaaaaatccaacgcagaattaaagtacaggctatagggaagctactcccgaaggattcggtctccccataaatctgggcgcatcggttcggggggactgccccgaaaacaaaaaaatcgattttttcaagtgtccgtttggggtactcaaacatttatggggagcaaaaatccaacgcagaattaaagtacaggctatagggaagctattcccgaaggattcggtctccccataaatctgggcgcatcggttcggggggactgccccgaaaacaaaaaaatcgattttttcaagtgtccgtttggggtactcaaacaattatggggagcaaaaatccaacgcagaattaaagtacaggctatagtgaagctattccggaaggattcggtctccccataaatctgggcgcatcggttcagggggactgccccgaaaacccaaaaaaaattttttggataaaaattatttaaatgaactgactagataatatttaaaataggttatttctcttcctttcagtatccctgcaaagtttggtgcgcttctgatcagtttctgaaaaaaaagttaagcctaaactttttggcctgtttaaaaaggaattaaaaatttttaaaaattttattcatctccctttttgatagaaaaagcatcagagtgcctaaactaacatgtaaataaaatttggtgcgtttcagaaccctttctgaaaaaatatttaagaattaattttgcaaaaaataaataaaaacgaaagactcagattttcgaaaatttttttgagccagctagctcggcgctcatttcagtgtaagttagtcctttaccggggagtatccctgcaaagtttggtacgcttctgctcaattagcaaaaaatatgagtgatcgaattttcactaaaaaagttaagcctacattttttggcatatttaaaaagcaattaaaaaatcttaaaagtttaataattttcctgcaccgaaggtactcactcgg

SEQ ID NO: 24149 - DNA, 1665 bp, Heterodera glycines
caaattggtgcctttgtcaaaaatctgctgattggagcggagaaaagcgatgacggaatggtcaatgtaactgaaaatggaatgtttttgtttccatgtaaaactttgcatcattaattactcaatctgaaggtgtttgaagcgaattttgtgtggcagcggaaggtcgagccaaggaaattgtacagaattggcataatcgatgagcacagataattctgacgctgctgtgccattgttcttgcgaaatccaatccatctccaaattgtgaattcgttctttccatcgaaatgtttgtccacaagcgcattgaaacgcggtgaaagcagcgccaatttgaggccgagttgaagacgaccaaaaaatgggaagagatccatcaaaacatcgttacacacccagctgaaatttcgataaaaataacagggaaatggatttaatttttgaaatgcttaccgtcggttcatttttgagacaattaacacaatttgacggtttttcgaatgattaaagagaagaataggtaattatgttagaaatttttttacaatgagaggaaactcgaaaagacaaacatttttattgtcacaaaaatgggactctgctaatttataagcattttgctgcttttcaagagatcagagttcccaagtttttttttcaaaataagacaaaatggcctaaaaactaagattctgaccccaaaaataagatttttctaaaactaatatttgcgtgaaggaaacgcaataaaaacatgaaaaattgacttaaaacaatattttattagcgtaaaaacgaaggcctgtcaactgaaaatttcgtaaatcagcattttgaaaaattttattcaaaatttaaaaattaataatgtttttgcggcgtgctttttccaaaaaagttttgggaattggggggccggcagtgccgataggcgccgccgggaaaatttttgaaattttgtatgtgatttgttaacagattttgaataataaaacaccaaattattaaatttttaactaattttttacaaaaatattggaattatgatgtccaaatcgcttattatattatgccaagcactgtctgtaaataataaagcaaaaaaaaaaaaaattatttttaaaggctttttaatctcatgcaaattcaatttttaaaaatttaatccgcttaaattgaatgaacaaaaaatgaatttgacccccgtttttgccattattctccttccccgccccacgcttatcaaagtaagtcgtgcccattatttaagttttctctcttttctttttttttcctcactttctctgcttttactcctccatatgaaagtttccccatttatttatggacttccaaaagggtaatgagcttagtttaagcgatttgcgctgtttgttgggtgagtgaggagtgttttgtgcattaattgttgtcgctttggccaaccttttctcttttccctttccctccgtcccaaatcccccggggggagcaaaaaccgaatctccgccagcggcgagggatttgacatgcgcagcatcagcagaagcagaagtcagcaaagtcagcatttggcctgccccgcctccgtcaccgccatactttcgctctttttggtcgcgcatgtgtcctactttggccgggggttggggggcgacatg

SEQ ID NO: 24150 - DNA, 1428 bp, Heterodera glycines
tatctcgtaaccccgatgctaatccgttccgcagagcctcttcaaaattttttccattaccgcaagagttgcggaaattgtgaattaattctcagaaaaatggctatctctttttaggacaattttctatctcgtaaccccgatgctaatccgttccgcagagcctcttcaaaattttttccattaccgcaagagctgcggaaattgtgaattaattctcagaaaaatggctatctctttttaggacaattttctatctcgtaaccccgatgctaatccgttccgcagagcctcttcaaaattttttccattaccgcaagagttgcggaaattgtgaattaattctcagaaaaatggctatctctttttaggacaattttctatctcgtaaccccgatgctaatccgttccacaatgtgatgccagaaggaacggagtgtgggagaaagtgggataaaggacctgagagaacctctaaaagaggcgcccgtagctcagttggttagagcacggcacggattgctggggtcgtgggttcgagtcccaccgggcgagttaccttttatgttctacatggcgctcctgggtggatcccctccacactgccgggaccactggaccaaggagagtccaagtccgtcggtgaagggccaaggagagcccgagggaccggtcttccgagggaggcggaatgtgatgccagaaggaacggagtgtgggagaaagtgggataaaggacctgagagaacctctaaaagaggcgcccgtagctcagttggttagagcacggcacggattgctggggtcgtgggttcgagtcccaccgggcgagttaccttttatgttctacatgaattaaaagatatataggtatttattttgcaaaataaatcgcctcgtcaaaaaattcttccaatggtgacaattcctgaaatttgaaaaaaatctaattatgtcgttcacttaataattattcttttttttaattgcgcttttaaatttattgcttaattaatttttggattttcttttttcgacaattcactgattttaataattttctaattaataaattaattcgaaaaaactacttttttaaacttattaggagacgcaataatcattgataataaacaggaataaattaagaaaaagccgaatttaatacaaaaaagtaatagcattattttaggcaacaactaaaaaataatttctttattaaaagctaaaatgaataaaacaattttattattgaagaagcaaataacgacgaaaaaataaagcaatatttattattgaatataaatatataatattgatgaaaagcataatttttcgaggaagaaatgacttattttttaaaatgattttcatgtgataaaattgtaaaatattttttcaaaagtgaatatttttttaaaacaaaca

SEQ ID NO: 24151 - DNA, 1518 bp, Heterodera glycines
tcaatgcacagacaatatatttgcggatcttttggactatgttaaacgtcatgtctatgcacgagcataaacaaagggaaattgttcactcgttggggaagtgacctatgaatgcattgggtgttgacaagcggaacacaggacgagcagagaagcccggtgctgcgggctcgggtcgaccgattggcacatagatcaaatgctgggatttagttcgtcacgttcggcttgtttgggatggtgctgttgtacatatcgccgtggtttcgccatgtcagttacatttgctttttgcggtgccatttatggtgcggttgttgtccatgaaattgtcacttaaaatgtttgttgtttcgttttcctcttccctcgactagcaatttgttgtccaatttagactaatctaggatgagtttgatgttggggtcatttccgagatcgtaaaatggggatgatttgacatataggtaaaacaggttttttcgaaaaagtcgatgtaatgaaggatgttctgaaatgtcccaacatgacggatcttacgaaacgacctagcaccatttattattaacattttggaatttaattaatcatatatttcccgataacttccgagtcaaacttttttatttcttgcaaaagctgtaacaattatataattaacattaaataattatactttaaaatcgtctatagtattatcagtttttattaataaatccattttcaattaaaaaattttggactttatatataattatttcattcgatttttttattacgtaaatatgaaaaactatggtattatagttttgtaaattatgttatttgttcgtgtattttaaattatcaaattgagtgaattttatacttcaaaattttttcttagattttcaatttatatcaatgataatttggtaaaattattcaaattataaaaattaaatattaaatgagttttgcataattagggtagatttttatcttttttagtagataattaatttatttaagactattaccagcaattgtttaaattaattttgtatgtgtttacgctagcaatctccaaatcattcgagatatattgcgtaacattgttttgcaaaaaatttccttcaacccttgccatggtaagaattatttaaataaaagtagtaaagaataagaatgtttattacattaattgttttacatgtgttgtatttagtatttgattagagttttcatttattgtattcttataagagttattttaagtataattttaattattgttggagcttaaattttttttttattaattttcactacaatttcaaaatacgcatgtaaagagcaaaaaaaaaagttaatctatcgtaactccaatgaaaaagttgctcagatatgctctgatagtgaattttatcgtttaatttgtaatgatattatgttaatttaatttttttttctattaagtatgaaaagcattcaattccgttaagagattttttttaattgcatgttttaaaaaacatg

SEQ ID NO: 24152 - DNA, 1660 bp, Heterodera glycines
agatgtgtaatcatcagtttcttctccgtaacttgtaatgccgccggcggacgttcgtattctggaagtagcagcattcatcgctttccgtctgacctttttagggcccttaatttttttgtcatcatcttgactgtccactgcgtcgagtttgttgaccgtgggtttttgtatgcccatatacggggcaatgtttgctggcgctgtgcccgttgcattttccactatcaccttttgtggcttgttctcaatcatatccttcaactgatgcctttgtttgtacaaccatgaatgtcgcttgattttgacatctgcacccgctttgctgtcgctaaggttgctttgtatttgggcatcgagagcagctttctcattcagaagtgagtcagatctgccggcgcctcctttcaacatgttaataagcgtcagatattcactctccggtacaaggaccatttttttagtgtgcttcatgttgtttttgttgttgacgccggtgcggctgtaacaattttttggatcaactgctcagccaaaacgctaattattggtgccaaaatagctcctaaagcaattccgctgccttgttgtagccgctgtctggctgtgggctcactgcgtgaacgtgcgattgctcggtagtagtctgcgtacacggccaaccgcctcctctgacgcctgtttagtcggaaattaaacttcagaatattagcacaaatttccaccaagcctagtatttgttctgctgaagcaccgcgaagcaaatcgtttttctttttgtccgatttggtggaagctaattttttaagaaaatccgagttatcgcgaatgtatggactgaattcgtacattttgcatgggtaaaatttctgctttccttaaatagttttttattgcttaccaacacgcacatgcacgcgcatattactgttctataggcaaatacacctcacggttctctccaggaaatattttgctgggcagccgctcattttcaggagcatttgggtgcatatttatcaccaaataactgaacggctgactggtcgcttcattgtaagcctccataaattaatttaatcgttttggaaaaagttgtgagccgaccgttctgacttgaagttggcccgacgggtttcttgtcagtaccagctaatgactgttcgcccttgcggtcttaatattacgtccgtgcaggctttgggtgacaaaaataacgctgacattccaattgtgggaaccgcgtgtgaacagcaaatccaaaaaatcattccctacattaagcatcaaatcatcaagcacaagcaatggtttcggctgattctggatcagtgcttgatccggaacgccattatgtgtctcgattccgcgcttcatcagctcaatgactgattggttcatctcagagtagcaatacaatactttagcaggcggagtatcgataagttcagcgtagctctcagtaatttcattagccattgggttttaccgctcccagtggcccctgacagaattagagtgaatgggcaataaacatttttattttttgcaatttgtaatttgtctttgtcatttatatacattttcagttcagatgggcggtgattaatcattttttcctgttaaatactttaagattaatgaataaatgaaagctgtc

SEQ ID NO: 24153 - DNA, 1017 bp, Heterodera glycines
ctttgggcttgctcacctctttctccgccgttgccaatgattccatcgcctttgggttcaccgttctcagcaagtctttgctgcgcgtcttgcgctcgtcgtactcgcgcttgcccatttcgaagctgtaattgcgaaaatcgtacgccgtgccctccacggcgaagtgtttccgttcctcggctatccaattgtgcgccttctccaactgttgggctcttttctcgaaatccttcgcatttttcagtgcttcctccctgtcccgtgtttttgactcgattttggcttccaaatggcgaacgcgcttcttcaagtcctcaatttcggcagttttcacacggatttgcttctcctgcgagcgcacttcgttgttgtacgtctctaacttttgttgcgcttttttgaccttttcctgcaaataaaaacgaagcattgaatttttaaataaaacccactttggcttccatgacgaatgcgttagatttggctatttcagtgctgatttcctcaatcctctcattcatctgcactatttcttcctcgtcctgcccaattgagttttccaatgcattaatttcttctctaaatgattttaaaaataggttttatttcccttcttgccaaccttagccctgccaatgactctttgatgcccgaaaatgtgcccttcaactgttccaactctttctgcgcatttgccaattcttgttgggccgtcttccgttctctctcttggaatgctctttcattggtcttccgttcttcaaactctttgactcttttcgtcagtttttcaatttccggcttcgctgtttcaatcgttgcattcgcttcgccaacttccgtttccaattgcgcaatttctgcccgaatcacttccgccggactgtgcgcaactgttcattgattgcgtcaagtcgcttccgctgagcagtgagttggccattgagttggtcgtattgttggacgaggggactcagtcttgcgagttcccctgaaaattccttcaaaatactg

SEQ ID NO: 24154 - DNA, 968 bp, Heterodera glycines
ggaggggcctcagtcttgcgagttcccctgaaaattccttccaaaatactgacaacatcgggaaagcaatcactttcaattgcgccaattcggtggtcaagctctcggatccgttcatattgtccactgatttcgttgagcgcagtcaaaattgacgcgtccggcttccggaatccgccagtcagcacaccggtcggcttgaaatcctcaccggacaatgtcactgtacgacagtttatggcccggtcgaatgtcagctgcttggcctggtccatgtccccgcaaatcttgacaaacactcaattcaagaaacacgcaacgagcaagtggagagttttcaccaggcaattgccaaaaacgctgagaatggccagctcaatttcccgttcgtattcgatcagctctccggggaagaacacgttctcctcgcccaccattcgttttgcctgcccaattagccgctggtcgagaacatttgcactgattttgtccagcggaagcattgtcacccgacggggcagccccgccttaagcaaatcctcgccggtcttcactttgtcgatcacaacgtgaaacagctcaaaaaagagagaaggatacaatcaaaataatttttatcgtttttttggcaaaattaatttcaaaagactcacccgaccacccgcaacgacttccaatgccgtggcatatctttgttcgttcattttaaacagtttagcaacgacgcccttcactttgttccggtcgaatccgttgtaaggcattgtatagtcaaagcgcagtttgaaatttcttgagaaaaatttggaattgtagagtaagcacggtcatggaatgaatacctggcctcaaaccggtccaattcttgcgcacattgccctctttctctggccaattgaacacgctcctgctcaagctggtggtccaagtgcggatcaaagttaagggcgcgtaacttttgctgaaaa

SEQ ID NO: 24155 - DNA, 973 bp, Heterodera glycines
acaggactcgggctcgggctcgctcaagggatggatgttttcagtcatacgtgctcttccacctcgctttcttctcgctgttcgtcgtaaccgtcgacgtcttcttcgtcgtcgtcgtcgtcatcctcatcatcttcgccgcttgtgcgatggccgagcgcctgggtgagctcagcgtccgacataatgctggagcaggagcttgtcatggctgggaagaaggcgcgctgcacgtcggggaactcctcgacggtctccagactgccctcgctgtgtcttcgtcccttgtccacagaggacggcgagtcgagttcgcgagtcgagccagaccgtggcaggtccgccatcgttggcgagtttgtggaatgtgagctcaccggcggtgaagaggtggtagcggggccatggctcgccgcttcgtgcggattgagccgcgcccagcgagcgtacagcttgagcacgagttcaaccagttctgccttttcaatgcacgtgacgtcgctgaagcctgcgcggtcgatgcacgccttgagctccttgatggtcatcttgtgcaccgtctcgatcgacacccccggctccagcgggttgtgcagaacgacgggcgtccgttgtggcttttcgggtgacgacatcgggctatcgagttgcagcggcaacatcccaatcattacgcgcacaaactgcaaagcctgaacgaagaaattggccggtcgcgggctgttgtgaccaccctggaactggtagagctggttggggccattgtgtgctttggccagggcacgaacgtgatgtggaccaaccagctcgtcgttcagtccagcgacaaagaacgctgagatggcgcacttgttgactctggcaatcggtttgagcttgaacatgtcgaacttggcgcgcttcttaatatcgcgccgaatcaggcgcatcaccagggttgaccgcgatcttggggacgcccagtttaccgtca

SEQ ID NO: 24156 - DNA, 926 bp, Heterodera glycines
atattttcctgttcgtgtaaccaagcgacacgtacttgccctggaccaggaatgcgcgagatcgtcaatcacgagccaacagctccaccagtgaccacaccacacgcacctccgacagccctgagcctgaaaagtcgagggcaaacgcactgaatcctgctggaatcgcgtagctgacgatctcgagacctcccaagcgacacgaactgttgccgtgcaagatgacaatgcacggcgtcttctcgctccgatccgtcttcggtcgccaccaactgcattcgagcgtgtagccgccggggttcttcagcttcatgtctgtgcgctgcatcaccacatctcgcaacattgcacgctttggaccaaggtcagcaggtgtgtacgtggcacgaagcggtcgaatgaccgtcatgaccagcccttcgtagccctctttgatcatcgaccacatgccccgtcgatcgccttccgacactgcacagcaggcaccgtaccatcagtattgcgccataaagtacactagcgacaaccacaatgaccatggaaatgcacgcgcaagcacacataaacacagagaaagcgagtgcatcaccagcgcttctcccccaaaataaagcagccaacgctgcttcaacctcacacacagagactgcagcgccacattcgcattccatcaccaggcttcacacacacaaacacacgctctctctctttgtccacgtacttgagtcgtccatcttgccttcggggtgcctgccttggtggcccaatgcacacgtgcctgctttactgtgaccggcagctgctgctgctgtcgacgttgcttcctttgacccaggtgctggaatgattcaaagcacttctcaagttccaaatacgggtcccgcgcttgggtacgctggtcccgaaacaagggacacatgagggca

SEQ ID NO: 24157 - DNA, 1540 bp, Heterodera glycines
cattttggcatattggattttgcaatctctaattgcccaattaaaattaccaatttataatttgactttttccaccgtaaatttaaaaaaaattcgtttcaagtttttttaaactaaaatgagcattcgcaccattgagctgtgcgtgtccattttggaggaccattttggcttttatgtgtcagcggttggtgccgttctgttgcgccagcagttgccctttgtactgcttgcgaaggagttgcatggacgggttcgacccggcgaggtgcataaatgaattctttcaatttggcacgattttgtaaatccgttgacaataaattcactcgggttaggccttcaacttaatttaaaaaattttttttgtcagactcaaaatatagggggttggctgggttatcttgtggtaaatttaaaataaaaaattttcacaccgcaaaatttataattcagatgaagcgttccatcgccatcctggaccaacacaatctgctcaggtgcggattcaccatggattctgacaaattagctcattttaatgggaaaaaatcgttccccccgacgaaaaatttattttttttcaaattttgtaacttaaaaaaaagcctcgaaatttccaaaccctcgctcgtcactttagagcagtacattgcaatttgatgatggttttccatttgatcatcgcctctcattttcagttttgagtcgcccgcgcgtgccggtgccgtcgtcctctacacagtgttggccccgcgtgtgctgaatttggtccgtgccccgcgtgccattctcaccgtcaaaacgctgtacagcagcggtgccatggaggcaatctttgaggacgtgttggcccaggggcggaccagctgctctcagtgcattcgacgggtggccaaatgcatggtggacaacctgccgatggacaaggtgtgtccacccacagcaagcagtacaggcgctaaaaaaaattggaaatttttggggcctaattaggcggttcagctcatagattttttgcatttgtaaaattgtcgaaatttttaaaaattgttaaaattaaaaaaaaatctcaaacagataggcaccgacattgaatttttttggctaaaaattgttaaaaaaaactaaacaaaaatgtcgctaggcgctgtcgtcggtggtttttttgattgaaatttatttaaaaaaatgccttttttttattccatggaacgaggaacagaaatacatgcacttctccccacaccttaaaggatttctccgccttaacattgacaaaatggcacatttttccgtcgaaaatcgaatcccctcctccttgaaaatccatttaaaaaattttctaaccccccccccccccccccctccccaggtcaaggacgactttgtccgactggccgaggcacaacttgtgacccgttgtgatcgcattgacgacagcgcgctcgccgtcaccggctgacccacattttgtgccgagcccgacccctttttgatgccggaccgcattttggacgtcggtgtggacggcggcatg

SEQ ID NO: 24158 - DNA, 1775 bp, Heterodera glycines
tcgatgacctctatcaccgtgttgtgaagcatggtgatctcatcaatgatgatgagttgggcctcacgaatccgacgggcaaagaagctctccagcggaatgcttgggagtttgtctaatgacacttctctacccagacgaaacgtggaatgggctgttttcccatatggcagcaaaatggctgcacacccagtggatgccgtagcaagcactttgtaggtgtatggggcctttcgcaagcgcctaataatttggccaaacaggaatgtctttcctgtgcctccatcgccgtatatgaagaaacggcgggggacagtcgaatccctagggtttgactgtattgccaacaaaacagcatcaaagaccttctgttggtcgctgttaagtggcggaggggtatttggctgtggacgaggatttggttgccctggaggcaaattcaaatcatcatcgccaaagaaaaactcattaattgccgcatttgtatttttggcaattgagtttggcgggtctggcaagccaaaatgcacagagcttaagttaaagcagctgtgcagccgccaatcaatgtcggctagggcttcaagctctgctgcttggcgttgtgccgatgtggtaatgccttgaggaaagtacatttggtctttgtacttgttccacaattcgacggcattactgggctggccataaacgaggatgctcatgaagagccacctcatttgatcaggccatcgtgacaacgctgcctcagcgagtgttttatcccagattttgtcatcctcaagaagaccgtgccttattgcagcatcagtgaaagaggtacaaggctgaccatttaccattttaagatggtcagggtcaccgggaaagtggcgcataagtgaatagagcgcgaacctttccggatccttgggtggaacagggacaattcgaccgattggtggtctctttgttaggttatatttccttttgttccatttgtcctttgcccatataaaatgctcagggactttttcaaaaagcatgtccttgagcttcggatcatgcttccattcattttgccattgtttccaataggcagaacattgcgtctctggcagtttgccttgctggatttgttgagctttgctcaccagctgaaaagccctgtacacaatcggttgttgattaggcatatggatgctaagtttgacaacctgatgtgaaagtttggcaaatggcagtgaatgaacaatggcatatgcttccgttgcaccacggaagttcatcttggcatattgagccggctcatcaattccgattttattgccggactcttgtttgcactcgacataacaatgtcctggccctttaaaagggtacttgagtgcgtatttaatatttgctttgttaccatatgcaaacagtacattatggtgtactcggtaacgtagcagaatataaggattatacggcacgacatgtgagttgtcgtatattaggccgtttacctctaattgggcaccaccatcagttggtgaaggccggaaatacatcgcgggcctgtccgggcgcaaaatcgtacattttgagtaaggggctgggaaccccttcttgcaccgcccgtaaattgggtcgctaggaccacaccaactgtcactgcatctgtgcagttgcatatgcattgtttcgcggatttcgcgatgcatttttgcaatgggcgtgtcgtcatctttatcaggcgggaggaggaatgtgcgccctatatgtattcctaagatgactatatgggacct

SEQ ID NO: 24159 - DNA, 1542 bp, Heterodera glycines
gcaaaaatggggccaaatttcacggacaaaaacatcccaaatttgatccgtttcgtatgaatacacttccaactccaaattggtgcccattctgtcccaaatttgtttgttgacacggataaatgcaagcacagaatggtcaatgtacctgaaaagggggaaatgatacaataacacaaattatgaattacataatcataaggtccataaatcggattttgtttggcaacggatggtccggcatcggaaattccacaaatttgtccttattgtccttgatttgcataaatagtttcgcttttgctccaattttttcctcatcctccatgccctttcgaattgtaatgtcattccaaattatcaattcgctttttccatcaaaatgtttgtccactaaaaagtcgaaacggtcggaaagcaatgccattttgagtccgagttgagcacggtcaaaagatgggagaatgtccatccaaacatccgcacaaatccaactgaaaaattggaaacgaaaattttaatttttcaaaataattccttaccgtcggttcattttggaggctcaattagcacacttttccctttaaaatctgttgttatgtaacttaaaaagagacagttaaaatgagaaagcaaagtacaaatcaatcaatgatgcataaggctgggaatttaaggcactaaaaatcttcaaaaagtcgactaaaaaagtcataaaaatcgccaaaaagtcacgaaaaaaaatcctgaaaaattaggtgaattaatttatagaataacactttgatcatatttaaaatatcttaattttaggccattgtcgccaccagcgaaagaaaaagaagaagcgggcaaaagcaacgaaaatgtcgtctaattattagggaatagaattacatggaaatccatatttttttcctggactgtgggaggcctgaaacgcacgaaaaacatgtttttagcttggtttgaagcttctaggaaggatttctatatccatattttccatatttcgcgatttatgtccatatttccatatttttccatattttggcattttggtccatattttatgtccatattttggcatttttcaaaaaaacctctattagaacggcccccagcagctaaattagcttttttgagcccaaaacccgaaaaatttttcaaaaaatcattttttcgccaaaatttctcgagaatattgaataaatttaaattttcttaaaattaataaattatgtcaaaaataagcaaaaaagcgaaaatttcgcttttgttgttgattttgcgctaaaaaaattaataaattttagcttttatgttttttttcttttaaaatgattgcacgtaattgccgaaaaaattcgagaccaatttccgaatgttgaccgactaattgcaaaacgaaagccgtctttgtcaaagcgccttaccgagtcaaaaaatttggaaatgtatctcatatgcaatttcaaccaataaatttgaagaaaatttgcactccatttttgaaaatttatgtccatattttgacatttt

SEQ ID NO: 24160 - DNA, 2081 bp, Heterodera glycines
cgtgacaacaacttttgaaatttcttcagtcacgattgaacagtttcgatgaacacaataataagcttttactttttgcttaatttagccggagaaattaacaaagaattgttatttgaatttgtttttctgctaagtaattaaggtcgggaaataaatgaggagagaaaacaaaatttgtgcttaatgggcaaattaagcgaataatgaatgaatgagggatggagggaggggttcttctggcctaggacccaatgatcacgagcaattgttgccaattgcttctctgctcactttccaagaatttgttttatttatccacttcgccggcgattaatgcgaattcttttgttgatcaactgactactcttttctcttaatctcgggatcccgatttgcaaattttaattgccaaattaattatcactttttctttgcttacgtcccttcctccttttctttcttgtccaataagctctttgacaccaaacagctggccaagccgttttcgtcagccaaagttcggccaaattcgtcccccttttgccgttcattcttaacaattacgaaggaccaaagtccaactccaattctcgtaattgtccccaattaattgcccaaaaacttatgttctctaatttcatcatttgtacatctttctaacttatttttgtccatttctttaatttaatgtgtgttggtccccaacattaatttctgcctttcgccaatcggctttccacttggcccggcgatcgccactcctttcatcacttttggctcttttgttcagtactcagcagacggaggcggggaataatgaggccaacaaatgagagagagagagagagagagagagggaacagaaagtgaacgaacgatttgtgagaatttaatgaaaagaaatggtcgaaatgttgtgaactgtgaagtgactgttgggacagggaaaacgggctgaaggggcagtccattttccttttctttcaaactttattcatttttgaacaaagttcattttcattttccacttttctcaaaaatttatattcctcatttttgttcgcatttcggttcagagaacgtaaaaaattcttcaattgtcaatgtccaccacttgggaaattagtcaaaactgtcccatcagctgccctgagtcttaccattgctttgaacccactgagtttaccgcgcctcacctctgcttgccgccaggcgtaactcccaattcgtttcggcactacatttcatttcgtgaggaaaatgccgtgatgattttcggtgccattctcctttccggtctcgcattgtggtggctcatttgcttcttgttcctctgctttttcccttactgctttcgtccgattcgacgtcttaccacgaaacgccgttgtgggactcattctggcacttctaaccctttggccgattcctcaattcttcgccgtccgtcaaacaccaaaagtggcgttgctcgtccgcctccttcgtttgctcttccattcagtcggcccttcgctcattccgtaagttcaatgtgaacattttatcgtattttcaccttgtcacccttcaggccaatttatcgtctgtttctgtctcggccgtctgatcatcctcaaaagcacattctcgggtgggaattccacatttcacacttttaattgtccttatttttttaatttaaattttctgactttcatttatttttcttttcattatttcagtcgctgttaacaccgccttgtgtcaatcgatctgaacttttcctctgagcttttccggccgctctttgccacttccacttaatctcttccatttcttgcattttcactttaaattaattaataattttcgccttttttaatttataatttgttaataataaaattactaatccgatcctggccaaatacatttatttatttatttattttttacaatttcgtagatatcccgagaggcgggacctccatgaaataggcgacgggtcccttcccaattatcccagcggcggcagttgattatgtccttttattgagtaaatgtgcgcacaatacaaatatatatgatgagtatat

SEQ ID NO: 24161 - DNA, 1618 bp, Heterodera glycines
atgtttttcccctattactttttttctttgtcatcaaatccaacattgttgatatcattcaaaagctcttaacatgctctatagccttaccaaaagcgaaaagattttcaacctggaaaaaattttattaagaaaaaagttcaaaaatttcgacttttcgcaatcgtgaatcaatagcttagaaaaagcttctaaagatgtattaagctttcgaatgatatcaacaaattgtttttgaaggtttttgctaggattggtcacgagcggtcacagcactttttgtcgcatttaaataataataaatcagttaaaaataaatgcgggatgaattattttgaaaaaattcaaaaataagaaaaaatgtaaatacctatcgaaagattacgaagtggaaaagcttctactctaaatttctaagcaagaaaattataagcccatttgattaaaaatcatagtttttataaaatttaactcatattaaaaaagcgaaatatggattttccattcaaatataattttttttaaaattatttttggtacaattatttaattaaatatggtttccaatttttgcacaaaaataactaaagagcttaaaaaataataatgatacagaggtaggaaaattaaaaaaaggtttaatttatgtcattaaatttgaagagaaaaaaaatcaaagttattaccaatgagaaatgcgcaagggctgcaaattgaaagacattcgttgtcgttttctcttccgcattgaaccaattgataaatttcttcagtgcatctataaaaattctcacaaaaatcaattcaaaaaattttaattaataatgataatatatttgtcaaaaaatatatttctaccgcaaaaaagtccaataattcgaagtcaatttattaaacatttccgtttttataaataattgagacctattaagaattttcaaaattttgtttttcataaaaaggaattttttgtttttgttaaaatttaaaattttattaattttgtaatcactcgcctggaacgtgatcagaatgaagcatcggctccccgctgacctcaacttccgtcgttcgaattcgccctgctgcctcgtcgttaggtgaatgcttctgcagtatgagcttatgcagattcataagcttcttaaaagcaaaaacaggtaatatataaaattaatttttaatttttttaacaaatcgaacattatattcggaagaataattttatgcaaaaaacttatgacatagattgggcgcttatttcttgttttttaacctttttcggcaaaaattatgtattttgacagatttttatttttgtcattaaatgacaaaattaccagtattctaagaaaaaagatttgtacgatggctaatgattttttactgattgtaagacctgtgttacattttgtccatgttttaatttttatatatttttttatccgtatttcgccatattttacctttctaatttcaataatttttaatgtcattacttacatcaactgtcatctcctcgttgtatttgatggtgtccaaaaactccaagtagttcgcgtcctccgagaacagtgaaatggagtcaacacgccgcatggtccctgcgcggtcgtcg

SEQ ID NO: 24162 - DNA, 1611 bp, Heterodera glycines
  unsure (1)..(1611): unsure at all n locations
ccccccccccaatcgttncataattaccaattcgaatttttccgatttgtacggtttttccgccctaaaaatttgtttttttgtgtcgtcaacaacgggaattgtaaagaagctgcagcatcgatgaccctttaccctttccccaagaaatatctgaattggtcaatttccttttcggatttggtgccaaaaattccctttacttttgccacttttcgttttgctttgggccgtgccaacgacggtggctttgtctaaaactgcgttcattttcgttggaaattcattttcgtatttccgcattttggtgtcccaaaagtacggcgaagacttctgctgttttgccgatgattgtttctttgtttctgaatgccaatcctttcaatgctttttcccctttatttggtccccgtcatttgttaatcattaaaactttaatgctttatccaggcaggctcttctgctacgatcactaattcaaacttatttcttaaaaacctttccagttaaagaagaatttcgaaataatttgtactcttttttcatctttttttgatcacttcgccttgcgcccgggggcataaaactgtgcgtcagtcggcatttggtctcatttctatccgtggctttcattgcggatcctcccgactatccccccccccatttttggggtgccaatgctccccggttcggtggcctacgaatggcactttggccgactcacttgtgccaatctcttccgttgatgactcatcctcctcctcctcttcgtattcttcttcttcctcttcctcctcatcttcttcatcctcctcttcctcctcctcatcttcatcctcttcttcttcctcttcttcttcatcctcctcctcttcttcgtcccaatttttgtgccatttttgcccattttccccattttttgtgcctctttttgtgctcattttgtatgctttttgctcctttccctttgcttccatttcattttccgatattttgccaattatcactgtcagcacaattacaagaacaaaggacagtttcattaaattattttttaaatctatgcttncattaaatacaaaattttttattttataaaaattgtgattgattgctttgattttatccaatgtataagataataaaaatgtaatgcattgatttaaattgtacataaatcaatttataaataaaaatattttcataaaagcctaaattatccaatgccaaggggtgtatatttgttgaattgaaaggtcagtagggactatttaaaatctcccgggcatttcgacataaatttcaaatatgatctgtgaatagctttccaaatcttcttgttgctaaaacgttttgcccaaagaattcaaaaaaagacacttaacaaaaagagagaattaaaataaaaatgataatttaaattatgcgaaaagttttcttatggattcatctcaatgtattcctttgtttctttagaagagacaataaaacattttgggtaaattgtgccaaaattagagattagattaaagtgtaagaaaaagaaaaatcaggaataaaaaggacggggggggcggcattttattaatttatgtgatagaacagaagggg

SEQ ID NO: 24163 - DNA, 1687 bp, Heterodera glycines
  unsure (1)..(1687): unsure at all n locations
tttcactaaaatagcgtaaangacgctccctgattgtacggttagccctttcaaccacacctgcatgcagatgtggggaatacatcacatgctttataatgtccttctttttccaatagtctaacatacgctttgcttgaaattctagcccagcatcactgtacagtttgttgggcagaacatttgcctttttgaacaccctttcaaacgcctcgatcatatgttcattctttttagactcagattcggcggtaaaaatgcgtcgactaagcacatcaatacagaccaataagtaacggtatccatcgttttgatctttcagtgcatccattatgcacaaatccattgccagtcagtgtgaagaccgcttggaatagtctttagacgcgggaacttattccgacgcggtttaaacagagtgtatgttcgctgatcatgcaaaaatttttaaacatcaccaataccaattgttttgttatacttttttgcttcttgccagaccttaagaactcctgcgtagcttgccgtggagcgaaggtcataatagatttgctctagcagtttctctacagttttgcccatattgctggcttaaacgtaaatttttgctgttgttgttgttttggagaagattttgcatttagtttatcggcataggctgttctgtgtagtcccggtgtttttataggggtgcgaacaagggctaagaaatttttattcttggctctacgtctcttaactccctctccggactgctgcgattggtttagatgtgggaagaattttaaaatttctttttccctgttcaagcgttggattaaaaatctatgtcctttcggtctgttgttcagctggtttggttcatcgacaaatctcttcaccaaaatttatccagtttctccgttatgcatggcacaaaggggggtatttgaacacaacagatgatgattttaaaaattttgtccatcctgttaaatatctttttgattcaaaagggccggaaacatgccaaaaaatgtgctacgatcagcaattccttattcggtgcgctagatgtgaggaatttttgtgttttcatcatttttatgtggattatcatatttgtcaatgaataaaaattttcaattcaacaaatataagcataaaataacaaaaaaaatgttaacagtataagggaattgaaccagcaaataaaaaaagaaaacttatagcacaaccaatgcggcaacaagggagttgaaggtcgctcttctctattgcatttattgggataaaaaaagtttggcacgccatatctcggcactcatgctcatttggcaaaaattatcaaaattttacaatagaacctaggtgtgatctacccacccacaaaatttcatttggaaatcccacggtcacttgccgacccctcctttgtgagagattatttttcaacctagtgcgaaaggggtagataatttcttgcagattaatggagactggcatatattagaaaaaataaataaaattttccatagaaatttataagaaattattatttaattaattttatgttgatttgtaactagtaaatgacaaaaaaatttataacttattatttaagaattaattgccgttttcaattataaaatataaatgtaataattttttaagaaataaatttatactaaaaatcaaatttcatgcc

SEQ ID NO: 24164 - DNA, 2104 bp, Heterodera glycines
  unsure (1)..(2104): unsure at all n locations
tttaaagtgctctcttacaattcgaaatgttcccttgtcaggttcaattgcctcttatacggtggaccaagtcagattaattttaaaatttctgttccggtacccagaataggcttttcgggactcgggcccgattttcccaaaaactgagcatctaaacctaatttagacggcaaaancaaagttatgctgcttcttaagtggctggaactgnnaactgggtccaanctgaattgacccgcattcttctaaacttaccaattccttcaaanccattcttccntcacaaaancgtcagcnccactccaccntgtggccaataattaggctaaaagaaccgggatggtatttatatttttcattataaaatttataaaaatgtcgcacatcggtaataaaacggttccacacgttcgcccttttggttaccattttttaagtgattatggagttatccatttttggaattattataaaaagaattatggttcctttccatttcattaataagcactaatctttttgatttattaaactttccacacggtctccctacaaacttaattccgtactgttttaaataagtgaaaaaagtcaactaactaacatccatgtatttattttgtaccaaaattttaattacctcctcatcatcatcagtagacgccgcccaattttcattgaccatcaacacaaataacaagctgaacactgctgcacccaggaaactcattcccttgttcgacatttgtggtgtttggatgttgaaagtgataggatttaatattttttgaataactaaaaatataattatttaaaaaatattagagcactattgtataagaatgaattattttattttcaaaacaactaaatggtaaaataatattgtgattgatgtgtttgttagtacttctctccgctaaatgccaaaaatgtgacgtgtcttttattagtgtccgaccgtcggatgcaaaaattgatgacactactgatagctttaattggttttttggagaaaagtataacattcgcttctcatttactattagttcagtaatgccaattggcagccatggtcgatgactgttccattgaatggtataatttaattaatgagaaaaattgtgatttttgtgattcatgtaatttacttgggatcaaattttgggtaaatgcctaaaatttttgcacacttaatacgttgagataagcacaaaaaaaacaactttaagtttggtttgaagcttctaggatgactctaaataattttcgaaaaaagcttcaaaatatttaattatttcgtttaaaattttgaaatacacccaaaatatagttttttttttgtttgttcaagaaatatttaattaaaaaatatttgtcttttttgtgcctttcaaggaattttaagatttttttaattatagagatactctactatttgcgttgttttcgtgcctaaaagttaggaatatatattttttgcagaagggttcggcagtgccgataggcgctgctgggaaaatttttggaaatttgagtttgatttgttaacagattttgtttaaaagtgtcaattttcgtttttaatcgtcgccgccggtaaaaaattggatatttttttgtgcgatttagtaaaggttttacacaaaaaaggccaatttttttatgtaaaatataaatttttggggtccggctgtagaccggaacgaaacggaccaactctacctgaataaaattgagtcaatgtaaatttttaagtttttgaccaaatccaacaatcgtgtatcactcgaaagcttacaaaggctctattagtctaagaataattactgagaatgtcgaatcttcaaatcatttaaagctttcaattatactattttgttgaattttatcaacaaagatttttttattagggatttttagggagctaaacacgtaaaattaacaaaaaacttaattttggtcttttaaatgattatttaaacttttataatatttttcgaataagaaaatttttaaacctaaagttttttatcaagaaaaaaatgaaattttggcgattatttttagaaaatttttttaattctagggggtgtatttt

SEQ ID NO: 24165 - DNA, 1415 bp, Heterodera glycines
ttgttgcaaaacgctcgttgtccaccactcgccaatggcttcagcagccgactcatcgtccgccgtcctccgcgctcagcgctgagccgttcatgaacgccacgtcaggtgtgtacattgagcaaatgtacgagagttggcagctcgaccgtggctctgtccacagatcatgggacgcgtttttcaccaatgtcaacgcgggcgccgcgccgggccaggctttccaggtttaattttgttggcttttttgacgggtttaccgagctatttgctttggtggatgaaagaattcggtggggtctgattttttcgctactgtttttggtggtggcgttggaaccgaattgcgaatccattttttgttgctaaaagtcctcaaatatggggacatttggaagaaatttgaaccattgtcgaattcacttccaatttgaagaaacattgtcagttttttggggctttgaagtttttcaacggaacgtttctttaaccaaaatgaaatgtcaaactcattgtcagccccattttttccttgtgccaagaaatacccaatttttactaagttttttttacacaaattttttttccaggctcccccgtcagtcccgtcgcttagcaccgttccgcacgccacggttgtgccgcgtgacatgcgcgaggtgcagccgcaaacagcaggccaagtgatcccggccgatgaactgacacgtgccatcaatgaccatctcaaaatccaagtattgatcaggagtttccaggtctgtttttataaatcgcaattcaatgtaaacaaatcgaaaaagttggtccaaaatccccaaaataagccattttgggagtccaaatctgtaaataaatttctgcacaccggaccgcttgattaggttaaatctaaactcaaatcccgaatacaattttttggtttccatgtagagtattgtaacagaaatactgtcgtttttatttataccttggttgtggctgtctccgttctcttagcttaattgtaaaacattcacgatccgggcatgtgaagggtaacaattttttcgaattaagactcgtggccacaacattgccgatttggacccgctgggcatcaacagtgcggacttggatgacacaatcccgcgcgagttggagctggacttttacggcttcactgagcaggacatggaccgcgaattcttgttgccacccaccacattcatcgggggcgaacgcgccacattgtcgttgcgcgaaatttacaaacgacttaaggtgggtagcagcaggctggtcaaccagttttagaggaaaagtgtggacttttggttcactttaaaaaaaaattttttttaaacttttgactgttggaaaaaaatgccttgtggtacaaaaattcctcccggaaagattgttagcaattcaat

SEQ ID NO: 24166 - DNA, 1977 bp, Heterodera glycines
cccccacattttttctgcaggtatttggacgtccaagtgatcaatttcctgcgccgaaatcgccgcctgttcagcaccaacatctcgctgcagttcaaccttctgattacggaatttcgcgcttggcaagcgatggcacggcacatttggcccctgttgaggaacggactccgcacgctggtcagcctgaagcgcaaacaactggcactgatgcgcaaacacgtgtcgccaaccgtcctcttcgactatccgaaccttgtcgaaatcctcaccccgattttgcccgaacgtccgaccgttgacaacaccaattatgctgctgatacatcggcccgtgacctgtacatgtggctgcacatgtcgcgccctgacggtcgtccgaaggtgttcaaattgaccaaatggaacaatggatgggaccaattcgtcaacgatttgtgctcggtgagatttgtggtggatcaatcgatggggacggatttttcaatttttcactgaccttttttgggtttttattgcagttcacacgacgataaaataattggacaattttaataataactttttctagaagcatccaaataaaacattcttggtatcattcgatagcccaaagtgtcctttattagcctgcaaaatttcaaagaatttcattatatttcaaaaaagttgtaaccagaaaacttcaaaaaaaatgaattttctgtacatttttgaccattactttttgaattttgaatgaattttttaaaatcaacttaggactaatagaggactctttggactatcaaatgatgccaagaatgttgaatttgaatgcttccaaaaaaagttatgctgtattaaaactgtcaaatgtttttatgatcgtatgaactgcaacagagtcccttttttgatcattaatctgcaactgatctgatcgcatttccttttcacagtcattcactgcagcgtccgtcccggtcaactacatggtgctcacttcgttcgaattcaactacaccaggagtgaagaaatggtcaacattcggacggaggaaaggctgacgctgatgagcaatgtgcatccaaatccagctgtgggtggcgttgtgtccttggtgaagattctgcgctgtccggtggagttcagtaacgctgccatggtgtcctggcttcgcatggcgcgcgtgagcaacgaacgtcccccgaattgggtgaccattggcttctcggatgacgaaattgggtatggggacgagtcgccaacaaatttaatgttctggtttcttacgcttttcctccgttttcagaccgttgcctggctgagaaggattttcaaactgcggatcaacagcagcagcagatgagccctaggcacaatggacaatcggatggaattatataatctgatcattatcgtttcataaattgtatttatccgatcaaatgactgattttgtcactgatttcactgtgtatattctgtatgtacatattgtatttgtcataagggaagtaaagcgccgcttaacgttgtattttttgtgcctcgatttttgaaattagacaatttttccattttgaaaacagtacaatttcgtcggtatttttcttttttgtgtgaatctcttttatagccttccccccctccattaaagctcaaagttgaataatagtgcccccgagcttttatactgtcattgtaattcgtgcaatttctctgaaaaatcggcggaggtgaaattgtcaaaaaaatgtgggccaacaaaattaaacaagctgagggagtcgatcggaaaaacaaaatcattgagaactatgcgaattttccgaaatttcagaccatacatacaaaacaacacaaataaaatttatataccaacaatgaatgtgttaaatgatacatcgctttgaataccgtaaatataatacaataatacgcacatacaatacataaacatatgcatggctaaacacagaatactggataca

SEQ ID NO: 24167 - DNA, 1272 bp, Heterodera glycines
  unsure (1)..(1272): unsure at all n locations
ttaatttgttgattaattttgaaaatttaattcttaacatttggaatttttgaattgtaatttgttggggtggtccttcctttctgattgttttgctgcggaataaatcaaatttggggttgaactaaatgaagcgaaaggaaaaaaacgctcaacaattaaataggaacaattaatgtcaatatttgtgcaaaaaaacatgcatttggggaacagaaactgaaaaagggacattttgtcaaattggacgaccccaacaaattctctctctcagcccaaaaacaccattagtaaaattaaccatcatcagcagcagcaaatgaagtgcgctcagggctgatcaatttgctctgctgatcaaccgccattatctgtgctgatcatttataagggacgagcggagtaaaattggcggggggggggaggggggggcggaaaaacgcaaaaagtggttgatgatgcggtggtggtgatgaactctgtgcaagttgagcgaacagttgcgagggtggtgctgcagcagcagcagcagcagcagcagcggcagtggtgggagggcgaggcggtgatgacgacgcaattccttccgtcctccgccgttgcgtaagggcgtgcccaccgccgaagttttggaaattgaaaatttaaaaatgactaaacatattaatgtaataatgatggtgatgatcaactgggtaattggtgcagctgcacagagaagcaatggtgttaaacaaaaaaaaaagaaggaaaccgcggcacaaaattccattcttttcgtgaaaccaaaagaaattgagagtaaagaaaaacgaaggatttagttagggatgatccgggtcccggccctttgcaggctttcggccctgtcgagtctgaatttttcattaaaatacatttacttcttgggttgaatgagcatctgatttctaaaaattcaaaaagtgtgcccgaaaaagtcaagggcaacatgaatttgattttttaaatgaaaaacttttgaaatttggtgaggtaatgggagacaatttttgaaaattgtgaacaaaattcccatttatataacactccaaaaaaatatttataaccaatttttgatgctcaattttttgccaaatgtccggcaaaagtgctaccgctgctgctgccactgctggtggcagcggaggtgcggaaacatcacacgcaattcgcgtgtaatttggactaatttgtcggccngggtgtcgttccagatgatttatttgtcaaatttcacaaatgcgcgcgatg

SEQ ID NO: 24168 - DNA, 966 bp, Heterodera glycines
  unsure (1)..(966): unsure at all n locations
tctgctttagccctgaaaaatgcaatgttttaaaaaccatttaattttggtcaatttttgtcactttttggcgtcgaaccgactctgcgaccaagctcttggtgccattccttccgctttcttctttcttctgcactagaagcccaaaacggctttggttgatatggcagcattaatcggcaataataacatgtccagatctggagacccggatacctgtcttttgcaagacatggccccgctccaggaccctccgacaagtccagacccggatacctggcttttgcaaaatcttgccccactatctggaaccgggtttttaaaaatccaatacccggttcgcaacccggtaggtccgggtccaactttgcacaaaaacacactagtaagaatgggcttctgggccaaattttgttgacaaaagtctaaggaatgaaaatttgtgtaaaattaatatttactttaataaatgtatttataaaatgtgtctgtggtctagtggttagcctctagggttcattaacttcctttctctggttcaattcgctcgcatagcccccagtttttgccaaaacatccgggcgcggggcctaccttaattattcaatgaaaaaaagaagattaataaacattttcagcaagcaaatttttgttttaaggtctcaattaaaattgcttaaagaaaaagagcttaaaaaaatgtttgaccaaaaaatggagcaaattcagaaatggaaaaccaatgcatttctggcaaagactgaaatggaagaacgccacgaattggaggcgcaattacgcaaaattcaaacacaaaaagccgcacaaatcgaatgctgctgcctgccaaaatccanatcagccccagcacttctttcacataaatttttgaantttggcatccagttgcaaaacattggcgtacagttcatctaaatcgtcgtgcaaacatattgagcaaaaatc

SEQ ID NO: 24169 - DNA, 1235 bp, Heterodera glycines
  unsure (1)..(1235): unsure at all n locations
ttaaataatagatagaatttaataaatttttggttcaaaatgtaaaaaatagttatatttaaaagcacatccaataatcncgcgggatctcgaaaaaatatcttcggcattgattggcaccgggatacgcacaggtctatttccctcatttaatgaccatttgcatgggttcggacccgctcgacagatgatgaattatttggatttttcttcaaattattattccatatagcatatttttattaagttattttaatatatatttttgtaatactattgagaatttttgctgaactgacagttcgatatgttccctgaattaatttccatttcatatgaaatgctttctttctcatttttatccatttcatttttcgcatgttttgccttgaataaatttaattttataattattttttatctttttacatcggcgcaaataaaccacaacaaaaatattttaatttccgatttttttttctgcccaaccatctttgaaattttggtataaatattgcgattataagcaaaaatcaaagagattaggtcgtttagtaatatccattacacttaacggtgcgactcggaatgaattcggcagacttttgaaattcattgaaattttttcaaaatttctaagaatccgcaatcctgcgtgggatcctgcaaatttaaaatgcaggatttgcaggattgcaggatttgcaggattaatccggccggatccggtcctgcaaaaatttttgaattccaatcctgcaacaggatccgcaaatttgaaatttccgggctctagtgcaaatttcgcatttcgcgccaaaaagcgaaatgcgaaacgccaaaaaatgcgaataatgcgaaaggcgaaatgcgaaaagcgaaacgtcggcccatccctggcccaaaactttgttattagtgctgacagagaccattaaaatcaaagaattcatatgacaaagtgtaaaaaatgtcttccatttcaaataaaatatccccgcattcgccaaaatttaaaatttatttatttttatttccattaaattgtttgcttttgcttttcttcttcctatttttgatacatatttatttcacacaccctcattttttgcgcacctttcacaaccaatcattgttctgttccatatcggtgggtgtcctccccgcggggggagtgccccacctcaattagcgccgctttttccctccagtaaaaaatggaggtggggcggctt

SEQ ID NO: 24170 - DNA, 1877 bp, Heterodera glycines
ctccctgtggctcctgaaagaataagagtgaatggtgcaataaacatttttgtcatttttttgaatcatttcatttatatatatatatatatattttaagcttggtacaccactattttgtgttttattactcacttttaattatattatttagtttgcctattttgtattgcaaagaattaatattttcctcttgtttagctaaaaatgccaggacaacataataatattaatgaaatgaattgcttcgtaacccgtaatattgagttaataattcaacagcaacaacttaaagaagaagtagaaggactcaaaacagaaaaaaatcgactattgatggagacacaacgaattttaactgatcaaacaaaacatattgaaaaaaatgacaagctgatggacaagtgcatcaaattgcaagacaaaaacattgaattacaactacaaaacaacaatgcattacgggaacacatcgagataaagcagaatactgaatcattggtaaagaaaagagagatttggaggaagaaatattgaggatgcacggatcagaaaacagggaccaagaaagtatttgcgctttgtgctatgtcagacaggtcacaataataataaatattaaaaacaaaagaataattttggctactttagcgcaattatgtttgtattccttgtggtcactttgcgctttgtaaccgatgcgctgaagtggtagcaatcgaaggtacctgtcctttttgtcgtgaacaacttgatggagtgtttaaaatttttagctcgtaatgataatacgatcgttaaatacccgaacttatgttgttaaattacatgtttataaagtgattatgatttccaatgcatattgaattgttaaagcttcaccagaattaacaaactaatcataaaatctcttatgttacggtggcctaatggttagtcttccagattgtgaacaaatgttcggttccccaagaagctggcacatttaaaaattatttactttaaggagggacaaatagttaagatgagggggaaaaattatcgataaaaatggggtgggggacaaatggtcgacaaaggacaaatggtcgacaaccgaaaaatgggacaaatggtcgacaacggacaaatggtcgacagaatcgggggcaaaaggattaaggccatttgagctccagtgaacactggcgctcaaatggccggccagagcgctgggactgaaatgtcccggcgctcagatggccaccaaaacggggtcttacactactgactgcagcgaaaagagcacaccaacaagatttgaaaccatcatgattaatcaaaaaatctaaaaaaagagttatgtttagtttgtgtacttactttaactacctacctattaataataaaattaaaattttcattgacaaattaaatactacgtttaactcctaacttacatttgatgctctgaataataattaataaatttaaaaaaatttagaatgtaaaataataataatagaagatgcaaaaaataataaatgcaaaaaatacaatatatttataggccattatttatatgtatgaacattgatgcttaaattctgataaattaattagcacaatttcacgattcgtctgtagtgtaaagttgaactcgaacctggctgggaatttaaaagaagaagcaattttattttttttaaatataaaaatatatttttaaaagtttagacaaaatttgaacatgatttaattgatattaatagcaaagtcgaaaaatttaaaataatcgaatttttatcttgaatattcataaatttttagtcgatattttgccaaaataaaattaatggcttcaaagattataatttattaaagaaaaaaatttgtaa

SEQ ID NO: 24171 - DNA, 1235 bp, Heterodera glycines
ataaaggtatcatccgaaaagctcataaaaaaggctatgcaatggtatgctacttatctgttgaaattggaaaatgacaattttatacgcaattatttttttcaaagcatgatgggacaacacttatgaccatgactgtataggtaattttttttttcacctagttttaaaaaagtcaattcctttccaaaaatggtgcaccccccatcacacggcgagtcaattttttcttttcttggacatcctatatatccttgtatcaaacgaaaattaagagcaaaacaattagtaaaaaaataaaataaataaataaataaacgacgggatttcgcctagagtacgtagccactgtttcttcaacataatcccatttttttttttgtataattgttcagcaatttgatcgtcatttttagtatgcatgcgcgtcttctcgaataataataatggatggatgattggatatattgtaaagcgcattatcgcatccgtttaatctctttctcacaacacatgtgttcccgctctctcctcccaacgggagtcagttcgggcagttaatcagcagagagccgggagcaaagctcggcaaatttaatgcttatgtaattggccaattactttaaaattcgttaggtttaaaatttttggtcaaaaaaaataataaattaaaaatgcctgttattttcgaacattttttggccataaaactttttgataatctaattcggtcgtttatgcttttgaaatgctccatgatggactagagtgatgagtgacattattgccattttttgttactatttcataatgagcaagcagtggcggaaggaagaaagacgttcgttttcattcattcttcccattcattcatgagtgcatcaaaaaacaaataaataaataaataaataaataattgttgttattgacacccgccgccgcagggggcaaaatgcaacaaataaaaggcagaggaggaggaatcagctgatttttgtgcaaaaacataaatatgcctattctttccatcgccccccaatcgacctcgttttccgtccacccatccatccattcgccgccaaattctcacttttaattgccaaagcaaaatttaattgctaattgcccccggggatttcccgtcattcgagaacatatgaggtctggactcccgatacgggagtcctgaaaagtgggattttaatgacctcggacaaattttcgatcatctcatt

SEQ ID NO: 24172 - DNA, 2463 bp, Heterodera glycines
  unsure (1)..(2463): unsure at all n locations
aaagaattttatttaagtctttacaaaataataattttttaaatattattattttatctaactagctttgtgtcagctacaattattctattgcttttttagatgtaaatattatttgatttgtttatggtcatttgggtctttgttgttataaaatatntaaataagctattataaaattaaaaatatgacatttaactgattttgtttgcatttttatgctttaaaatatggatttttcatgccaaatgaggcttttttcaggtttttaagtggcaaataaggattttttatggctgaaatgagaattttcaaaattttgagatcgaaaccctaagttaaggtgaggtgaattaatatttgtgtaatctattaggcaaataaatagtaaaaatggattttttgctgaatgcataaaggaaaaattattagtgaaaatggccttgggaggagagaacggaatgaccacatagtaagtggaggaatgccagtgaaacgatgtgatgtgttcgcgtcgttttttattgattcacaaaaaaatgtttgagaagagaataatggggcaaggcaaagaaatagagaaatttgaagatatgtatttatatccacatggaagaagaaaatgcataaaagcgacatcaaaatgaaaatagtttctaaatttatcagattgtcctggtttcgatgtttcgatccaatttttatttattcgctaaattttcgtttagattttaattttatttttttttgttgaaatcagtagggcttaagtatttaagccactaaaaatcttcaaaaatcgactaaataagttataaaaaatcgccaaaaattcacaaatccttaaaacgcaacaaaaaaagtcaggaaaatggaagggaaaagttaaaaaagtccttttaacaattatagaataacattttataaatagatacctaaaataagcataaatgatttttcgaacaattacgaaaaatttcatctaggttccattgtctttatttgggaacattattcaaaagtaatgcttcaaaaacaacacttcactgctgtttaccattcgttgtttttcttccacatcgtttcacaactaactactgattattatttgctaaataattaatcataacttagcataaaattttgactcagtaatttggccctaactttcttgaaattaaataaaatttttcgaaatttaactgaataatagagaaatttttgggctatcttttgatataaacaaaattaaagtaagttatttctgaaaaaagttatgaaagaattaatagggtcatatttttatggtcatccagaaaatgtaaggtcgttaatttttaaaaaattttttccaaaaatttctatccaatattaccaatttcttcccagtgttatgaaaaaacagttggatgttgtagtgtaagacaaatttcatttaaacaattttctttggtggagttttaattttattcgagatgctcgtttaatgtgtcaaaagaaagttgtgaaatttatttaacgaatgaaccgaaagttcaattaaaatttttctgaaagaaatagaaaattcagtatgcaaaatataaagccaataaaattcataaaagattaaagttttaaaacataggaaaatagctatattttaaattataaaatattttttagacaaaataaacgaaatactaataatgaaagaccaattatagataaaaatattttaataatcaaaaaatctttaagcgagcttgatcattgttgtcagaagaagttggaatattcaaaaaatgaattctaattataacattagattaagtcatgattatataaacaaaagaaaatatcataatttaagtttaggttctctatattttaagcttaaaaattcccaaacgttaatctttgccttctgcatatcgttgccagtaatcatttattgactcctgacaacgactatgaagtagggggctgaagacagatgatccagaaatcaaattaccaaatcatcaacacatgttcaatcattggggtccttggcaaacccaacccacttaacgagatattattggtggcagtcgacgcgcttttggccgccggggtcagaagaatacgcagcgaaaccacgtcttctgccacctccactacctggtcgtgcaggttgggacccagttccggcacttcatcgacatttggaccaaaggggacggtgtctgttggcacaaagttggctggagacaaagccgactgaagagaatcgtcggcgtgaaagatgggtagttcaaaaaattgttcaagttccatttttgatagttggaagggtagagagctacttaaataggagcaactcataggagtattttgtccgatcacaaacattattcatctctcagggcacctagcgcaacgttttcatgtgaaaagagcaacatttttgctctccgtcgctcgtttttgtgcgaaacaccc

SEQ ID NO: 24173 - DNA, 787 bp, Heterodera glycines
  unsure (1)..(787): unsure at all n locations
atagattataagctgaaatacgggaaattaaaaatgacgattcaaaaaacgcgcttatgtttccaaaacagagncccaaaaaaaccacgnacaggaggggaggaccgaacgagggccaaacgcagaagaggggcagaatctgtcataattgaccgtcccatgggatagcttttattagggacaacaaaaaatttgtttttattcggcccattccccctttttccaaaaaacccattcacttttaattaaacccaccgcaacttttgaaaagtgccaaatcggattggcattggcactgtccacacactcaccaacctgaatgatgaccagcccacggatgccaccgccatccaacgaaaggacattgatgaaattgtggtcgggcggactgccctcatccggggacacttcgggcaacttgtccaacacctcgtcgtagatttcctgaacacacaaaaaatacacacattgtcaaaaaaattttttttaatttcattttttcgaatgttgcaattttttgaaaactttttttcttcctttcccattattctgtgagcagaaaattatttctttttttttaactcaacaaagccgcaccctgcagtgtgaattcctatggcggtaaggtgtaaaaatcgtaattagagcctttaattgcgaatttttttttttaaattttcgtgagtgggtaaaaggggctttttaaagcttacattgtgctgcatgtccgacagtttgtcgaagcggaactgatccttggcaaatgcacggttctcaaagtcctcca

SEQ ID NO: 24174 - DNA, 2342 bp, Heterodera glycines
tcaaactttcatccgcaacattaaaatgagcatcaacgcttcatgaaatttttaatgccaatgcactgatggcttacaaaacatacttttcacatgagctctcctattcaaccacagcaaaggactcacacctaaatgcagcggggtactaccgggacccgggtgatgtgcttgagacgggagacggatgcacagcgcgacgcgatttgtttgcgctcagcaacgttgctcagttcattgccaaaattgacaccgacctattcaaccagccgctgtatctgatcaacttttgtgagctggacattgaaattttgcccaacgataacgaatttgtgctaattgcgccgctcgcaggtgcaccccgctaccgtttcgaggtagtgggactgaaattgtatgtgaagaaagtgtctctgatggatgggttggcgctggatattgcgcgaaagttggaggtgaaacctgcccgttacgctgtgaggaaaacaatgatgaaatcgttgttcatcagtcaaggccgttacgagtttacagccaatttgttcatggaccaaatcccccggcgtgtaacaatgggtctggtggcgaatgcggattatgttggctcaattcggcgcagtccattcaattttcaaccgtttaatgtccgagaaatttccattgttgctaatggacgatcttacccacaagcgccctatgacttggagtaccccaacgggaggtatgttcgcccattcaatgacatgaatgaggcggtgggattcgcaaactcatcggagagcaacgggataacttttgcccaatacggaaaaacgcattgcatttacgtgttcaatttgaccaacagcgggggatgatcaagcggcactgtttgatttgataaagaatggcactacagcggtgagcatcaaatttaaccacccagtgccagacggaggaataatgcttgtggtgatgggagaatgcgactcattggtgatgctggacaaaaaccgatcaataagcacggacaccactatttaagcttcccacaattgtcatttcatcattttgtaattaaaatgtattcaaaaaaattgggcatcattttgttctttctacgagtttcgcttccggttatttcaacaacagtgcgagaagaaccgaaaaatacttattctgcgtatataaaaaatttgactttatctcgacaacaacacgagccgtcatattcctacactgaatatttgagaaggttgtctttgtcaaaaatttatttttctaccaaaacaataccaccaccaccaccaacaacaacaactacaaccaaaatccctccaaaaagtgacaagttaattgatgaacatgtttctgctgttcttccaccgcttatccaattgtgtaaggacataccagaggaaagcaactttgcgcagcaagccatttgctgggcactgttcactctttatttaatgctcataatcagtcttgtgctgcatcaactttgctctattttttggttgaagaatggacagccttcaaatcacaaaaatattgagcgaaaaccttctgaccgggcgagtgtttcagggctgcttcgccagtgaccaattgccgcctccttccacactacagtacccggcagcgctcgttgtaaacagggacccccgacacaaggagggctctcattggtgcgccatttacgcaaggggaatggaagcaccagcgctttattatgacagccttgcccagcccatcccgcccagcattacgtcatcttttttgtgcgaatttcgtgagggaacaagaaggaatgctcacccttaccagtcccctttactctctacttgtgctgcccattgtattgtttttatttaccacatgtaccaagggaattcctttacacaatttctaactattcttaataattgtgcaagtccggacatgtacgctattgttttattacgaaaaatgttaaatcaataaatgtataatttttaattgtttttatttaccacatgtcccaagggaattcctttacacaatttctaaatattcttaataattgtgcaagtccggacatgtacgcgattgttttattacgaaaaatgttaaatcaataaatgtataatttttatgttgcttaggtgtcgttaattattcataaatgctcattgcactctcaattcacgagggaattacttcaaaggaaaatttgaaaaagccgcctttcgcgatggcgtcgaaaattatcgattgatgggaggagcttgtcgatttatgggaggctttataagcacgtccggacacaattattttaaatgattttaggccttaaggtaatacaataaatcgctataaat

SEQ ID NO: 24175 - DNA, 1841 bp, Heterodera glycines
tttttattcaccgatttggtttgttcaatttttggcgtcaagatccatttcgacataccatgtgggtggaacgagaacaccaattggtgcacagcttagccatcggatgcattggcactgccattggacggaagttggacaaaagcgccgccggtacaacggaaaaggcggacacttcgagaacggaaagagcaaattggcgcataggggaaaagcgaaggtggtcaaaaatggtaacggatcactgagcataggcaaatgtcgtgcaaataaaatccgaaattcgattagaaaatggaaattaaaggaacaaaagtcaaaaaaaagaagttaaaatggcaaagtccaatatttcagtcatcacatcaattaggtaattcattcatttctgttgctgaccatcggatcgggagaagcattgagaagatgaaaacaatattataagtattgaaattgtgatcaaattctcacccatcgtccaaacagatcagcagctgaaaacccttgaatggcattatgacagtttcaaatatcaattcaatgatcagatcaaatggcaaaacgagtcaatcggtcggagagaacggcggaaaccaaactgaaaagagaaaccaaaagttccactgataaattcaaacattaaaaattttcggcgcattatccggacgaggcatatccaaccatttgacaatccgacacattggcattcatcaggctgaaattcggggaaagtgctcattgtgaagagagtaatttggaaagatggacaatcgttgagaatggacggggccaattggcgcataaatgcatcgagattgtgaaagttgccaaattcagtcgaagaatggagcgcgaagcattgacaaaatgttgagcacaacgaattcccggaaatttgccatttccttgatgccatacaaccactttttccattaaaaataagacggaagggggaggggtggaaaagagttgaagacaaaaatttcgagagaatgaatggaagaggaggaaaaagtaatgttttatagaaaaaatattcatcatttaattttcaccatttcattccaaatgatctttgtggttagttaaagcacttttccaaatttttggtcgtcggatgacggacacggaaaatgctcattttctgcgcatatgctatgaagaaaggggctcaaaaatagcatttctgcgtttaaattttttgatttggtgaaaatttttagtccatataaatccatatttcgccatttttgaaatacgaaaattttgagttttcgtcggtcattttggcatttttaataaatatttttcgcaattttttgcgaacttttcttttttgaaatgagaattctttttgaatttttttgcaaacttggaagcattttttatacaatggatgaccataaaaaattgtattattatgggcaaagcgtgaccggaaaatcggtcagtggaaaatgcgtcagtgatacaaatattttaaaataaagttctctggcataagtattgtaatataaaagtatgatcctataagaatatcattcagaattcgaacccggaccctaacttgaacaaaaaatcgaaaagtcaaaattttcgaaattaggttttttcttaaaattcggtatccacagaaataaactaaaagccaccaatcctgcaataatagatcatttatgcagtttttgaacaaaaaatgctaaattcgaaaattttgactttctactttttgttcgaatttgggtccgggtttcggaattgacagcaatggataccggattcgtggttagtgcccacgaaaacgcaaggaaattgttattatgacaataaaattttcactg

SEQ ID NO: 24176 - DNA, 2245 bp, Heterodera glycines
gtaattgtctaatcatgaagcagtagtttagaaaaagcttctaaacatgttaagctttcgaatgatatcaaaatgttggatttggatgacattgaaaaaagttatagaaagctttcgtggaaaaacatgttggcgcccaaacgcagtggaccctaacaaaacacggaaataccaaatttttatgcaagcctttatttttggaagggggaggtcaaaacaccttggaattgcgaatattttattattttagaaaacttgcgagcaatgattttggtgcagtatatcgacacttatataaactaagtttggcattttgttgcacatttttatattttagaaagaaaatttttagctaatcaatcgaaaaaactgaattgtaagtattttttgtaaacaatttttcttcataccaacttctttagcaggaaacaggctgatgtgcttggcatttaaacgcatttttgtccaaatgcctgggtacaaatagtagcgggggaatggcgcaagttgtggcttatactccgcaataaaagccataatttcctgggaaaaataaaatttaaataatttttaatgaaaattttaatttttaataaaaatttttaaataatgttcactaaaaattttaattgtaaaaaaaacttcttgggttgtcattttggggtccatttggtacggatgacgcagctgaacgcgcaattttccgagctcatcaaaattttgttggtacaattcaatgctccgaaagcaacgaccacgacgaatcaaataaattggaacaaaaatctttttttttaaatatataattaaaatttaattgcgattattagcacctcacaacagttcattattgtgtcaccgagctggcaaaaatgaaaaaactgatcacaagccaagccaaattgatcaaaaaaatagttgaagaattgatcaacacttcgattttgagccaaaacagcataaaattcattcaattgcttcttcctcgcatcgtcaaattggttccaataaattttctttaaaatttattatttttattttgaaaatgacatatttttgtttaaaaactacgaattgtttatattttaatattcttattagggatgcaattttttttcctgagctccctatggtctgaattgctcgaaaaacacatttttttcggttgttattaatagggacgtgaattttaggttttaactattttttttgctcaattgatttgaagaaaggagctcaaaaacgcatttccgcataaaaatttttcgattctgatgtcattatcggtcactagaaatcactattttgggattttgtcactaaaatagtgaaaattcactattttggagttttgtcactattttgacatttttgggcaaaattccttaacaaaaatgcaataaaaccaaaaaatacacccctaagaatcgacctaaaaaaattcaaaaaaatacacccctaagaatcgagctaaaattttccaaaatatactcctatgaaatgaaaaaaaaatttctcaaaaaggtattttcgtggcaagaattttaattttaaaaattatttttttatgtacctattttgtttttttgcccttaaaaatcccagccctactcatttgcaatgcaatcagtgaataaaaattagttttgctcaatttttggctgaaaattatgtcactattcgtcactatttcggactttttgacactattttgtcactattttggcatttttactcactattttagttaactatttcgggatttttcttcacgcaaaattcacgtccctatacacaaaacatttaattcgatttcttgtgtagacgaaattaaggccgaaattgacttggatacgctattattagttattgggtagaacaataatttaattttaataacttttaaccgctgtacgtttaatcttttatattatattattctttaatttcgtttttcattgtgataattatattttatttttgttatgtttggaataatatttattttataacttgatatggataaatgtgtactttttcagttaaacaaaaaagttctacattctttttggacatttttttattcaatttttatttttctttagctaattttttttaataattttttatagtgttttgcagaattttctcagataatatgtatggcattaattaaaaaatatatttgttcacgtcaaattatttagccttttacaatatttatctttatttttaaagacctgca

SEQ ID NO: 24177 - DNA, 1762 bp, Heterodera glycines
tcgacatcgcttccggattggcgtacattcatgatcgttggcattgtacactgcgacgtggccgcgcgcaattgctccggtctccaacggagtggtgaatgaaaaataagcatttttcctgatttaaattttcattttttcacacaggtcaaaatatcagacttcggcatgtcctacagaggcctgaccaaagacgtgccaaaagatgagaagattccgttcaaatggtctgctccggaggtctggacgcaaaacagctacacgctcaaaagcgatacctggtcatacggtgtgctcagctgggagattttttgcgatggcgccgagccattccatgggatgaacatggaggccgttatgcgcgtggtgagtgaaaaaatttctaaaaaattcatttcacctatttatttgcaggtgaatgacggataccgattgcaatttctcgataatgcgcctgccaatttcatcaacctcatcaatgaccacgtttgggacttcgaccagcgcaaccgctactccatgaaacgcgtttacgaattgctgaaagagatgtaggaggacaacggacagtagcagaagagccacccggaagcggattcgtgttgagtatcctattgtatatatgcatatgtatttttgtatcatgttttgtgccgcatttatgatcatctccacacatttgatgtacctattgatgtatttgtatgtgctatgtatatttcgttcacatatgtctgaatgaattgtgtttaaagaatgaaagtgttcttgtgactataaataagacgaattttgagtaaaaattgagttaaattattttctatatacagtgtgtaaatttagaatagggacgactgttttttcgggagtttgacttgtcggaaaaccgatttcgaggcccccacaaaaaagaaatgtgaaaaatgaattttcataaaaattcttcagtttttcaactttgtctgcggcgattgttggcttttggtgttcgattttcttgcgcctgctcagctcggcctcgaaattgcactgatcaaccgccgtttttgacttttacgtggacgaacacttcaaaacgcgcaaatggaaattgggcggaatacgaatttggcacaaaattggagagaatggcaccaaacaaatgcaaattgtcaattccgatggaaatccattgccaattccgcaaaatccgttgccaaacaaagtcatcggattagaaggcattacaatcgatgtaatgccaatgtttcgcgactccattgattgtgatgtttttgaataccatcgcttttcgccgcttacgccaagtcaaatggttgtttaagccttggccgaacagcctgccaaaggtgatgcacgaggtatttcatgcacttttatgccagacaattattagattttgaaaaatgtcaatctattaaagattttatgaaatattttttgccccgtccacaatgctttatcgaaaatgtgaaaatgagcctcttgcatggttttagacggtaatgattagaggccaaagattttcaaatcagctgggccgcctgatatttttagaagcaaccggctttcgagttcggcttctccataaccggcaaatctgaaaactagtccaaaaccagactttccaattgccgggcatggaaccggatcatgaaaaaacagaggggattttctgcgtcacactgaacatttaaataaatttcatttatgtctattctaaattgcaatccaattcgaacaaaatcagaattcccttttt

SEQ ID NO: 24178 - DNA, 2517 bp, Heterodera glycines
  unsure (1)..(2517): unsure at all n locations
cattaaactgtaaaagtgccgaaaaaactatcattaaaaatctcacatttccttaaacgtcgattcatttgcggcaattaacagctcaattattgtcgtaatttgtgattctgatgcgaaaaatgatgttaaataactaaaaaaaacttttatttgtattaatataaaagtaattaggaaatgattaaatattaaaattaagttctctaaaggaatcgaaggcgagaaagttttgatttgattggcgtaaaactgaaaaaaaaattgttcttctgaaaattttaacattcattcgccaaaaaatgaacattatgccataacattcataaaatgcaaatacaaatatttttttttggtttttctgtttttttttcttgaaaaataataagtctccaaattcctaaaaattaaaatcaattttgcctattcaaaagcagcaaaattgcttttaaattaacacttctgtgagcaccattgtagtttataaattaaaaaaaaattcgaattcttaaatttttgggggttttctaaattttaaaataaaaatgtagctgagatgcaagcaaaaaaacggtaatcgttcacatcattggtcccataaaaaaaggcaaaaaaggtcgtttttttcgattctaagaagtgctcgggggttatcaggggcgctgatcactaatctgacatcagattgtcatataaatcatctaatctatgatttttcgtcaaaaatttttttgatggatttcccttttttaccgttgttcatccactaaaaaatctttcatccaatatactgttttgtttataccttttatgtacttgaatatgcataaaattaatcgacaacataaaatttgtcgaaaatgttttcatgtgaaagttggatttttgacttgtgtcattcgtctcgaacaactattccagctacatacatattgatggaatttattgttgtgaatgaattacagtaaaagtgaaaatccatcaaaaaatttttttgacgttatcacttgatgaaaaatcatagattagatgatttatatgataatctgatgtcagattcgtgatcagcgccatcgataacccccgagcacttcttagaatcgaaaaaacgacctttttatgggaccaatgatgtgaacgattaccaaagtgtgcccttccttctgtttcaattcatgggataacactggtacaaaaatgacgagaagagcttgcaaaattcataaacaaggtacagaaacttttgatctctaaggaccgaaaaattttcaaaaatttcattttttggggtttttcaaaaatattaataaaaaatgtaactttttaaaaaatggaaaatatgtccaaaaattaaaaattttctatttttactcagattcttcaaaattaataaattttagctatatttttgcatttagctattttcgagatttttagcttaaatttaacgaatttgaagaatttgtgaaaatgttgcccaatttggaaaaatttatgtgcatattttttactttttatgtgcatattttgaaaatagtctcacaaatcagtgtcaatgaaaatatttaaattgaattattttaaagctattttttaattgaatattaataataattttaaaattcgaggttcaacttttcttcaatgttttttaaatgctagcttcgtaccattaataaatgcagaataattttgagtggaaaaagaatagggatgatggaaaatttatggggaaatgcatgaaatttatggggaaacgaatgaagaacttaaatttacgaaaatattgggtgaaatttcagtagaaaattagtagatttgtcttttttctaaaattgaaaatccactagtaagcttacttgcaaatcaatttgatgggttcatgatttgaaatttaaatttttcgtttccatgtaatttttttttggtcggagatggaatgcttttatctcttttttattttatttttttaaataatcgtctaattaatttattattttgacaccgatttgaattgtataattaaaattaaatatttttcatttttggcacatattttagccttttttgagttttagcacatattttggggatttttggcgcatatatatgtacagatttggcgttttttagcacatataaatccgttccctgctaattagataatttttatggcattttgtgccttttttcaagaaaataaccattttaaaaatttatttacatattttttgtacatatttttggcagccctactaatatgaatgatgctttttggcaaaagatcagtccgcggaagagtgtgtccaagtgtggcacccgtgcgaccgactggtggaacgacattcagtgtgaccgtgccaacctcgccggcgttgtgtgccaaaagaatgccgtctatagttttcagcagaaaaacagaagaaatcactanaatgattttacacaaattttttgatcggctgaattttgagttaaaatgaattcgcccagagaaagtgccgaaacaatgagtga

SEQ ID NO: 24179 - DNA, 1609 bp, Heterodera glycines
gtttcattacaaaacttgaagtaattcatttgcatcggtcggaaagaacgatcacttaagccataaaatgaacatagatcaaatgaagatctataacaaatctgatcttaaatttcgtgatcactctcgatctcgaataaaacaatagatatgttccactacaagtttttcataatttcgaaatggcttttgatcacaaatgtttttgcagtctgtgacggtgctcatgccgcgcccgcgtgcctccctcggcaccgccgccgcaatgccccttcatcagcagcagaaaatgccacagcaggaacgagcggtgcccgcgggcggcgattgggaaggcaccggcgcacagcaacaaacaacaaccgccttttgctttgtgccgttgaaacggaacagcggcggcggcaccagtcaaagtgagggagaaatggcggcggcagaaagaaaaatgccaatataaacattattaagcatattctgataattgggctaacaatttaagttaaaatgtcattattttggcgttttgcaattcttatttgcattaaaaaaaatttatttgatattttgtgacaagaaaattaaaaaagaaaagaaaaaaatcattttaaaaatcaatttatacaataaatatattaataatattctaaaaattaaggcaaatcaaacaccatcagcgaccagcacaacaacagcagcagcggcagcaaagatgggcaacaacaaccgccgtcggcgccaccaaaacaattgttgctggcatcgccgccgccgccgctgttgggccaaagcggtggaggcacatcgcacgcgacgacaacggcggcgacgacgacgacggcaccagcgtcaacggcacctgccgcggccaccacaacggttactgttggtgctgttacggcgacatcgacgacgacggcaccaccgaccaaagcgacgctcgccgccatgctgaccgcgtgccggggagtgcggcgcaacttgaaacagctgcagcaggtggtcgtcgtcatgcacacgcacgggggggggggcggtgcctctgctgatttttggcattttgcgattacaatgctcttaatttttttgcgcgatagccttgggctttttacaaaaatgacttccgagcttttagagctccctgtttacaaacgtaagctccaaagcagaattcgaacaaaaagtcggaaattaaaaattggaaaaatgaaaatattagttttctaaccttatatttgtttgaaaacttggatttttgaaaatatttctttaaatatataaaaaataggaattattctttgaaagaatttttttgaaaaatctgaatattaaaattatttttaactttgtattggtagaaaattaaaaatgcaactgataggccttaaggaagcagagtgtgggagagaatgggataaaggcctgggaggatctctgaagggtcccgtagctcagtcggtttgagcattctttggtatgggaagggcgtgggttcgagtcccactgggcgagaaaccttttattttctattcaatattgcccaaatcgactggggatgttttttttttacaatttttcaacaactccatgtttattaggttcgcactcc

SEQ ID NO: 24180 - DNA, 1849 bp, Heterodera glycines
aattctcaagaatttgggctcaacccccccccccccccccctcctttgaatgcagaatttcattttgcaggccaatgtcgcccaacatccgccgatggtccaaccaccgcagcaccgtccccccgcttcccatccgatgctttcgcataaactcgaatttccctcgcccacccacgcgtcgcctgcgtccgttgtgcatgtcgttacgcaccatcagccccaattcttcggtccgtcgcacaataacagtctgaacgccaatccgatgaacaacgggacgactccgccagccattttcgacttccaaacgcaacagtttcgggaattcgatttcatgaacagtccggaagacccgatgccgtccagcgagtcgggcggatatggcggcgatggcacagcatatggtcgcgtgccaatgggtggctatcatcaccaccatcagttgcacgcgcatttgcacggaggggagcacatagcgtacgcggaaggggacggatgcgcagtgaacgaagtgacggcagtgcagcaccaccaacggcattatggtgaggggagggtgaagtgctgctgcttaactttcgtttcattaagcctatcagcagcagtgcccttgcaaagagtgttttgccgcgtgccgtcctccgcccccaccggtgactcatccgccgtaccctccgccgccgctgccgtcctccgctgctgcggttgaccaggcaaatgcgcaacactacgcaatgtgcacttatgacaacagcagaaaaggaatggccagtggctgctgtcagcgagccgaagcagtacaacaaaaccagcaacaacagcagcaacaacaaagacagcagcagcatttgtatgaggctccaatggcagtgcaacaaacgcagcagcaacactttagggaggagcagcacggacaacaccagcacgtgcttgtccagcatcacccacagcagcatcagcaacctccgcactttcaccctcagctgcagcaacaaatgcaagcagtacaccacggggaaatggaaattgggcatgggaatggcggtgccatgcatcaggtggacagaaacggcaccaccatgaccttttatgtatccttttaaggttgttcatcatggtcatcccaatgaaaatgaagcgcaaagagtggggccgccctccggcggacatttgtctgctggaatgctggaggacattgagctggacgaagtgagcagcacgtttagcgacttgaaaatgagcggaggaagagagggagacggagcaggaggaggaacaagcagatgagaaaaagggcgaaggagagagataaggacgaatggagaggaagaaaaaggaagagggagaagaagagagaaaggaaagggaggaaaaagtggaagaggaagtgaaaaaaggaggaggaagagccccaaaggaagtggaattagagacacaaatggaagagaaagtgaaaaaggaaagagaagagtcaaaaatgatggaaaatggaagagaaatgagaagaaattgagcagacagaggacaactgaatggtctttcaacatttatgcttatttgttgttgttgttaagctgagctgatgggccaatagcgaacacttgaccatttgttaatcatttcgggtttttgtacaattcgtcggtttttctgctggtgttcatttcattagcgattggccccccttttgctccgacgatcccccccccccccacatcccctttgatcatttattattgtccaatcattccctccctccctattccatagtactctaattgcccactcacctttcacattttcacctagaagatatcgcaatttcaccccccccccccccaccaattag

SEQ ID NO: 24181 - DNA, 1698 bp, Heterodera glycines
  unsure (1)..(1698): unsure at all n locations
ttgttatcatttataagcggtattcgtcctctctgagcctgccaaatttcgaaaaattttgtaaaagttccataaaattctgtccagaacgactcaaaaatccagattttatacctttatggacataaatgtgttcaaaattgacgaattttttaggaaatttgcatgttaatagagcatctgaagggctttaagaatgatgtcaataatgtgttcgattaggatgacgaagaaaaaagggtagtttccctttatatgacggcaagctctcaatatatgctctcnccaaaatacctgtgccaaagtgggcggttccccaagataatttccgaaaattgtattttttaaattttttggacaaaaataaataatatattcatgtagcacagcagatcgactcctccctttgttcggtgtcatgacaactcgtaattgaaacggtgtgtataacaaaattaagtgtgtacaaaacattagatgaatgtttttttgctcttaagcgttccaaaatgatggtttgttggtgttaaacgtgggaaatttcaatgataggtatacaaaaagattagtggggaaggttggatagaaaagttgcttttgcaattgttagggtctccaattctcagcgtaattttaaaaatttgccatattccaatattaaaaaatgtgtgcataaaacattataggaacgttttgtttgctcttaagcattcgcaatcaatagaaaatgaatgaatggtttgtttggtgttcgaaggtcaaatgcatttggaaggaggggaagggcaaaggttgaagagaatggtggcgggaaatgggaccgcttttttcccctctccgttatcatttgaaatcagacattcttataatatttattgtatcaatcagcattttaaaataaacatgtcaaaattatggtcggtcacgatcaaattaaataaggtaactgttttttgctcttcttatcacaaccctccggcccattcttcggtgtcgtttactggccacacttgcagtcggcgccgcacttgcaattctcacaaacgcacttctctaaaaaaacaaattatgtgatgcgaaaattaaatttttggggaggggggatttcgaaattcgattgttcagcagttttatttgtctcactgaaagaaaaacacgcgaaaagcctactcctattaataaatggaaggagagataagctaactcgatccgtgccattcattcccttaccgtttgcgcagttgctcgcctccttcgcaccgcatttgcagtcagtgccgcactggcacgcgtctccacaggggcatttcactaaatatgaaaattgtctgactgtttgttactcggcctatcgaaaagaaaggcacaaaaataatacaatccttcctttatatattaataatttttaaaaaaaacaccgaccattgccacacttcggaacgggctgttgctgctgcatttgaatgaagtctcacaatcagttttgaaaaatttaaaatttagctaaattttaaaggagtaatttattgttgctacatatatacaaatgtgtgaatagtgatgcccttaagaatggggctgctaatgttaatgtacacaaagatttttctgagttatttaaagaagaatggaggaataattgtcgatggattagaaatgaacgaatgaaaaaacattttgcggattaaggaaagggga

SEQ ID NO: 24182 - DNA, 767 bp, Heterodera glycines
gggacctctcctggaagggagggcaatttggtctcgccaatttttgttactgctccaactcgtccctttccaactcactctgaagcaataactcgtttcttccccgtcccaaatggtccgtggcaaaggaaatttccttctgattcggtattttcccactgctcccaattcgcgtccccgaatcttttctgccttaattataggaagcaataatgcccttctttggtcggatttgaatccctttcgattggcctttcgtctaattccctttctttttgtacttttttacctcgctgtaatgcgcgtgcatccaaagctcctaaacttttaaaatttgaatgtcaattaaaattgtttctttgccccattccaacgacctggagttcggcatggttttctggggaaaaattgtgcgactggagaatggcatacaattctttgaaattgtgccggtgaaaagaaataaccgcctgagctttgagcactccctcactgaagcgatattcgtccaccgggggaatggtccataaaaattgtgcctttgggcagtgattagaagtgccaaagtgtctaattgtgccaatgtcccaccagtcggtcgaacaaattgtgtcgttgcagaatttcgcacagaacgcccacctgttcgacagagaatgaaaagtcggaggaggaggactgttgggagggaacggcactgaaaaggcgggagagatttgggagattcagaaaatgggacaatggcgaagggtgtccgggctgacctg

SEQ ID NO: 24183 - DNA, 2032 bp, Heterodera glycines
cttcttccttctttaacgtctcctctttgtctctttcctctcaaaagtttcctttcttctgtgtctcctcactgtctcccttctcttcttccttctttaacgtctcctctttgtctcttttctcttcctcttttcctttcttctgtgtctcctcactgtctctcttctcttcttccttctttaacgtctcctctttgtctcttttctcttcctcttttcctttcttccctgtctcctcactgtctctcttctcttcttccttctttaacgtctcctctttgtctcttttctcttcctcttttcctttcttccctgtctcctcactgtctgtcttttttccctctctttctcttgcttcttcatctgcctttttctcttcctcgttttctctcttcctcgtttcctcattgttttttttctgtttgtcctcttccagcttactcttcccctctccctctccctccctttcttttttcccttttctttcattgttgctcttttcttcatcaccctctctatttatctcttccttcacgtccctcttcccctcctctttttttatggcctcctctttgtccttcttttcttcttctgtctttttctcatcccttttgtccttgttatctttccctttgtctttctttctttcttcctcattctctcccctttcttccttctgctcttcctttctctttttcttttcctcttcctttttctcttccttcttgagcgtttccttcttcgtctcctcctcctccttttcttcctttaccttttcacttgccaaattgcttgagtttactgcttcctctttgccctctgccttcttttccttttcttcctccttcaactttcttcttactttattttcctcctcatttcccgcattcattttcatctcttccaactctttccgtgttaacttttctttcagtgccgctcttcctcccttctcttcctcatcagaaacgaaaccatgttcgttcttccactttttcaactcgtccatctcgaaatggtctttcttctcttcccggtgctttttcatcttctcttcctctgctttcttttcgtcatggtgtctcttccttccctcctctttctcttcatcttttttctcctcccggttccctttctcttctttcttttcgtccctctgctttttcctcccccccacttccgtctcctctttatgttccgtccctactctttcttcttccgtcttccgcttcttctcctccttttctgcgctctttttcgcttcattctgttcatcctttttcgtccgaatttcctccttttcggaccttcctccggatgatggtaccgcttcttcttcctctgatgatgtttccgaaatccgcatgtccctctccgattccgtcgtcccctgccttttcgcttcctttttcgcctcgttcttcgctttcttctcgctctgttcgtcttccgctgttcctgtctctgttaacaccactctctcctcattcgcctccttctcttccttttccttcttttcctcttctttacactttttaactactcctttctttgtttccttttctgcctttttcacttcctccatttctgcttcttttccctttcctgtctctttttcccctttctcttttagtttcatttcagattccctttgtctctcattctccctctttgcttctttgggttctcttttctcttcttttaattttttctgttcactttctccatcagtttccgtcgcttcttttgtttcctctttttctttcttcgcctcctttttctcttctctctcattttccctttctttctctcccttctctgcttttggccccctctttttctctttgactgatatgtctctcttctcttcctgctccttcttcttctctctatcctttgcctctacgtctttctcgccttcccttttctcgttctttactttttcctccttaggctccttcttttcctcttcgctcctttccctccccttcagaagatctttctctctgtcatcctctttattttctttttc

SEQ ID NO: 24184 - DNA, 1712 bp, Heterodera glycines
tgtgccttgttgtgctgaagcacgggcgtgctgtcgtcggcctcctccgactgttccgccgcccgggcgttttccgtcgccattcccttcgacggacttttgctgtgtgctgcttggagttgtacggcgggccgtctctgctgtttgtccgttgtcgccgcattggcaacaaagtccaaagtcaaatcgatgagaccgttgcggaaaatggcatgtttagagaacaaaggcttggcacattgggcgaccagcacctgaaaatgcaaatcattcgcaatccgagacgtatccataaatgaggttttttcgtattcatatgttactcgacacagaatttgtgtgtttatatgaattttaaatttgttgtcttcataaatttatgccatttatgctggagtaaagtctaaaaaactagttctataaagatggtatgaatcgaaagaatcagaataaaagattgtctcattgtccgatgcagttattttttgggaaaatagcggacggaagaatgttttaaatataagacatttcactcaccggctcaattgtgttgcccacctcccaaacggtgaagtgcaaaatggcgtcacggctcagttccgagtagcacaccggcagtgtcagccattcgtcccatttttgaatgtcccgcgtcggtgcgttggccgaagcgtttgtttgctgacggaacgacgtctgaacacttcgaccaaccgtacggccattgcaatagacctaaaaagagcaaaaaatattccaaaaaatattcaaatgtattcagagggaaggaaggagactttcgatggggggggggggaatatggccactatccccagcccctttctaaaggcacttttgtaaatgggggccctttcaaaaccttttaattcattctttccctttttttcaaaacggtatctatcatgctttcatgatgatcgcttattatgtcaattattttgccattttgatttttgacaaaaaaaaacgtaaaaaaatcgctaaaatgtcccactacgtttatcttcttcaaaaatcacgaaatcagccccccccccccccctcaaggtatgcctagttggttcatctcttcaggagtaaggacttagtcgacccttttgttgtttaaaataattcacacaaacattgccaaaaattcaaatttcctgacaaaacaacaaataattttctgcagtagacttacgcccatgaaagtgttgggtttttatcaacaaattaagcattaataaaacgtacagtcagtcggacgaacatacaaccggatgggacggcaaaacggtgcacactgtcattggaaggcgaaggcaaatagccggacagagagaccaaccgaacgcggacgggcacatccaactcggagctgaataagtagcagaagtccttcctcatatgctaaccaaaaaaataagggaaataaaaagacgaagaatattaaaaacaaaacaacatcaaataggtagcagtgaatccaaagtttttgtttttgattcttaaaaaaacaaatcacattttggtaaactcttggaagggaaacattttccttttaatttcctcaatgagaaaagcacgaaaaagatatttatagcgcgaaaattcttcaaatcccggtcaatattgtgcaacagaaatggataaaaaatgaggcaattttggaagattcacacatttattgacaggtttttccaattttt

SEQ ID NO: 24185 - DNA, 1534 bp, Heterodera glycines
cccccctttggatggcattttgtcccccccctttcgatggcattttgtctcccctttcaatgacattttgtcccccttttcgatgggcattttgtcccccctttcgatggcattttgttccccccctttcgatgacattttgtccccctttcgatgacattttgtccccttttcaatggcattttgtcccccctttcgatgacattttgtccccctttcgatgacattttgtcctccttttcgatggcattttgtccccctttcgatgacattttgtcccccctttcgatgacattttgtcctccttttcgatggcattttgtccccctttcgatgacattttgtcccccctttcgatgacattttgtcccccctttcgattacattttgtcccccttttcgatgacattttgtcctcctttttgatggcattttgttccccgccctctcctctctttcgctggcttttccctccctttgcttttcctccgatcattccgttctttcttaggccgtttctgctggtgcattgcccattccgctgcgcttcttttttgtctgccctttgcttttgtttcgcgcccaaaaccacaattgctttggcctcttctcattcaggtctttcgttacctttttcatttggcactttccgaaaaaataattaattaattaattaattgcccttaaattcccttttgctcctttcattcgttttgtgccttttccctttttggctcattttgtccttcagcaaagtgcctacggcattgggctgttaattctcagtttggccgcgttgcctcggacggctcatttccttggcgatctgtcaaatgccccgctaaaagcgatcgctttttattcccttggcactttgatgaatttctttttggttagtctttaaaatgaaaaattgctgcattatttgggctgttgtttttgactttagttgtacatttattggcattggtattggcacgtcgaaactttgtggaattcggcacggaaattgcgacggggagagacattcacaggcagcacaatcaaaagaccaatccgacgatattcaccggcaacgattggaggaaaaatgccgttgttgggacaaaatccgatcagaaatggactgaccagcggagaggggacggaacggaagaaaatgccgaaggggagcggcagagagagctgggcaaatggagagacgataagagaagaaggaggaggaatggaaaagggggaggagcagcagagaaagaagcaacggacacatggcgaagaagggggggacaaaggagaggaaggggcacaaaggcacggacaaaggcagtggcggaagattggccatggggacgaagacggaaacggaagaaggcgcggaaaggacgaacacggaaacggaagaagaaacggaagggacgaagacgtaaacggaagaaggcacggaagggacgaacacggaaacggaagggacgaaggcggaaacggaagaaggaacagggcaatgaccgttccggcgagagagttgacagggaca

SEQ ID NO: 24186 - DNA, 1327 bp, Heterodera glycines
  unsure (1)..(1327): unsure at all n locations
ttctgaggattttccccaaaagcctcaaaaatcctcttttttctcaaaaagccacaaaaatcctcaaatcctcattttccaaaaaaaaatcctcattgacctatcaaaaagccacaaaatgaggataaatcctcagatctgggagccctgtatatgtttatagtacctaagctcaaaaaggtcatgtggtgaattagctacgaagatttaagtctgatcagctctcttttattgagctatggatttattcaaaagcatcccgcccctctccttcctgaaacccgaaaaaaaattttttgaaattttcaaattatttatattctttaaaattcaattttcccccacggagccagtcggcactgctccggcttttcttttcgtctaaaaatatcataaaaaatttcgtatcgtcgacaagcaaaaaaggtcatcaacagggcgcggcgaaagtggctctcttgccgaaacgttgagagtctggctcggccatctgattaatttaatcatttttattattttttccaaatctattaatttatgttttgatatatttaagcagtgaattttttttttgttccaaattcctattttatttctccatcccatcgccctctttagctccgcttcatcccaactcatccgacgactctaatgcctccccttccgctggtgggtcgtccatttccgactttgtcgcgcagcttccgcccgcccctccgcttctcgtgcacattgcggtcccttttttgctaattgccgccacgtttgtcggtctgttcaactgcgctgtcgcgttcggcctgtactttgttttccgagctgttgcttcggactttggacgaagtgcattgtatacattacccagggatttcaagtgggtgctattgctgggcaaagagtcgagaatgaagcaaattagttcccggggataattattaatcactttcaagtagtctttgacctttccaagaaaattagatcaacacaaaataagggtccagggaggcgagttggtcaattctttatggcaaaatttgatagctgtaaattgaatgattgaatcatttcttgtgcttgacatgatcgaggtttactgatcggaaagctttaaagtggcctttcgctcagcaaatattatcaatttgtacattttttaaatttaatgaaacttttcgagccgtctgccaataggcgataattttgcaatttttaaacganaattataagaacattgatatattgtcaatttaattttttttcatcccctgcttacgttttgcatttgcttttgatcatcatcctcagagtgttttcactttcattttca

SEQ ID NO: 24187 - DNA, 1901 bp, Heterodera glycines
gagagcaatggccattctattctacagggaatttttaaatttattctctatgccagaaaaatggttatctcttttttgcgagaaattttgtaccatacaaatgttcccagcatgggcagaggggcgcggagagcaatggccattctattctacagggaatttttaaatttattctctatgccagaaaaatggttatctcttttttgtgagaaattttgtaccatacaaatgttcccagcatgggcagaggggcgcggagagcaatggccattctattctacagggaatttttaaatttattctctatgccagaaaaatggttatctcttttttgcgagaaattttgtaccatacaaatgttcccagcatgggcagaggggcgcggagagcaatggccattctattctacagggaatttttaaatttattctctatgccagaaaaatggttatctcttttttgcgagaaattttgtaccatacaaatgttcccagcatgggcagaggggcgcggagagcaatggccattctattctacagggaatttttaaatttattctctatgccagaaaaatggttatctcttttttgtgagaaattttgtaccatacaaatgttcccagcatgggcagaggggcgcggagagcaatggccattctattctacagggaatttttaaatttattctctatgccagaaaaatggttatctcttttttgcgagaaattttgtaccatacaaatgttcccagcatgggcagaggggcgcggagagcaatggccattctattctacagggaatttttggtactagtaaggtttgtatcccccttttgggtaaaattttttcaaaatttttttttcttttttattgtcgcaattgctttaaataacaaataaaaggagatttatgtgtttattgggtacaattcagcgatttgagaccacaaattataaaaaatatccggtcctccaaattgcttacgccacaaaaaatcagaaatgtatgtggaaaaaagtgatctgtgagtgccaaatctcgctttatgttcatgtttgaacttctgccacgtcgattcaattgtattcgtatgctggccagttccaaagcggttgattccggtctttaatccatttgtagctcatttcgttgccacagtcacaaaaacgagtggtgtgtagaagcttaagttctctgagccattcttcgaattctttgtctggtagagccaatactttgaataaatcgtcaagagtgaaatttttaagcttttccattaatctaaaaagcaattgcgacaataaaaaagaaaaaaaaattttgaaaaaattttacccaaaagggggatacaaaccttactagtaccgaattttttaatttattctctatgccagaaaaatggttatctcttttttgcgagaaattttgtaccatacaaatgttcccagcatgggcagaggggcgcggagagcaatggccattctattctacagggaatttttaaatttattctctatgccagaaaaatggttatctcttttttgcgagaaattttgtaccatacaaatgttcccagcatgggcagaggggcgcggagagcaatggccattctattcaacagggaatttttaaatttattctctatgccagaaaaatggctatctcttttttgtgagaaattttgtaccatacaaatgttcccagcatgggcagaggggcgcggagagcaatggccattctattctacagggaaatttttaatttattctctatgccagaaaaatggttatctcttttttgcgagaaattttgtaccatacaaattgtcccagcatgggcagaggggcgcggagagcaatggccattctattcctacaggaaatttttaatttattctctatg

SEQ ID NO: 24188 - DNA, 1563 bp, Heterodera glycines
aattaattactaattagtttttacattactttccccccccccccttacaattagcattgggatccggagaattttctggctggggccaccaatgggcaccacgagcagaggcagcccgagcacggacaacagcggctcgccgggcggccgtccccggcaattcgtccgagcgacggcggaagacggggagggggaggatgaggacgaagggaccgatcactgatcagcggagaggcgccagaggcactgtgatcggcagcggatgagtgaggaaaagggaagggatgaaagagcgatggatgttgggatggctctgatcatcaatcactcactcactctttccccggggggccaatgtttcgccgtctttccgtttggcatttgtttctgtgtgttccctctccccattctctgccactttctctctgcctctgctctctttctttgcctcctcccatctcacaatggtttctcgatgtcacttattattagggcccggatttttatgtttttacatattttttttgcggcttagttatggcgagagaagcccaaaaatagcattatctccgaacaatttttgatttagagcgacttataaaaacataaaaacacatattttggcgttttgtcacataaaatatgttagcacatattttggagtttggcacatattttgcacatattttggcatttttgagaaaaattgcaataaaaatacaagaaaattgaaaaatacaccccctaaaaatcgacttttttcctaattattaacataattttcaaattaaaaaattttttcttcgattgtagaaactaatgaaatctcgaattcattaattcgtcattggatttcgaagttctctgctggaactttcaatttatagaaatgatttatcaaaaaaagacaattttaccccaaacacttcgaaatgtatttgatttgcgttgtatgggctaaaaatgataaagaatgagatttttgggaatttttatgcaaaaacacacttattttttcaatttttaacacatattttagcacatattttggcatttttgggggtttttagcacatatttcagcattttttagcacatattttattacatatttcaggatttttagcacataaaaatccgggccctacttttataattctctcccattgattgatctctccttttttttttggcttttccaatcattttttcggatgactctaaatttatttattaaattaaatattttcattactttatgtttatataaatacatttgattacacaaaccgtctaattttggtaacgctttcgacgtgggtgtgatgggttttgctgtccctccccgaattttgcttaatttccctgccttttcaaatccatatggcaaacaaaagcaaaattaggcgcgagggggggggcggcaaaaatttggccaatttttgacctatgcaatggcaaattgggtcggaggaggagaacacatttccattatttctatttttttggctgtttttgtttaggagggaaagcacaaaatgttgtttctttcaaatcactcttc

SEQ ID NO: 24189 - DNA, 1465 bp, Heterodera glycines
atcactctctcatgtaatcagagagagtctaaagccctccaatatatggacaaaaaacccccaaaaatgtcatatatgtaaaaatcatgaaggtatcattatctattatttatctataaggaggatatttttaggggctattatttagctaaaatatattaatattaagtactaaggacacccatgatagatgctataaatgttaaaatatcagctaaaatacccatttttaattatgtaattgcaaatttgttcattgcaaagcaaaaaatataatgacaatttttaaatccatcatcctacgtaattatatcttgtaattaatattgaagatgatttattagtagatccatccttctcgtcgcgatcatctcgccgcgtcatattctctatgaaagaggggctttataaataatattaaataaattagtaaattcaatgtaaaaaataaaaaaatggttttagcaacgaaactcaaaacctatataacatatatataaaaattaaaataaaaaaatgatttattagtgagcaacacgcgtgcgcaatgataatgaataataacacaccggaggggaaaccattagtgttttgttattgtttgcttaaaatgagcgagaaaaatgggggcagagaaagaaaaacagcagcatagagaacagagaaacaaaatttaaaaagagttagtaaaagacaaacagatagtggcgagagaaagtacatggattatgcggcagacaagctgacggagacgagagagtatggaaaatattcgacagacaagcagacggtgacgagaacatacgggaaattataaagcagagaagcagacggcggtgagagcgaatgggaaattgtgcggcagacaagcagacagtggggagaaagtacgggaagaatggagaaaaggacacgtacgcaaaagaggaagaagcatgagctggctttaccaaaactcaaatcaatgatcaaacgaagcgtggcagagaaaaataaatgacttttaaaaaatgtattattatgtttccagaaaattatggccagaagaattgaaaagaagaagaaaaatgcttttttgacaacactctcaccaaatttgggatggtaaatgcgttattagtgctgtccttgaccaaaaatttcccgagactcgagaccgagacccaaaaccccgagaccgagaccaaaaaaagccaaatccaacaaacttggtgcatattcgagagcccttcacatgctctattagcctgcaaaattccaaaaaattttgttaagtttaaaaaaagtttgagccaaaaagagttggaaaaatctggtttttgaataattcttctagccataaattttcttgaacattaacgaaatttttcaaaatttagcaggctaatagaggacacttaggtatatcgaatgatccaaataatgttggatttggttggcaaaggaaaaagttatagccagaaac

SEQ ID NO: 24190 - DNA, 1564 bp, Heterodera glycines
ttcttcatggttaaatctaaaataatcaattaaaagcaattgatgaattcagggaatggcctttgcccgtacaaattgccgaaatccgacccaattcatcattaaattggaatgcatgggatgagcaaaaacatttgttgtcccaatacggtagcggtgcgtacagtaaacttatgataccggtgatcactcccggcttcacggaaagtaatagtacatatctattaaattggcacacagcaaaaatcatcaaaaatgcacttgacgacggtatttatttttttaattatttaaataatttctaaattttgtaaaagttttatttaattatctttaaataaaatactttaatttaattgtttatcatgtttatttacatatttaaaatattaaaataatttccaattctatgcttttcctatttttagcatttaaattgtttcattcttcaaaaagtggaaatgaaaaattgtctatgctctttgaacaacaaataaaattccacgaaaaggtatattggtaattataaaattggggacaataattaattaggtaaataccgtatcctataaattacagtattcacaatattttgcgatcacttgtgtcgcatccgattcaaatatgtttaacgaattttgcggatttgttgttacacgcatacgcattcaacttactcgcctcaccgactgcaggcgtgattatgttgatttttgtcacgtgcttttgttaaatggctgtccaccgtatactgcacaaaaatacacaaaaatgtacggtagtgggaggttatggcgttgtgttattaaagaacaaataagctaaagttgatttttcccaaaattaaatcattccgataatgcagtttaatcttttttaaatttggaatttttggatgcacctcggaaatcgcgaatatacggtagtaggttattattaaaatatgaatttatttagctatagtttttgccaaattaaatcattccgaaaatgcagtttggtcatttagaaattttgaattttttaaacacattggaaaagccgagactaattaccgagtctcaggatagattcattttgtataatccgcccaataaaagaaattcggaatattaaatgtctgttttaaaactttggagaaaattctttaataaaactaagaactatatttagcaggtgtccccaaattaattttatattttgcatttttcccatttagttcatcaaaaattttctacaaaacttggcttgtcagtgtcaaaatgaagaataacacccaaattcaaagccaaaaaagcaatgtcggaggacagttacagtttgaatttgacggaacaaaaaattcaaaaacatttcgccagaaacaatataaacaagggacggatgagaccgataatcaacgtgattttgtcaatttagaatctgaatacattggcaaacagatagtagatgacttaatttaatttaacatttatgtcgtatttatttttggatttttaaattatcgaattattattagcgaaaatgatgtaactatttttttgaaacattgaaaataatgatt

SEQ ID NO: 24191 - DNA, 1475 bp, Heterodera glycines
agttcggcctgtattcaatctcaagtgataatcacccttgatggaattaatttagttttttgttgcttttaccccgcatgatttgttcacattccgcttccattgctgctttacgagctttgtgtccgcactcggttttagtgtcgcgttctgttgtatgcgtggattcaatgacaaaagtgactaaattatcaattttaatattttatttggataaaaaattttaatttcattttcatttagaaaaatattgggtggcagtgggaccgacgaccagtaaaaaaagttgtttttttaaaatttatttatttatttattaagaaaagtgattggatgaaaaaacatttgaaattttactgaaatttcaaaaaaaaaaaattattttattccatcaaataaaaagagaaaatgaatggagaatggttaaagaaggaaacaaagaatttttaaattttatagtttctttcattcacctcaatatcgtgcgaatcttttgtatattctccgtgcatttattatttaatatatttagttaaaaaattaaataaaaataaatattagaaaaatgtaaagaaatatgtttgtacgatgaactgaaaggattgcaataaaatctgataaaattggtaatcgattgggcccactaaaccctcatcactcaccacacacaattaatatcattttttacgtcacatcaaggtcataaggaatggtgcgtcatttatttatttattttttacacaaattaattattagggacaaaatcaatttgattatcaaattttgtgctttttatgtctatttcttatctgatatataataacattttactcaactaattgttgtttcaattttttaagtgcatttagtgttcggtggattaaaggaatttaaatcaatgaatttttaatataattagtagggatgccaaaaaaatggatataaaatcgcaaaatatggaccaaaaatcgcgaaatatggacataaaatggcaaaaatctcaaaatatggacataaatttttcaaaattgagtgcaaaatttcttcaaatttattggttgaaattgcatatgagatacatttccaaattttttgactcggtaaggcgctttgacaaagacggctttcgttttggcaattagtcggtcaacattcggaaattggtctcgaattttttcggcaattctgtgcaatcattttataagaaaaaaaaacatgaaagctaaaatttattaatttttttagcgcaaaatcaacaacaaaagcgaaattttcgcttttttgcttatttttgacataaatttattaatttttaagaaaatttaaatttattcaatattctcgagaaattttggcgaaaaaatgattttttttgaaaaatttttcggtttttgggctcaaaaaggctaatttagctgctgggggcccttctcatagaggtttatggaaaaatgctaaaatatggaaataaaata

SEQ ID NO: 24192 - DNA, 759 bp, Heterodera glycines
  unsure (1)..(759): unsure at all n locations
agaactcattttagcgaaggtgtaaaggtggccttcgtcattacaattttactttttgttttttggttgcaattgggttagccatttctggaaaatgtccaaatcagaatgtacatcaaattggttaactattaaaaaataataggatttggaataagtaaaattgtaaaaaatgagcgaatgttaattaaacctaacttatgccaagtggcgagggatccctcaggcttagttttaagaatcttaatttttaaaaaagcacatttttctatttttgggttggggcccaaacgaccccggggcccaaaaacgggggcccaaacgctctggtcccattgccaatgtccttgattttcaatgttggaccgctgcttgccataaattcactgaaaatatatgtgcgattgatttacatataaaaaatgatagactaattattaattaagctatcaaaattttggttgccttttaaatatttatttttatatttttaaatttaaaaaaatgaaattacagtgcagcaaattgggtcacttcacgaaaagcacagtttccattcatttggatagttatactgataactttttcgtcaacaacaaaaaattcgtcaaagatttccatgctttaaatgtatttctgttgaaaaaattgaaaatatttttattaaatgcaaaaaaaaaaaaaaaaattagaatgatggaaatgctgcggggtgacacaacagaatcaatatttttanagtcagcagaaaattgttgc

SEQ ID NO: 24193 - DNA, 1752 bp, Heterodera glycines
  unsure (1)..(1752): unsure at all n locations
acaactaagccttgatcctcctcttgctcgtccttaatctacctagggcgaaggngaagnantgggnnagatgaggngtccttgtgaattattaaatagncgtatgggngagnggnngntttgngataggngtnaagaaagaagtngagttgactcgggaaaagntgtangnnaatgttanggatgganaanagtgagttgggtggtcgnatnagtannaggtantgggngganaggngggnnantttgatntttngntnaaanaaattntgggtgangaananganagnaaattggtggtggtgggantttttggtgaataagtngganaaatagtggtnatnaatggacagcatcaagtcgtctaggatcagcaaaagaggctttggcatgcgtttgagcagctcttcaggaggaacacccgaataaacatcaacccccgatttttggagaatgggcacagcgggattcatttcaccaaaacagtaaagtgttgacacgggttttggcataattaattcatcggactcggcaacaaatttcaataggaattgggttttaccagaggaggagggaccggaaatgattagtccaaatggtagtttaaagcaaatgtctttattggagaatgaattaaacattataggttaacaaattaattctgaaaattaaattgtataaaacaatttatatagacaaattgttcgtcgctgcgttgacgctctcaaaaaattcgtcaagtgtcttgtcaatgtctcctagattctgtacctcttcggctgacttcttcattccgttggttttgccttttggagtcggttgctttcttttgagcggcgcctgctgcattgaagtgtccatcatcgtggtggccgcagaaatgctatcgtagaattgttgctcatcactttccatttttgatgatggtgggagtgttggcggaagtgggggcgttttcattttttcgagtggcggaagtggaagtgattcaattttttcggctggcgggagcgggagctccgcagtcttcttttccggaagtgaatcggccagcagcatgtttccaagaacgctgagtgcagttttggccttcttccaacgttgtccctcctcatgcagtgcatcgccagtcaagccggcatcaatcagatcgagtgcaacttttgccttccgctttagctcagccttctgcacttcatcttcacgcaacgaatcagccaacagtccactctccaccaagtccagcgccgtgttggccttttgtcgcaagtcgttctgctgctgctgctgcagcagttgttgctgttccatcagtgcttcttggtttgggtatgtgacggccggcaagtccccgtaggggatgttgaacacgcgtgccttgttctttacacggaagaaacagtggccgggcaagtcgtatatgatatcaaacgggacgaattgtactcgggcgattcgcgtacaccaaattgtgataccctctttggtgaccataatgtccacctccacttcagtccctttacaagacttgcatctgccgctctcatcaaatgggacaaaacggggagaggagaggcgaggaccgctaatcgttaggccactagtcgttactgttatgtcggcttctcccagaatttggttgagaagaccacgcttgtcctgcaggttgatagccatatttttttagaaatgattgtggaaattcttcaagtaaaggtgccgaaccaaaatttcaccgctatttatagggaa

SEQ ID NO: 24194 - DNA, 1997 bp, Heterodera glycines
ttttttgcttccataattttatgcattaaaatgaatgaaaaatgactcatcagcagcaatatcagaacagattttgtcggatgcttttgatagaaacgaaaaatgtggacaaattgtgaaaacggtggaaattccattgatggaaaaagagataaaaaaaggaataaattaattttataaataagcgaacaaaaaatagtcgattaaaaaagattgtacaaataaatgaataaaaacaaaattaaattttgagaagtaaattgaaggtgtaaaagtgcagagagtgaagtgttaatgatcaaaaactatagaggaggcaaatgcccaaaaaaggcactcgctccgctgcccttccgtccgcttctcaaccaatgcgctagcgcgagtgccactgtcgaaaaacacaaaaaattgtgcccgccctgctggcactgcactcgctccgctgccactctgtccacccgctcatttgtccgttccgtgccactccgtttttgccgcactgtccgatacaatttgacttttgttgtgccaatgttggaactgttgttcaaaaagtttcggattgtgcacttaatccctttgtaattttcaaaaaaaaaaattatggtgcccattttaaactaattaatggagtgtttcttggatcatcttttcttttttattaatccgtttttgttcctttccatgccatttgccacaaattttttcaaatacaccaaatctgatcagaaaggcaatcaaatggcattaattcgaaaccaaaaaaaatgttcatatttgattttaaaaaagagagaagaagaataatacaaaatgacataattaagcattttaatgaattctttttttatttattgagacgaaaattttatcaatttgtggcattttagtgccaaaataactgctctcgataaaaaattctttcgggatttaattttaatgtatttccctcaaactctttttacattatctcttccactttctcttttcaataaaatgcatttaaaataaaactattctaattatatttcgcacaattagtacaaatattatcacaaataaaaatatttttcgcttctttttttttttgctcattataaaaaactcattagcaattcattttcattttctgtcggtcgtttagcgccaccgccaccgaccgaccaccaccaacgatggaattgtacaaccaaaaatgaatcatcccctggggggcttttatcgctatagttcggggttaccccccccccccccccatcccatcccatcctccgtcctgcttatctggtggctttggcttgtgggctgtgtgcggtgcggccgtgcgctgccgcccattggccgcgccgcttcggtccgcagggaccgcccatttttgtacggccgaccaacgcatttaagcgctgatcggccagcgaaaaatcattcactttcataaaaatttttgagctccaatcaaaaagcattcaattaaaatagggggagaaataggaaaagccaaaaaagaaaaaactttttttaaatgggacagcaattaaaaatattaaatgatttatacaattttagtgcatttattaaatttcatttgaattaattccttcgctttaacataattttttgttttagggattttatttattatttttttcaatttataatcccgacaaaactcttcaaatcaaccaaccgccttctcattcaacatgaacaagtgtttagcacttgtgtaagtgctaattggggacaaattcataattaaatgaggcaatttaaagtctcccataaattttgatcaatcaccatcagatttctaaatgctttcaattggtccaaatattataaataaactaattaattaaacgttattaatcgggaaatccttgatctaatttgactttctcccctctcatttagtgtgttggtagccctgatccgcgcaggggacagcgctgttctgcggcaacggagattgggcaaagcggtatacgcactga

SEQ ID NO: 24195 - DNA, 1347 bp, Heterodera glycines
ataaaatttaaaaaattgaattacagtgcagcaaattgggacacatcacgaaatgaacagcagcagttgtgattgctttggacagtgaattcattgatcgctttttcgtcaacaacaataaattcatcaaagatttccatgtttttatttatttctgttgaaaaagtcaaaaatatttttaattattatttagaaattggcaatggatatttatttagcgaatttgttcaaaaattgtcaaaattgtattttaatgaatggataaactgtagtgaatgccccgtgaaaaaagggtcaaatgatataccaatcgattcgtctcgaggagctaagcacggaaaaatatgtctcgagttgcggaaatgccaaaaaaccgggttttgaaccggtttaaaactcgaaaatttgagtgaaaaggggggttcctgaccttttaaaacgctcaaattcggataaatttggtatcattcgaaagctcttgatgagctaagtctaaaaaacaaggtataaattcgaaccaatgccatctaagcacttggacaactgagtcccagtgaaaatgcacagggatgggaataatttaaataaaaaaatatttttaattaaaaataaacggaaaattacaaataaatttgtgaaaaaataataatttaatgaaaattaaaaaatttggaccgccatggcattttcaagtgtaatgccggcaaaggctttggacaaggacctgaacaagtgatagtcacttgtgggccatatccggattatatgtacggcggatctggcaaaacatccccagcccaactcttataaatagggatgcaatttatagttttttcactattttttcctgagctccctatagcctgaaatgcacgaaaaacatgtttttaaggggattgttaagctagttttcgagttattagcaactattttatagttttttatttttagcaactaaaaactaaaaatttttgaaaaaaactattttcaactattttggcgttttgcccaaaatttgttaacaaaaatgcaataaaaagaaaaaatacacccctaagaatcgacttaaatttttttttttttttcaaaaaatacacccataaaaatcgacccgaaaattttcaaaaatgcaccccctaagaaatgaaaattttccaaaaatgcatctccaaaattaatttaattattttaatgacgataatttttgattttgaaaattatgtatctcattaatggtttggcataatatttttgctttttgaagaaaattttcgatttacaccccctaatttgaaagtttttagcaactatttacctatttttagcaactattttgggggtttttta

SEQ ID NO: 24196 - DNA, 1944 bp, Heterodera glycines
ccccccccacaaattaaaaaaaacaaaattttattttttagcggtttttcaaagttttaaaaaccaaaatttttttcaaactttcttttaaaaaatccgaaagtcccgccgtaaaaccaaatcctcgattatttttttgtgaattttgcttttgccatgccttgaatcgttgaatttgctgctggagtacgtgcatctcctgttggttctgcaacaacttctccgccacctgaaatttttaaacgcaattcattcttttggttttttatttaaacattgtctatttgttcaattttcattcaaaaacaataaaaatttaaagaaatttgtggttccaaagcggaactttgaatttttaaaaaacgggtttcttgtttttttaacccaaaactaaagtgctgcctgagaaacaaaaaaagtgggaaaattttgcttaaaatcattgcgttttaaggattttttgcatttttcaaaaaaaatctaaaggaatttacatcggaaaatgtcaccgaagaaaaattcataaaaaattgacttaaaagcaaaaaaggttaaccatttgccttccctggcccaaaaatttcatgaaaaatgaaaatatttgaaaaaataaaccgaaaaatgccatgcctatgcttctgtgccattggcccacctttgtcgggtcgcccaactgcgggttttggctgtacgccacgtgcatcctctgcatgcccgcctgggactggtccttgatgttcaggtcggcctccaactcctccagcttctgttggatttttcggcaccgctgctgcggtggcaaattgccgtactcactgccgccgccggggatggcaccgccgccatttgtgccgccgccgcccacactgtacggaccaccgccggaaccattgctctgcgggggaattttttttttggttttgaaaatagtaaaaaaaatttttgttttgtttaataaaaaatgcgccaaaaaaaagaatacgaaaaaatataaaaaattccacgtttgaattaaaattggacaattaaagtattatttagtaattaaacttaaaaatgaaaaaaaattgaaagccccgtaggggtctcgatcccctgaccttgagattaaaagtctcacgctctaccaactgagctaacgaggccacattgaaatgcaatatccaaatcgacaaattgtatataaaaaatatttttcaggacataaaattttatgttaccatcttctgttgcatgaaaacttcgtaaaattggaattttctcgttgaaatttgggtatcctctcaaaaaaaaatattccaaaaaaagttgccataaatgggtccggtttataataatggtgctgggacgttagtcaaaaagcatcaaatggaaaatttttgacagaaaattattcataattccgtttaagattgatcaaattttataatcttgatatttttcgatgccctaattgttttctactatcctgcaaaattttaaaaaattctttaagtttaaaaaaagttgtgacctgagaagctcaaagaaaaatttttttgaacattttcagtcataactttcttgaaacttaacgaaactttttgaaattttgtaggctaatagaaaacacttaggcctatctaatgatatcaagaattaaaaatttagttgcttttgagcaaagttatatcaaaaaatattttcatttgatggtttttgactaacgtcatagcaccctcataaactgcacttgagccaaagaggtgggctctttactcattaagaaacccacgcacagaaaaagaagaaaattataatgctgcacactcccaaactcgggtggccattaaacaatgttttggcatttttaaaaacccttgcagatgcatgatgtataaatgcagattatcgccaggtattttgttagttaaatagcactgctaaaaataacttttaagaaaa

SEQ ID NO: 24197 - DNA, 919 bp, Heterodera glycines
  unsure (1)..(919): unsure at all n locations
atttccccaaatcaacaacaatttgttggccgaacagctccaacccctcggcccccgttcaccgccatatttgtcccattttttggccccctctggccaattcatttccatgcgcacctcccccatttccatgtgctcatttgtcctgtcccaattgccctcgctcacatccccttgttgtactgctccaacttcatgtcctccaattttggcccattttcaccatttcaattgcgattttttgtgtgatcagccaatagggccatttgcattcacattttattttgtggcctttggccggatttttcctcccccatttgtccgcccattgtccactttttcggtttaattacccaagtttgagataaaatttggtgtgaattttcctctgcacttgccccccgtttgactcccggcacattcccgtcccactttctgcttcctctcccgtcaatttcaacgcccgaactcctcgggctttgtcgacaccaccgcggcgacctgcaccgcactcaacgtcaagcgcacacggcgaactccaagcagctcaaaggagctcaactcaatcaatcaatcaatcaacgggtggtgatcggacaagtggcgacctgggcagggacaaaccctcgacagcaccagcacaactgagcgacttcaagcagtattggaactgcaactggtgggaattttttgaggaaaattccaaaaagtatcaagtttgcgctctccgtaaccaaacttgaatacatcaaaaaggggggatcaaaagtgggaaaatgtggaatactgcttggtctccgtgccagcagtagtttcacggnggaaacagtgacttactactntggtcttcgtgccattagtatttcactttcaaattacttattggtctttngtgcataagtaatcngtaaaattactg

SEQ ID NO: 24198 - DNA, 1129 bp, Heterodera glycines
tttcgggtcatttcaaaatttttagctcatctcactgatattttgctttatctctctctatctcaaccaacaacaacaactcaatgtctgacaaccgtggtgcctccgttgcttcgaccggtacgaccaacagtcaggagtctcaagtggcgtctccagtgaaagccggaaaagctactacgaagacgacggctagcggaaagggcggcaaagcgaaggcggacggaaaagtgaaggcgggcggaaaaggggcgaagaaggcgggcggaaagggtggaaaagtgaagattgctgcgagcggatcgaagaacacgcgctctgctcgtgctggcgttgcatttcccgtcggacgtatccatcgtttgctgcgccacggtacagtttttggagagagaggattttcaatggaattttctgaatttcctaatcacaggtcgccatgctcagcgcattggggccggagcgcctgtctatatggcatcggtgttggaatacctggcggccgaagtgctcgagctggccggcaacgcggcgagggagaacaaaaagttgcgaatcaccccgcgccatttgcaattggctgtgcgcaacgacgaggagttgaacaaggtcagatgcagtcggtggtttttgcattttttgaaaatccattgaaattttcagcttctcgcggaggtcaccatttctcgtggcggtgtgttgcccaacattcacacggaacttttgtcgaagatgcagcagaagaagcagcagaacgacgacagtcagtgaacggtggaagaagaaacggacggatagaaaatgaatgatacgcattatctctcctctctagtgttgtcgattttatgatcttctaccgatttttccgatgattgaatattcctcttttctgatatcatttttggaggtctatcgattggtaattagtttggaagactctcgattttttcccggaaacggacaaattttttggtctcagggggacatttgagtcctgggtccataactcgtctggggacggttttagactgaaaatgccttagaggaaaattgtatagctttttaagctctatcgaacggcgttcttcattttccgaccttttcaaaaatttatcgagctaggccccct

SEQ ID NO: 24199 - DNA, 1207 bp, Heterodera glycines
acaatttatttcaaaaagccaaaaagtccggaaccaattttaaaaactaaaatagtgcacaaaaggggagccgccgcacggcggggcttaaaagcattgtacagcataattaaaaccgaaaataattttcgtatatttttcacaatttatttcaaaaagccaaaaaaaatgattcaattttgaaacgaaatagtgcacaaaagggagggatggttagacgaaaagaggaatttttagaaaagagcgcaccccatctgatattcccatttttccgttccacaactggccaaaggcgactgtgctcattgacacgtagttgtccaataaggtacttggactttccacagtaaaatgtggtacaaaattttggaactgtcccgcctcacggcggggcttaaaagcattgtactgcataattaaaagctaaaataattttcgtatatttttcacaatttatttcaaaaagccaaaaaaaatgattcaattttgaaacgaaatagtgcacaaaagggagggatggttagacgaaaagaggaatttttagaaaagagcgcaccccatctgatattcccatttttccgttccacaactggccaaaggcgactgtgctcattgacacgtagttgtccaataaggtacttggactttccacagtaaaatgtggtacaaaattttggaactgtcccgcctcacggcggggcttaaaagcattgtactgcataattaaaagctaaaataattttcgtatatttttcacaatttatttcaaaaagccaaaaagtccggaaccaattttaaaaactaaaatagtgcacaaaaggggagccgccgcacggcggggcttaaaagcattgtacagcataattaaaaccgaaaataattttcgtatatttttcacaatttatttcaaaagacaaaaaaaatgattcaattttgaaacgaaatagtgcacaaaagggagggatggttagacgaaaagaggaatttttagaaaagagcgcaccccatctgatattcccatttttccgttccacaactggccaaaggcgactgtgctcattgacacgtagttgtccaataaggtacttggactttccacagtaaaatgtggtacaaaattttggaactgtcccgcctcacggcggggcttaaaagcattgtactgcataattaaaagctaaaataattttcgtatatttttcacaat

SEQ ID NO: 24200 - DNA, 1714 bp, Heterodera glycines
aaaatcaatgatttttgcaaatcttatatcagattcgtgatcagaagccccgaaaacgcccgggttggtcttttcatagcagaaaaaatttttttggtgagcccagattctccactattacccgcaaattagccaaatctgattcaattttacgcgcgcttcaaccactcttcaggcccaaccccccgccccccacaccagaaccaaggcaatttgtcttggtccgttcccccatgtttcgtcgtccattgttgttgtcccacctcttttgacaagaatcgcagcgactgcttctcctccaacatcgcaagcacttccttcgtcatttgcgctggcacatccaaaagttgtttctccgtcacatgtccatcagcaaccgacttggcttcattgtaggaagcgcgcagctcaaagcttgcgtcagccggcggcaaatgttcctgcatttttgaccccgattaacaacaaaaattgatgcggctctcggttgggcagaagaagtggacgaatttaaattttgatgatagccccgccccccccccccacccacccgcccattccccggccctaaacatgattcgaaatgtgacacgaaaaaatgggcttttcgagtgacaagtgagaattttgagttttcaatttttgttcgaattcggggggtcagggattcgaaatggccaatattaatatgcatgattctatagaaaaatttattatgtatcaaagttgtcaattttatggtcatgtgaactgcaatagagccggggggggagtaagtggccacgaccatcaacgaccgcaataaacgccttttttataaatccatttcaacagcatttaaatcagtgttttatttcactgcttaccccaaattttgtcacagttttaatctctgctttttgctgcaggtcgccgctgacaattggaaattcaacatatgtcacttccagtgcgctaacatttttaatcttaaagtggggtaaaaaagtttaaaaaattaaaatggcaaattttgtaaagcggctaaaaggatggatgaacgaacggaacggaacactcaccagggctggccattggacgccagatccgcgcttcacccaaataacatcaccaattaaaaactgtgtgctcattttgtgcaaaaaaagacaataaaaaaaattgaatgctttttcccttaatttagacaaattataattgtggtcgataattaacggaaaatcggtaatggaaaattttgatttaaaaaccagtatttctactgattggttatgaacaaaaaaaaatttttaatgacatccctgcagccatcacacaaaccgagtcagaagagagtttccgcgtaacgccgcggactaacaacaccattttgatgtgttctgctgggtggaaaaagaaatcgatttgggtaaaattacggaaaacaattgagaatgacggatagcagcgatgggaccaggtcgttttggcgccgaggttttggcccagggtcgttttggcgccgaggttttggcccagggtcgttttggcaccgaggttttggcccagggtcgttttggcgccgaggttttggcccagggtcgttttggcgccaagccagaaaaataaaaaatttttcgcgaaggtaatactgccgttggttgccccccttttttgaaaatttttttttgctttcaacagtcatttaaacatgcttccaatggtcttcagggtc

SEQ ID NO: 24201 - DNA, 936 bp, Heterodera glycines
gagcccgtcgtagtcatctggccaccgcaacaacactttgccgaccatctgattgcgacaacaaatgcacattgtcgtccgcacgtcggacacttcgccaagaaaaaagcggcaaaaattttcactgaaaattcatttaaaaattgttttctcttaaaaaattcctaaattttttatcctccgggcggaggttaccaatccattcccaaaaaagtttaaaaaacaaacgaattttagtcgtttttttttgctgaaaaatcctgaaaatcgggaaaataaaaatgcagaaaaattacgacaatttttgagcgaataaacattgggtgcttcatcattcgtccagttaatttcaattaaaaatgcccaatttggacccaaaatcagctaaaaaaacacatggactttttgaggcgcctcggggcataaaattttgcagcgaatttcaaaaaaaaaacgaacgagtgtttgctgtccgagtatttgcccgcttttcttggccgctgactgtacaccaattcgccgggcaaaagcatgtcccggttgtgcgcactccaacgccaaaaccacaaaatgtcccatttgttcaggtcggggcgtaaatcgtctaaaaaattttaattgtaaatggacgctatttcaaaaatttgtatttttaaaaattatttaaaagggtgggggcacccttttggtttacaaaattcaataatcaaaaagcgttttttttaaatatgccgaaaatgtataaaattggtggctgtacgtgtaaaaaaaccaaaaaattcaatggttggtcgaaagatgcatttttgacattgaaattacacagcgtttaaagcgaaaaaactgtcaaatttcgtaaatttggcgaggctaagggagtcttaattttagagcccggacgggcccggcgggcttttactgggcgtcccggtcccg

SEQ ID NO: 24202 - DNA, 1261 bp, Heterodera glycines
ttttttgcttataactttgctctaaaaagaccaaatttttaatccttgctatcattcaatagatctaaatgttctttatgagcctttaaaatttcaaaaaattttatcaagtttaaaaaaagttatggacaaaaatgttcgaaaatcaaggttttttgagttctcgagctataatgtttttaaaacttaacgaaattttttgaaattttgcagaatgatagagaacactcagggcttatcaaatgatatcaagaattaaaaatttggttgctttcgagcaaagttataaataatttttcgactaaaattttcataatgatggtttttaagtaacgacccagcacctttcaattccctcccccccccccccttaaatggattttgtagcataaaatgacaaaacgaaaaaatatagaccattttctggtccacaaaaataaagcattttgaatgtttggcattgtgttgccatcgctttctgtcccaattcacctttctcatgcatacaatgaatgatcacatcgaatccactcactttcacctgtgtttttgcatttgaaaattaaacatgcagagccttacatcaatctcttgcggtccgaattggtgcacgtccaattccacttggaacttttgctttttttgagtgatcggaactgacaaagcaaagtgaaataagccaaatgattaatcaaaatgaatttagaaaagccaattattggccgtgtcaaaactcacacgacgaagcgggcacgtgtttgaccgggatgatgctttgtccaaaagtggtgccgtgggtggccaacaccgccgggggaggcggcggttggcccgtcgctttgttgccggccgcggtgaccgtcagacgacttccggtcgcgctcaaatgggccttcaccgtgcccgggtcgacgcccagcggcaggcggtactgacggtgcaactcgcgcttgtccgtgtgttggccaactgtttgttggaaaatataaaaacgaaaaagtgcaagaattattagcaattgcaatgccatttgtgttgactgtaatgcccaggcatatggttacagtaccctttgactcgtgcgcacaatggacgaccacgtcatcaccggacactttcacgtcaatttcgttgggcgcgaattggtgcacgtccaactccacctcgaagtcggccttgttgctgggcgaggagaacaacgaagggccggtgactgaagcgaaatgtttattttcactatgcccattcaaaccatttccga

SEQ ID NO: 24203 - DNA, 1297 bp, Heterodera glycines
  unsure (1)..(1297): unsure at all n locations
cggactttgccaatcaccgcaattcgctgagttcgccctttgcgggacggtctccgttccgctggatcagtaccgggccgtgctgacacggcgtgagcccggtctcctgagccatcaacacaccgaaagtgggatgtcctgggaaagaaacgccatcagtcaacagtcttttgtgcgcaacaaattcactctcaccggccaattgcgtaaactgactgagcccgggagtcagttcagccaccggcgtcagctcaacctccgccccattcactccaaaatgtgtcaattccttcgacggagtgcccgccacaaagccctccctgtacaaagtgttcagctgcagagaggttggccggatgttcgaagcgtcaaacggctcaaatttgggccgtttggaaggcgagactgaagtggcgggctcgaaattgatgggttgggacagtgcggagacggaaatgactaaaaagtgactaattcaatcatttttattgggggaggngggggggagtcagtgataaaaaattaaatgaaatgacatcatcgagtccaaattaatataaaaaatgtaaaaacaatgttttcatgcggggatgtgagaagatcgcatattccgcaatggcacaacaacatttgatccatgttctgttctgcaaacattgcgaaatgctttgcggtattcagtgctaaaatatgaaaaaattaattaatttaattatttttttaaattgggaattaattaattataaaccacctgcacaggaaaagcacccggtgtacagctggaatatgccatcactaaaagaccattactaatggggccaaacaatgtattcaattgataaaatgttcaagccgagcaatggcattatgccattaaagaacacagtattcttaaacgggaactgtaatatacagtaacattgaatgtaatagtgagcaaagtaccagaaataaaaccaacaaacaaaaaatccaaaattcatataaaagaatgtaactcgattatattattcaatcatttgtattttggagataaatacaaataatttttttattttcgcaaagaagaattctgataattattaaattaagggttttttattagcaaaaatatttaaccaaaattttaaaatataaattaatattattacgccaataaagcagatgagactggttgacataataacactcagcgaaatcattaaacgtttgttcatttccgattctanatgagccaattaacaaagcaattaaaatttcattaggggtattaattttatcaacccagcaatgactg

SEQ ID NO: 24204 - DNA, 964 bp, Heterodera glycines
  unsure (1)..(964): unsure at all n locations
tcggcaagacgacggccaagtcttgggactcgaatggaatgcggagacagacgacctacgaatgaagtaccccgggagcgagcccggtactccgatcagcactacacgccgaacggtactgagcagcgtcgccagcctgttcgacccgctcggcttggtctgcccggcgaccctcaaggcgaagctgttcttccaaaagctgtgggacgacaaccacgaatgggacactcctttgtcccgggaggaagctcgagaatgggagcacattttggcaagttgggagggggaaagtaacgtgattcctcgaggcgtaactgcgggcaggggtcacccgcttcaactgcatgtgttcacggatgcatcggaaatcgcatatgcagcagcagcttacatacgaacgggaggagaaagcgggtgcagctcccgcctcatcatggccaaatcacgcctcaagccgaagaaagcggctaccacgttcacaataccaagaatggagctgatgggcattctgttgggggtccggctggcagcattcatcgagaagcaactccaccatccaatcgcggggcaacacatttggagcgactcaatgatcgctctccactgggtcagaacggcttcagcgcaaccacaattcgtggccaatcgactcttcgagatcagaaaagcgacagcaacgacgtttcactacattcgaactaacgaaaacccagcggatttggcaactcgaggggaagtgcccaccctcttacaacacaatgatcagtggtggaatggtcctcaatggttgcgcgggccgagaacggaatggccaagcgaattggagtttcagcctgatcaagagggcctaccctctccggcggggcaggaagaaggacaatcagcattcattgtccgaaagaagcatccacaggcctcgtgagtgaacattncccgagttcgttgcttacgaggtacagcaaat

SEQ ID NO: 24205 - DNA, 944 bp, Heterodera glycines
  unsure (1)..(944): unsure at all n locations
aagtgatttctatttttaaatgcccacaaaaatccttttatctaacaacaaagttttgataaattacgcacttcacaaagcttttgccatattgaccaattggttgtgccttctccgttcgccatgtgttactgaaaagactgtcctcgtttttggtgtctttggcttggttactgttgttgttgttggcattgtgttgttcatttttcaaatttgttgtattctgtcgccaaaatttgaatacatttcgaatggaaatggacgacggttcggcacgccatttgccctgggcgaccaattcgtggagcaactgttgccaattgtggtggcgcaacggcacaaccacttcgtcaatgtcgcaaataagaacaaaatgatgggtggcggaatacctgccgtgtgatttattttataaataatttattttatttaaatatatatataccataattggatgtccggacaatccgtcattaaatattgacataatcaaaaaactaatacgaaaatatttgttcgaatgatattccaaaaagttttgtatgaaaaaaaggttggaacttattataggcgtttcaacttagctatttaatggtttaattattattttttacttcagtgaaaatgttttgaattattcttaaaaattgtacaaattacaagaattcattgttacagtaatgcccacctgttaaagcagtcgttgtacggtataagttcatgacgtcttttttgctgtctgttcctctgtataaattgatgtcttctaaataaaaataattttcttaattaagttgagaaaaaaatgtcttacaaaaatggatgatttggcgaatttccgggcaaattcagctccacctttaatggatgaaattttatttaatttttaaatttattttaatttacatttgcanttgttttttgntggccatccgtcggagcgc

SEQ ID NO: 24206 - DNA, 2307 bp, Heterodera glycines
  unsure (1)..(2307): unsure at all n locations
tttattattttttttattcatttttattaatattgattcttctaaattcttttcgatttatttatttatatctattcaagagaaaattaaaaaaaaatttattttgaatagtatgaattagtttattaatgtttttattttcgcatgtttttttcaacgtgttaatttaaattaggaagtaactgaagtgtccattttcactgggactcagttgtcccagtgttcagatggcatcggttcgactttatttcctgatttttagattaagctcgtcaagagctttcaaatgataccaaatttgtggggattcgatggtttaaaaaaagttagagtgcgaaatctctcaatttttcgagttttgaaccggttcaacaaccggttttttggcatttccgcaactcgagacatatttttccatgcttagctccttgagacgaatcgattggtatatcatttgacccttttttcacggggcgttcactacagttcacccaattttttttataaaaaaaaatatgctatatttattcaattaatttactttcttataaataaacaatctttatttttaatgaataacatttgtttttttcattattttaaaaattttatataggttatataatttaacgttttagtacggatgaaagatttttttcattattttaaaatttataaacttattttttgtattaaatgttaatattcattatcaaaataattatattgtaattaaatcattattttttgatacaatttatagttaatattcggcaataatttaatgttataaaaaacgaaaaattaaaaataatagttttctaaatacaaatattgataatttattcctgaattatttgtaataatagttaattttacattcttgccacaaaacagacgttttgggccgttgggatcctcgatattttttgattatttggttcgaaaattttttattttatttaatattaggtcttcattaagctttaattttttttaaaaacattaaaaatttttaataattttttcaataatatttttcttaaatttttattattttttaattttaatatgtgtttaattaaagtgtcggaaataatatatttttgaaatttttcaaccttgttacggtgctttctcatgcattaactttttttattttctaaatattttatattattctctaattttataaatttgaaacattgagttcgtgtttagattcttttgatttatattttccaattttaataaacttttctttgttaaagtatttactattgtctgttttccttacaaaataatagaaaataaattaaaattttataaatcagggaccgatagaaaccctgacataagtagataaaattaatagatttttcgaattttattcatatgaagtttttattgtatttattagtaatgcaaaaaatttctgttattatttatggtataattttttcagcttagtgtcaaacaattattcatttttattttttactctcatggtctgagaacgacgaacaacattccgatgtgtcattagctgatttcaattatttttatattcaaattgattttaatcattaatattatgcattattaaattatccatttaaaataagaatattttgtgaaacttctgtatttttgaatttatatattaattttcattttgcatatttaatgtgttccacttgcataagattattgataaattttcacttaaaacaaaataatttgtcatcatttaggataaaatgaatttattgaaaattaaaaattaatttttaaaagattatctgtgatttttaggccgctttgtggactcgaacgggcgctttgcgtccttattaaatttatggaattttaaaaaaattatcaaggatttttaggccgcttctcggcctcgaacgcccgtttttaattttttaagcttgtgaggccttttcacggcaatgggcgggcgcttcgagcccatttttaaagaggtacaacagtgagtatcttaaaattagagcttattaatcatacaatttacgataaaacaataaatataatagcaataaaaaattgaaaacttctggttcaatataaaagcgattgtaatatttaattattctttagcaaaaataaaataattttattttataaaaatattaaagtgatatatttgttttgcttgaaaaaagaagaattcgtttttaaatgattcgcattcaaaatttttctcaattttaaacttttatttgttagcgttttttccgagatttctaaangggtgaatgattcaattaattttaaaag

SEQ ID NO: 24207 - DNA, 827 bp, Heterodera glycines
aaattattaggggtttttagtccacatcgaggctcacgacgggcgcttcgcgcccgttttttagcttattagaccgtttcgcggcctcagtcgggcgcttcgcgcccgtttttcaaattttgttagccttggacgagcgcttcgcgcccgtttctaaattttgttgaacttggacgggcgcttcgcgcccgtatttaaatgttgttgagctcatacgaggtacaaaaattgttggaagatgtgttggaagaggtacaacagtgattagaagagtgattaaaaaaggtacaacagtaaatagaagaggtacaacagcgataagaagagtgattaaaagaggtacaacagtgatttgaagaggtacaacagtgaaaaagtgatagaaaagtgattagaagaggtgcaacagtgattagcagaggtacaacagtgattagaagaggtgcaaaagtgattagaagaggtgcaaaagtgattagaagagttataacagtgattagaagaggtgcaaaagtgattagaagaggtgcaaaagtgattagaagagttataacagtgattagaagaggtacaacagtgattaaaagatgtacaacagcgattaaaataaaaagcataaaatgcgccgtattttttctcattttttaattatttgattgtgaaaattcaccctccctaacccgagttacgaatttttgaaaattacaccaaattcccaggggccaaaaaatcctgaattttcaaaaaatttttaaacgaacccaaagtatctgaaactgaaaataaatgtcatatttgttatttgcgaccaaaattagcccagaaaa

SEQ ID NO: 24208 - DNA, 1359 bp, Heterodera glycines
  unsure (1)..(1359): unsure at all n locations
cagctaatcatttgaaatacggtattttcccgtcaaaaaacaaccaaaaaaggcgcatttagcattttcgaaaaaatatngacataacagtgtttaaagcaatcaaattttgcattctttgtaccgttcaatagtccaggtttttgctctcttagcctgcaaaattccaaaaaaatttggtcaattttcggaaaaaattatatttaaattacaataatattttgtttgaaattttgcaggctaatagagaaaaaaatttgggctatcgataatttcaaaaaacaccgtaccccttgaaaaatatagtgccccttaattcatttgaaaaatacggtattttcctgccaaaaaacaaaacaaaccctcgtcgttgcacaaattgccgtcgtcgcattgacggcaccgctgccacccgttcagttccaccgttctgcaaccatcggcagcagctgcagcacaacccttgcggagcacttaatttaacaaaaaaaatttttttacataaataggtcctagctaagccaggattttttttttaattttagattgtttttattagaaatcgaatacgtgccggccggacccgtatacaacggatcttatggatccgtagcccgccaatatgagtttttacggactacgggttttacgagttatttagcccgtaaatccgtaccctgtataggtggtgtgcccagctcgtaacccttacccttatcttttcaatctttaattgcgggtcagggatactgtattgtggaaaaaaaacggttttctttattaataccatataagatttaacttttaattctaaaaaaacccaaaaattgtgccttgtccggtcaatgctgatttaacagtataacattgcccattttggatggcacatttttgcgttgtgtggccaatttggcaattgcatggcccatcacttaaaagatattaaattgaaattattatttaaaatgaattaaaattaaaaaaaaataaaataccatgaaaagcattccaataattgtttttcttgttcgccaaatgaattttgaagaacatttgggaaaaagaagcacaaaatggggaataaaattaatcgcattttaaaatttaactttttattttaattttctaaaaatttgtccgacaaaaaatgaccaaaaaagggcgcaaatatttatgggatggtcatcacaaaatggaggcaattattgtgagaatggctatttttagacgaaaagcgcaacgggaatgagcatatggttttgctttacatacacattcacaaattcaaacaaaaaatctgattaaataaataaaaatggaaataaaatttatgcattttaaaattttaaaaatgaattt

SEQ ID NO: 24209 - DNA, 2253 bp, Heterodera glycines
cagttttaagaaacgggtcagcactcttatattttctattttgaagaagaagcaaatgatttattcttctgctatttgttttggaatatttattttcaaccatttttcaattccgttttcaaatgcaattccatttgtgagttaattaaatgtgacaaaattgtggatgcatttttcttattaaaggcaggaatttataacttttttattaattaatatttcttataaataattttgaaagtgcaataaaacgaaagatacaccactaagaaatggccccaaaaatttcagaaaaatatacccttaagaaattaataattcacataaattcgtctccaaattttttcaatttttagcacctatttcttttttttgggcgttaattatattaatggaaacataagtctggggaaggtattaaaccgattggcgctgtcactcagagaaatcaatgaatgtgcaaatttccaattttccttaataaaaaatatatttataaattcgtaattaaatatataaaaaaatgatttaacttttgcaaaaaaaaagtaagacacaaaaaaaatttaaaaaacaaaaaaatatagcacagcattgaaacccaatgattttaaaattgatttggaactcttttatttttcttatagtttttacccaaaaatgtcaaaatatacgccaaacaaaagtagctgcttctttcggcataattagcagcaaaaaaatatgtaaaaatataaaaatcattgccctaataataattaacattaatttctcgagcccagaaatgttgtagtgcttcaatgagagagcttaatggtttataaaatcttacaggagattttgctctattgtttttttttctttattaattaaaaaatatagtagagaaatcgtttatcgcaatgaaaatgcccttttttctctcctaacatttacctaagcgatcttttctaatgaacgattggccatcctcgctacggtaattggcttcataattgacgcatttgtcatcatcgttgttcaagcaaatttctctaatcacccatttgccatcatcgtcgtcgctacagtaatagaaatctcgattaaaaaaggtataaagcggatccaaaggcggctgcctgcgcaacacttcgactgtcgctgcgcctaacacctaaaataataaacgatcaaatgaattttcattttttattgctagggttgtaattttgtgacttgaaatttctaggaaaagacggatttgtaaaaaaaaagatttataggtggataaagttttggaattttgaagcattgagttagatttatgccaatattttccgcaaagtttcaacatatttttgataaaattgaacagtgtttcttgaaaaactaaaccagacttgcaaaagttaaatttctttaccaaaaaatgatctattggccgcgaaaaagacaataaattaattaaatttccaaatgttctaagcgtaattgaagttttatggcatttctgcctattccgtttttgggctcaaatcttttttaatttttcatttaagtttttttgtaaccattttaagaagtaagtacatttttattacatattttttacgattttcttaaataaaaattacattccaagttatatatatatataacccttttaagaaagcaacattatttaggagaaaaataatagtgtgtttagaagctgttcaatagctatttataagcgattgaagaacttataaaaaatctgcaacatgaatacttcacaaaagacagaattttttcatgtttttacttataactattttacatgtcggtatatctttgtgttttttggaaaggcaatagagcttatggttaagagctttcgaatgataccaagtttgttggatttggtcaacaaagaaaaaagttatgatgctctaaacttgtcgcagactaaatctgccagactaaactttccgagtccgacaaatattagcccttaacattgggccaaaggataaaatggtcgtttaaataatttactttttaataattacattttatacctcattcccatctttgaaagtaatcatgccggcgtccaatccctcccaatgattaacattcatcttcacaaattgccatgtttcattgttaaatgcgtctgactgtgttgtagccgaacacaattcagcattgttctgatcaaatcctttaactgtgaacggatcagcatcatgttgaaaactactgtcacaatttggattttgagatttt

SEQ ID NO: 24210 - DNA, 2216 bp, Heterodera glycines
  unsure (1)..(2216): unsure at all n locations
tcaaatcattcaagtgaaaaattttttccttcaatcatctttantaattatacaatataaaaattaatcttaaatacaattagtgggggttctttgtgtgtttgttatagatatcagtctgcatcatattgtactttacgcaccccggacacatcacttgggtaaagtgaacntcatcttcccccatcaacttgaactggtccttatgcttgtagttgattcgacgacaccctgggcagagaaagttgatcactgcaaactttggccgggccaatttccaaaaggatcgttgatgatcaagcaaattataaatggtttgggttggtttacgttcactcttttccgaatcattctcttttaggggtttcacactactttttatttctgcgtcttgttgaattacttgctccactacagattggagagtcttctttgaagaatttgaagacattataatttaccagattgaattacaaaaccctgactatttttctccttaaatacctttttattttgacctttaatattagtaatgacacattttttcaattttatttctgaataaacatttaaatgaaaaatacaaatgtaaaattgaggatagaaaaatgataaaaagaaagtatgcaactcttttaatagatttgaaggcatatcagaattcttagagttcccttaaatgtgagaaagcacacccagggaacggcttcacccttcggtccccaatccaacactcactcaccaggctgcgcattacaataatgaacagctcgtccaccttcatctcagatggatggcctggagtgttggagaggatcaaccaggggtcattccgtcccaacatgggttttataaatatagagagaagggaacaataagaaaactaatatacacagaaaaatttaattgagagtgcatgcttacttattttcgataaccaaattcgaggacttggaatgaatcattaataataccttttgtgaatatgggttgataatgctttgtgagggaatgagtaaacactttgccttggataagattaggacgaataaaatggggatatgtaacaattatggggtcagcggggtcatcggaaccataacgtaaaatttgctcttttactgtgtcgtagtgtattttttgtacagtctgttcgtcgagagtgaaccctcttattttcaagtcgaagcaaatttcaccattgtctttccgttgaagtttcagcccgtagtttttgcagccagcactgatgaattccaaaatgtcgtggtctggcttttcgtccgtcagctcaccgaggtgtccctttcctgttgggagtgggtcgttgtcctcgggatgaacgtagatgatgctgtccgtgtcaaagtagagaatttcacatccgggagtgtcggccacttttttcagagcttcgtagaggtagagacgcgccattgatgttgtgaagagggagatgactacattggagtacttattttcgtcgacaaactcctcctttggtttgtaagtgagcatgaatacgtcgttgtcctcatccatcatttccaagtcgattagctcaatctttttgtcttcggtatactgatgaataaggctttcgtcgttgtcaattattgcttttgagagaaggttccgcatggagaagcggccccagagtgagttgaggcagagcttggcgatgtagcgcttcccaggctccgacttcatcttttctttgtcaagtttaattgcaaatttcccccagcactcctcaatgtattcactcttctgctcttcgctctcgcaccatgacgggaagccagtggcgtggatttttagggccatcatttcactcacgtaggacttgaagacattgttactccactggtcgtattggaggatgtggaagactttgcgggcggtgtaaccggcctccagtgctgcatttaattcaagatgggtgcaggttgacacgaaggcgcggtcgttggggttgaagtgggggcaggagtattcgttatccttgaggccattgggatattttggcggtgatgtgtttggcgcacttctcacagagagggaagagaaggcgctcatcaaatttgattggcataacagtgacgtttatgttgttgtttggaggtagaagcaacactttgagaagtccttatgtaggggttgtcggatggagagcgccagatgaccggatgctgatttactgtaaaactgatgat

SEQ ID NO: 24211 - DNA, 1681 bp, Heterodera glycines
atcacctcggcaaataatcttcagtagtgatcactgaagaattgaccagctgagagtattcgatggagtgcaaatcgcccaataaatcggcgccccctccggcgttgtccgtctccgtcccgctgttgcttctggcggtgctgctgctagcgccatttccctcctccctttgtgccgtcccctctgatgccaatgtttgtctgctcctcctccgccgtggcgtttttaaagttgtcgccggcttttctcccgcggctttttgtggtttcgctttttggggtggcgaatgaattgtgagcagtccgttggcgttgttggaggaggcggtggaagcaatcggttgggaggggaaggcggagacggaagagcacagcaaagacggagtggaggaggaggaacagcctgaggaagacgacgaggaggacgaagcggtggacacgctcaacgcctcgcaattctccaagctaatggcggtggaggcaagctgagacacaatctgcgaaaatgggggaagggattagcgaaagaattcagggccaagccaaaagcggatacaatgccattttcagcggtaataccaatgccaaataccaattaagcactcccccgccccactcacctgttgtggcgacgattgtgccatttcgaatgctaaagtggacgttgtctttgtcggcaattgcaccaatgaccgcatcagctgctgctgttggcttacctggccatcgttttttccgttttttggccttggcaaaatcggcggcattccgttggaagtgccggaggcaaaaatttgctgcggccgtcgagctactccatttgatgttatcgaattggtgttgaacaatgcggagccgcatcgggaaaatactgctcgaccatccttgacaggcagtccctttttggtgccgttgtctgaagaaggggacgacgaagacgaagttggcacaatttgaatggtggacggacctgcggtgagcgcggcgattggcaatacgccggggggaggagccgactgaaagcattgggggaaatgacgacatgacaaaatggcatcacaactgtgccgggatcattcctttcttttgcctccccccattaattccaattcatccatcaatcattccctttttcccttgattttcctcatttgccttcgcttcgctcattccatttttatgcccaaatgtttgctaattccgtgccatttccaacctttcgtcctctctgtcaccacaattctcatcggcttaacagctttgtgccaccaaaaatgggctgtgtgtgtgctagctgcttacttttttcgccacttccttccccgcaggcgcttctcccccccccccccggcgaatgttacattatgccattcactcaaacgcaatttggcccttttcccacccgtccaaatgagtcggcaccagagaagcgaatgccactttccctttacactttggccctcctatttagctggtctccacctcatcagtcccctcggccaattggtaatatggccaaggctgtgaaggctctctctctctgtctctcaaattgcgactgccgtcgtacgcttttcatcctctggagggactcccccggggggacccccccccccgctttattgttgacagcctccgcttctattattcgaccccataaacatttaccgccgcttattaac

SEQ ID NO: 24212 - DNA, 1378 bp, Heterodera glycines
  unsure (1)..(1378): unsure at all n locations
caaattttaattaaaaaaaaattcataaattttttgaccaactgtttagggtatttgaatggtccaatgcaaggctgattactgtgtatgcgttgacccatccaccnggtaaattcacattntcataaatttttaaatttaaaatcgtaaattgttaattgtatacttaatgttagagtttattcattttaaataattgtaattaatctgtttttaggtaattaattattcatttttatcaggtgccgaagcgaccgcaaccaaaacgacgtcaaacaaaatccggcctcagtgtggccgttgccattttcagctttcccgttattaccgggagtccaagaatttcattttccgcccaatttgcgatgccaaaacaggtgaacaacgcaacattttaacatcttaattttttttttgtatttcaatggatatagaaagtgatccaagtcattaaataaaaatatgaattaattagtctaattatttaattagttggaagcccaaatcaattatttttatatcttttttgtcaacttttccatcacctttttaggcaactatcagcctcagcagtgtcgggatgagaaacattgtaaaaattttaataacctttttttatagcttttaaattcccaggcttctgcgttaattacctaactggagtacggcaaaacaaaaaggaagtgccaaccaacgaaattttgcattgtgaaggcggccaagtcgatttttccatcgatgatagccatgtgaacaaattatattaaaaaaaatgatcattaattcaacagcaaaaattaaaaaatccacaaaaaaaaattgtcaattaaattaaattaatatttggtttaattaattattgaattttggtaatgtatttcacattaaagatcattaaatcggagaaaggtgagggagaaaaaggcgacgaggagctgatcccgatcggatcgccggtctgcaagaagccgagagatgcgggccacagatgccatggccgagctggcggaccaatcgcggccaaaaaccttaaggtacttactgtaagaaagctaatcaaagggaataaatactgtacaaattttattctagattattatatgtgatagattattagtaactttaacttaagagagagggcgagagaatgagagaaaaaggtgagagaggaaagagagagagaaaaagagacagaacaaagtaaaagagaaagtaaaaataactttatttaacaatttaaaaattatatattttcagtggtattttgacacggagacttttgaatgtttggcattttcgtacaacggctgtggcggcaacggaaatcatttcgactcgcccgcagattgttgngacaaatgcaaacttggtaaagctg

SEQ ID NO: 24213 - DNA, 2145 bp, Heterodera glycines
atacttttttacggtcacgctcaatgatgtaatcttcaaattgggttggcactttggagagaccgtcgacatcgagaaattcttggatctaaagacaaggaatagcaaacaatgccgaaatgactcatcgccaatatgggcacaaccttctcttcgagggatgagattgacccggttgagcagctgccgctcaatttggacgtcagtgcggcagaagcagtggccccgttggacagagacaagttcatataagtggtggcaccactaaataaaaagtggaaaatcaaatcacagaacaagggcatgtttcacgggcgaaaatcgttatagaaaagtttgctgacccacccatgcgacgcgtggactgatgacgggccgttctgctccagcgagtggagacttgcggccgactgagagcgcgacaaagtgttgtttgtcttctcagaagagatgtcctgtgtgctgcaggtgccgttgttgtggtgaagggacagtgagtcgtcggagttgtttatgcgcgactgtgtgggcgtacagcaataggcgtcccgccacggctccaactcctggatgagtttcgggtagcgcaacagcgacgacctcttcttcttgttgtaggccgggttttcgaatcttaatccgagtttcggttttttccatgttcaaaaactcagacggactctgcgttatgagcgcccaaatattgccaaacttggtagcactgttgcggcttcgcctcttcgtcagtgtccacgtttactcctccatgttcagccgcttctttcaaagaattgaatataaacgtgccgaagagaccggagaaagtgtgttgtacaagtttcatctgccaaatgagagccataaaagggataaaaaagcaacacaaaacaacaaccagatatcgtcggttgaattggaattggtccgggtttttggtccacaactgatagacacaatccagaaattgcaagaaaactggcgatttctcattgtcgtcgccattcaaaacgccgcctctgtccgagaatttatgtccaaactcaacccattggcgttgaacaagcatttcaaagctaaatttggaagaaaatactaagataaatacaatatttaagaagccagttcaattaaattgctgttcccgtctttaaaagtgtttaaaaaggcattacccttcgaaagtccgataaaaagggtcagcgataatcatacacaacgaaacaatttgcgtcgttcggtcccaaccgtcggaacaatggacaagcacagaaacgcctaaacgaatgcaacataatttcaaacatcgctcatagaaattagaaaagaaaatgtcaccttcctgcagcagcgaatgcaaacaccgctccgtcgcagaaaacaattggcaaatgtactgcagccaaagggtcgactgcaaactttggaagtaattgttcgggtcgcccccgcaagcgttcatcaaagagcgcaattggtagaaactgtagcgaatgttgtgaatgttggccaggcccatgaagacgacttcggcattggcataggaatctgaaaacagtgggaactttagacggaaaaagacattttcaatataaaaacggtggctttaatttaaaaaagtgaccagctccttcaaagcctccgccttttgcacggttagcccacgccgcggtgtacgaacgagcatcgacaatcagaaatttcatattgacatctgaaaaaatagaaaattaagagaccgtaaaatggaaaagggaccatttgaaatggccgctcgaatcctctcgtagagatgcatgtctttgctttaaattaaaagtatataaaaaagggaaaataaatgtactcgttggacatcccgaaaaaaccaatggacggttggctgcttctgagcagaactgcgccattctttggacaacgccacaccaaagtgggaaagcggtaataaattctgccaagtcgcatttgcttcagttcatcgtcagacacagaagcgggaacaatcaaatattgagggtatgacgaacagattctcaagtgaaaatgcaaaaaatatcgaggcatttgttaattggacttactcaaatcgtttgttagccgacgaaattttccacgtgttgaaattttgagacgactaaacaaaagtaa

SEQ ID NO: 24214 - DNA, 1027 bp, Heterodera glycines
  unsure (1)..(1027): unsure at all n locations
ggggggggtccccccaaaaaaaaaaaaatgattttttcaagtttccgttgggggtactcaaacanttatggggagctaaaatccagcgcagaattaaagtacagcntataggaagctattccgaaggattcggtctccccataaatctgggcgcatcgttcggggagactgccccgaaaacaaaaaaatcgattttttcaagtgtccgtttggggtactcaaacaattatggggagcaaaaatccaacgcagaattaaagtacaggctatagggaagctattcccgaaggattcggtctccccataaatctgggcgcatcggttcggggggaatgccccgaaaacaaaaaaaatcgattttttcaagtgtccgtttggggtactcaaacaattatggggagcaaaaatccaacgcagaattaaagtacaggctatagggaagctactcccgaaggattcggtctccccataaatctgggcgcatcggttcggggggactgccccgaaaacaaaaaaatcgattttttcaagtgtccgtttggggtactcaaacaattatggggagcaaaaatccaacgcagaattaaagtacaggctatagggaagctactcccgaaggattcggtctccccataaatctgggcgcatcggttcggggggactgccccgaaaacaaaaaaatcgattttttcaagtgtccgtttggggtactcaaacaattatggggagcaaaaatccaacgcagaattaaagtacaggctatagggaagctattcccgaaggattcggtctccccataaatctgggcgcatcggttcggggggactgccccgaaaacaaaaataaatcgattttttcaagtgtccgtttggggtactcaaacaattatggggagcaaaaatccaacgcagaattaaagtacaggctatagggaagctattcccgaaggattcggtctccccataaatctgggcgcatcggttcgaggggaatgccccgaaaacaaaaaaaatcgattttttcaagt

SEQ ID NO: 24215 - DNA, 1635 bp, Heterodera glycines
  unsure (1)..(1635): unsure at all n locations
ccgcttggatttgcctttgtctccgttcgttcgtttcttttcccctttttcctttttccccccttttttccttttttccattttcccatttgattcctttcagtgccattctcctttcgctgcccactcattgtcaaaactttctccttcatttgacggtgtacgaactttgcgaggaacaaatgccaaaaagtgcggcaaactttgggcacccccaggcgatgcttttgcattttccgcctgaattttgtgtgcgtcttctgctgttaattgaggacgacaaaatcttcagaaaaatgttgaacagactcactcaaaaaagcatcggccatttgattggccaagtgagtacggcactcgcctcagccgacgatcaccaaacggtgcctttcacaaagccttcctcgtaaatgtgctttttatcctcttaggcttcggttttgccaaggctttttgtccttatggctaaatcggaagacccggcacatttggagcgggcgagtcgaatgatggaagtgggccaaagccattggaaggcacttttaaaaggcgaagaattggtaagtgtgaagctaatcatttgccaaacattgcctaaagcaatgccaatttcaatttttcagtccgttcgaaagtgccgccaaaggccaaccgcaaaaagcttctcccaattgtcctccgacagtctcaacacttctcagttttatcaactcattgcgaaacatttctgtgaagggtttccccagcaaatctgcttggaggtgaattactcggacgaggactacctgatggagggtgccaacgactacgtggacacgtactttgacgacggcgacggatacgacgacgaaacaaacgcattggaggaggagggcacatactgacgggggggggggggggaagagacgaaaaatgatcaatcaaagagggaagaataaaggaacaattgaattaggtgtgacgaactgcaaatgatacgttaccatttgactttggtctttgccaagatactttaaaaatcattgtttgccaatcaattttaattgcaattagcggaaatgcatttgtacgtttggcctggcgaatttggtctgccatccgttgacatcgaatgtcatcaatttatggtaggcgattagcggatgaattaacagttttgatggctgatcccctgctaattgtatttttaccctttgaggcggctgccaaattctgtgctgctccgatcgcttttcacgcgtcgactcagccgtggaaatcgccaaagggtaaaaataatcaaaaataacaatcaaaacaaatgcttaacgaatacaccgctccaggggagttgccatttttcaataacaacggggaggagcaaataacggactttggcgagttcgtggnntttctgcgctccagtcgtctggncgtcgtgttggncnncgttttggtgccgagccnnttgtgcgagttcgnggcgtnctnttgcttnctnnncctgnnnctgctgcctgccctggtnncgnngnggngnctgtgntcttttnntnngggnttttttgtntgctttttngnnccttttnttttgggtcgncnnntgctnttncggcncnnttgtgcnccctctctntgccctnctggtcnccttcc

SEQ ID NO: 24216 - DNA, 1793 bp, Heterodera glycines
  unsure (1)..(1793): unsure at all n locations
atgagacggaggacaaccgggtgccatcgttgtcattttcatccctcccgccgcaaggagctaatcaccaaaaccagtcatggaatctcttggaaagaccgatacaacattgtacaaccgtagtcggcccgtaatgttgccaaggggggcgggggggggcatttcccggcgattgggtgatcgtggtgaccaccgatcacgatcaccacagcattagtagtagcagatacagttagttacgcaatatcggaaagtcattctgtatgccagtctaacaaaaagtccgtccattcgtcgtcgatcactttgaaatggctgcttaactaacccacccggcaattgggaatggattcgtgcagcagcagcatcagcagagcagcaacttgttaaaactgaaaacggactccccaccccccgggggttatttgtgtttgtattcaattcgtcgagtctgccggtgtccagcagccaattcgagacgaaatgatgctccagctgttgtcgcatttgttcagagtccggcatcgtcttccaaagttgctcaagtcgccgccacacggaatgcagtgcctcatctcctgaaaaatcacaacttttaaaattgaacccccaaaaatgatatggtcccaccctgctcatccaaaaggcccaaaaatccgtgttggcgcgcaaacggaacaaagtggtgaagcagcaaatgggcctttgtcttttttgaaagaagcgttcgcaccattggttgttcgtcgagaaatgccttgaactggtaaactgccgtctccagtccatccaagctctttcaacgcctttttgcggtaaatagtaccgatggtatcacaccttttttgaaatttttttagaaaatttcaaaagtcataaaaatatttgttataaggttttcggggtcgctgagcacgaatatggcatccatttcacccaattccgaacccctgatccgaattcgaacaaaaatcgaaaactcaaatttttcgaaattcacatttatccaacaaaatcgctccaaacgcacgaaaaaagaaaaaaaacaaaaaaaattcaatgttcgcatggataaaactcagagacatgcagccaaaaattataaaaaacattttcacgatcaccgaaacgctgacgccaaattctgggaagtaggtgtcgtaagtttcagtcttgttcccaaattgctgtttgaaattcctcttcaattttttccacatggattcaacattttgggtatgggcaagacgatttgcgggattcacaaagttttgtgaatggttcacggtccaatgcacatagttttgcggaaggttcgggattccgcggtacggacgccattcatcgctgacaatcgttgtgccaggaagtatatattgctgaattagaggaagaaggcgagccgcaccacgggattctacaggaaccatgaaaacgcgctcccaatttgagtcgcgctcaacaccgccgaacagccagacttcttgtttctccaagacccggccaaccccgtacttccttttgacaactaatgtttcgtcaatttcgacgacgcggcctacaaaaaaaaatccataggaaaacatctcaatgatgaccttggcctccaatggcaattggctggcggacaaaaaactcagaacatatctcacgagaaaaactaaaccagtcgacgacacaatttctgttatgtccagtctcctgctggatgtccgaaatggttccatatttccgcgcccaaaaataagttaattccaaaacttgtttggttgacaattttgaccctnagtaca

SEQ ID NO: 24217 - DNA, 1769 bp, Heterodera glycines
ttaagtcactggctgacgtaaacgatcagtgttttggatggccgatcgaagcaactgacggtgcaatgaaattttccttcggttgaaaatgcggtgccattgcagttgcgggtttcgatgtgttggagagagtttgggttgacccaatttgatccacgttttgaagctgatgactgttgcttgggctccactgtctccattcatcttcaaatttgtgccattgatcgtgaccgggatcttccaccatcggccttgggttgtgccaatcaccatgcattgtgacttggccacgaccgtgtgaaatgatcggttctgaaatttgtgtgccgtgttggacgagcgctgacggcagacaatcgcaatgtggccttgccggttgcatttgttgcaaaatgcgttggcaaatttgcagtccgatcgccagtgatcgttgcttccgcatgatgcgcatggatgcgatggatggcctcggtttgctttgtcgtccgatttttgcttaggcgaaggcgcatgatgtggcgatttgggtgccggttcatgatgtggccatttgggtcccggttttgccttatgtttgcctttgctggtctctcgccattgctgaggtcgcaattggatggcgctggttgagaccggttgagtaagcagagaaagggcactttctttaacgatttgaatcgccttcaactcctcttccactttttggagagtgatgtccgtgcctgtcttttctgcgtcctccagcattttgagacacttttgcctcaggtcgtggtgctcgtcgttgagtgcaatgaccaggattatgcactttagctgttctttggtcggactcaaattggcattttcacaggacgcgttgatgtgtgcgaccagcgatgagatgtcctggcttggctgctgacgaattttgaaacattcgtagcgccggacgaataatgatcgcgtttcggcatataatcctttgagcttggtgatcgagtccacccaattgactttgtcgggctgggtcggactgatgctgtcgcggtatttgccgtactcctcgtcgccgagtttgccaaggaggagtctgactttggtcgactcggggaggtccttaccatcctcttcaatcagaactccaaaccttttgaaccactgttcgaaagtgttcccggtttcggcgtcataattgaattttgaaattcggccgtcgatggaactcgccaaatttgcgtggttaagactcgtggcgttttgtggtgcttggcccattagcagttgaatggcatccgattgcacacgcatggcctcgaggagttgcttaatttggtccgcgctcatgccgaagtgtttgccggtgccgaatttgagagtccaaagttgaaaaaccgcgtattgcggaaccgcaacctttctcaggtcttttggtttttcggcgaattaactgcaatatatgcagacctcacccgcctagggactattggttttgtcgatggcgaaaaactgcagaatttgcagacctcacccgtctagggactattggttttgttggtgtgcagtccgggtgtcttcttgttggttgaagacgactgctgactgcgccaaatttgttgtgtcttttgtccgagtgagaaagaccaacaaataaaataatttatttacgaagagtcaaataacaataaaataataaaaaatggcgaatggttggtggagagaataatgaataaaaataataaatagaaaacgggagaagaagtgaacatggggggaagagtccacgcctt

SEQ ID NO: 24218 - DNA, 1447 bp, Heterodera glycines
aaattttatttgcttttttattttggcagtttaattttcttttttggaagcctgtaaaattgtaaattttagattaaaaaaacttagaccaattcaattaaaatcaaaaaattggggcttgaaactccaccatttcccagctgacctacacggggttcttgcacttgaataaaacaaaacacttgttcatataaataaaatagaaatttcactcattaaattttaaattaattcgatttattatagctttttgctcaaagcaatttttttaaattatttttttgttgtgtttaaattttctcatagaagttttatcggtgtcctaattattctgttaattacccttaattagcaaatctcttcaccgtcatcatcgcgcccaaaacagtcattggagcatgcttatcgtcaacagtaccaacaaccggaatcatttagcacagaaacatcaaatgatgatgcacaatatgagcataaggacgagcagcagattgggaattcagcagggtaatgaaaatgaaaattaatttttaattatttaataataaattttgcatatttattgtgacggtttggtagccactttgtttacttggtttgtgcaaaatttagaaatttttggcatttctgctgaaagaaatggtggccatttactggataaataatatattaaaaataaaatattatttcggtataaaatggaattttttataaaatggaattttaaaaatattttaattttaactctcttttaagcctcaattttagcgtgtatgacacaaatctcgagtataacatgacacgcgttttgaacgcattaattgccagccatgatcggcgaattcggccggattttggcggtaatttatccgggtcataattaattattttaataataagccattaatactgtagtttaattatcatttaactttatttttagtatcattttatatttattttaatatttattaaggtgcaccaacaattgtgaatgtgactgcacatgttatcacaattagtgcaatttctgaagtttcaatggtaaatatgtacaaaaaataagaaaaataattattaattaatttaatgaattataaaagagaaaaggcacattaaagggaaaattcgaaaatattttaaaagagcattattttctcaacaaaattatattgcatttagcaggttcttcggagctcccttactaacggaatttccaaaattttttgcaaaaaattctcagaaatttcaattttttattgtttattttgcataatctacaaaaaaaaaagttttttaaatttttccggaagcgcctcatacgcttttaatcgaaaaaaatgaataccttgattatatttcatttttttaaatatcctttttttgcggggctttattaattcttatcactcattaaggattacacggtcgattttatttgcgtcaa

SEQ ID NO: 24219 - DNA, 1498 bp, Heterodera glycines
  unsure (1)..(1498): unsure at all n locations
ggcaaaaccagtgattagaagagtacaaaaagatatttagtagggtacaaaaattgtaggaaaggtacaataaatagtttaaaagggtaaaatatggtttcaaaaattaaataaataaggaaatggttttataaaaaaatataattaaaaattgaatgtgttaataattttttaaaaattataaaataaattccttcttttatttaaaaataaataagaaattaattttatattaaaacattttaattaacaaacaatattaaatttaattaaaataaataaataattaattttaaaacaaaacatttatttataaaaaaaatttaattcaaataaaaaatgtaatttattattaataaaataaaaaatattttaaatgaataaaacaatgaaaaacactaaaaaaaatggtagctattaattaaaaacaacgttggaaattattaattgaatattcatttaatttgaaattaaattattttttttacaaattcaaaaaataaataatgaaattctttaataaaaaaaataaataaatttaaatattttataaaaaatatttgaaattaataaaacatgtaaaagtaatcaaaaatgcacagaaaaataatgtacaccgatcggatccgaacttcgcccccccccctcaaaatgatgcctcagaatccccaatcacacagggattctgagggcttaacgatgtcaaaagtaaaaactgattatgtattcatgatcagcggcgcaaattacccctaatgacatgtttttggaagatttttgtgaaaaaattttttcaatcaaaaatcctgtccaccccctttggtcccgaatgccaaaatcacttttatttttgtatctttttttaaaaatgtgataaaaatgtaaaataaaatttataaaatagagctaaaaattgcggatttttgtagcattttacttttcctgaatatcttttcagaagcgagttataaatttttttctgaaaatccgaatttttccagaatttctggaataacttttttcatatttatgatacaaaagccaaataaaacccataaaattctcctgatttttctccatttttaatgctttatttaatctaaattggtcaacccttcgatttgttatgaattttcaaatattaggccaaaatcccgagggccaaaaaattgccaaaaaataaagaatttttaaaaaattccaaaaattatgaaacttaaaaaaaacatcatattcgtattcagcacctcaaaatagcccagaaaaaaaattttcacccccattttggcccacaaaaaaaatttcgaaaatttctagggggcctagctcgaaaatttttgaaattttccagacttatagtacaccattcgatagagtttcgaaagctctacaaaaatgttctaagacaatttttcgctaaaatcaactcctgacgangtatgggccccgggactcaatgtcccgctcaggccaaaatttttttctatttcccggaaaa

SEQ ID NO: 24220 - DNA, 1555 bp, Heterodera glycines
  unsure (1)..(1555): unsure at all n locations
atttatacaaacaaatgtattcggagtattttccgactttcaaagagcgaaattaccagccatgttcatttacttctattttcggactttcgagttggtccggacttttctaccgaaaattatgggccgaggtattattataaatcaaacaagccaattgtacgtttaagaagaatctactttatatttaataagatgcttgctttggatgtgcaccaaacttttgaaacggagggaaatgcagtcactgcggaccgattgaaggcggaatggcttaaccacggggcaacggaactgcaaagcgaactcttcaggagatttcaggttaatcaatcagaaaatatgcattttaaactcaaattctttagggccgcgaaccaaatatgggaggaatttgcgacttttatgaccctgagccttttgaggaaaggacagagcagaaaatagattgaacagattgaatcacttgctattctgaatttatcatttcgtttttgttattttgaaccctctgtatttgaaaggtaaaccgaatgatgcacaccaatttttttttaattggaatccggcggaagagaaattcaaaagccaccggtcgcgatacattaactaaggtccctttcgaagtgacaacattacagcttaagcaggctcaaagtgtgcctttccctcccccgttgaaaatcgctttaattattttgaccatcgttttaataaaatgcaaatgaaaacgaattaatttcatgctccagcacacaacaacagagagatcttcgcccgtcctcgtcattggattgtttggatcagcgtaatgttatcgcccttgagtaaaatgcggcccaacttgtgacggttcaacgatttgagttggacctcctccgcctcgtcaatgaccacgttcatatactcgtcaaaccctaaaccaacgaaaagcgattaaacaacaaaacagttttttttgttaccgataatataaccctcaatgcgcgaagaagcgttttcataaagccaaatttgaatgcgcgaacgactttggagacagcgaaagatgaggttgatcggctggaccatcaccttttgcactttgtttgtcggtggagccatttttgtaagtagcaaatataatttaagctgaatttatgaattaaaatcgatcactaccatttgtttattctgaaggatggcttcgatatttgtgagtttagcctcatttgggaaaaagcattactaattcagacaaacacaaattgtggtcaaatttaaaatatatgtacttggaaaagggtgtaccgatttttctgcaaaatgctaaacttgtgcttctaaattgatgcctgcctctaaatccgggtcgcagccgggggaatcccgtaaaccggggtaatactggccantctgcgctccacccaaaaaaattattttaatgctgtgaaaagttcaacccgggggtttccggagcttctgatcacgaatatgatatcagatttgtaaaaaatcattgatttttatcctgattttgaaaatattatatgtttcgaaattttgaccaagatga

SEQ ID NO: 24221 - DNA, 815 bp, Heterodera glycines
aaataaataataatttttttagcatttttagtgccaaattttttaaaaatagtgaaacattgccaattattcccgagagtgggtttgaaccgaaggacagtcagagcaacatagcgataaaatattttgaatggattatgcatcgggacggtgtgaaagcaagacatgccggaaatgggggagaaatatctatttttggtgacaaaaaattaaaaattgattgtataattggggcacaaaaaagaatcattgaatttcaggtgggaaaattttaaattttaaaaaatatttagcatttaggggtgcgcttttcacgggtgtaatacatgttataaaggttatatgatacaagcaaatggatttacggcggaacaaaattatgataggactcaacgaaaaatggaaaaattaagaattgcggggaaaaagatgagatatactgtagaggaagtttgggtaggtgtataaatacattttggtcaaaaaaatctaattttaggaatgtgatgtaagaaaaatgttttataaaaagagtgcattttatgacacgcaaatggtcaaattttttaacaccttactcgtaaataggacctattaacccaaggaaaggttttgcggttggtcgtaccggatggtttaatcgtcgattttctatactaacgagaaattttagccccttatggctatttgctgaagcttctgagaacatggaaattactgatttttgatatagccagtctttacccttgggtgaattattccaccccctatcagattggaatccctcaaatagtcattccaaaaccatatatagt

SEQ ID NO: 24222 - DNA, 848 bp, Heterodera glycines
  unsure (1)..(848): unsure at all n locations
tttgcaaaaaggacgnagtatattaaggagcataaatgctcaaaacgttatgatantcaatatggtaataaaataaaaatttatgngagaataaataattatttaggaccaccgcacccagcgcggcttaaattactcatacatggaacaaataaacaattcagaaaattgtaaattaatttacaaggatacaggtggaccaaaaaaataaaacatttttaaacataatttttagacagtgtgttttttatacatcccaaaggatcaggtccattaaggaactttttagggtatgaaaacaacccaaaatccttttaatttccaattttagtgaaatgtcaaaagaatatgcggactcagaaatcttagaagttgtctgtgcgggtaattaataaaaacgaaataaaaataaatgttagttttaggacctaaacaatacgctttaaaattgaaaaacaaaaatggagaactttggtataagacaaaaattagagggatgacacagaataagaacaataaaattgattacgaagaatttaaggacatggttttaaattatcaggaggaaaagaaaatactgtttaaacatccaaataaattcgggtatttttactaatttttttagaaaataaacaatttctttagaccaacgagagaaggttatgtgataagtcgtaacgttacaaaggattataggccgattcaaaagaaggggttagtttgacagtttttattaacgaaataatatataaatttaggattattttgaacgatgaaaatttaagtgttttgccttttggttgttggtgattttttttttgaataaattttttaaaatgttgtctttt

SEQ ID NO: 24223 - DNA, 531 bp, Heterodera glycines
  unsure (1)..(531): unsure at all n locations
tttattatttattntggaattttatatatatcaatttatattttttgggacaagaaaaagaagaatatttcatgactgagtacagatctaaaacttttaatttctcagcgtaatcataaaaatcacaattttttttggcgctttttcaaccagatttttatttaaaaagaaagaaaaaacttttaaaatgatcattttcaaattttcaaaaatgaatcaaataaaaaattgcggcaatttttgatttaaaattttagtgtttaaactttcccccattagtctccctcaattgacccctttttgtcccccattccccccactccctcctcacccattaacacgctctttctgttaaagatatctcccctctccccaagcacaagtgcactcacaatgcacccaaaataatcaaatccataatccccccccccccctttcccattaatgtcaattggatgagcaaaattatttagcaaaatttactaattataacccccanccttttgcaggtatgaacggctcaaaatctga

SEQ ID NO: 24224 - DNA, 2221 bp, Heterodera glycines
taaatcttttacctttcaaaatagaaacaaaataaattactaacaccattgcttttgatgaattatataatgggagagtaaaaaaaatactattgaaagtgacaataaataaataatttaattaaattaaaatctgaattattttaaatataacttggcgtattgtacgataaagaactaaaaatgataaacattacaatagttttccattttataaaatacataaattagttttgttatttattttgttaaaaaaagctggtaaaataatttaatctaaaaactttatttaatattattatatatgtgaactaatacaattcaaataaattattttaaacaattatacaaattgcaagtgcaaaatggaataaactccataatgttttatcgattaaatataatttatatttaactaataaaagaattttaatttgactcgcaattgttgtgtgaattcttttaataaaaaatacaataatatttacttttcaatgaaaaatagaacatttttatttatgtaaatggcaaccacatgaaaccaaccctggcctactctacagaacaagaaaaaaagaaatttataaaataaactgactgaaatgtcaaatatcgttaaaatatttaaaaaatttaatttctaagaaataataattttttttcaaaagaaatttataataaaaaattgataaaaaataaaatcacagaataaagtttaaaaaattacagctcaaattttaaagttccgtctaataaattgatcaaattctcgttggtgtgtattaagtttaacgttttggttctttttctgacttttggtgccttttttcatactttttgctaataaaaaaaaagttaatgtaaattttcgctttaggccaaatttttgatataatgccagaaaataaatttgaaataatatactcttttacttgttaaatggccttatataatataaaaggaattttttttacaattcacacccaaaggaagaaaaaataggaaaagtaaataattttataaataatattaaataatttatgttaaaaaatgaaatttattttggaaaaatcattaattattcaatataaataatttaataaaaattgaattaatttcggatagtttaacatttcctaaaaaacttttaatcaagaggttggattaaacacaaaatatgcctgaccacaagaatcgaaacgatgatgcgacatttgaatgaataaatgacaaaatatagaatttagtaaactaattaacaacataaataatgatgcaattagaagttgattattgattaactttttataattaattgtaattattcaataaaatatctcataaaaaataccaaatttgttaatcaaattaacataaaattaatatttatatatttttaaaaaagcgaaatataaaattttcaaaatttacgttgaaaatggcaaatattagaagattaaacagaaaacaaatacaataaaatattgctaatttatttgttattgggacactataaaaagaatttactagaaattattgaaaacatttaaaaacactaaaatataatattaaaattttaaaatgaaataaaaaaatcgaagaaaagaaagaagcaacgataaaaaacattaatgaaataatgtagagttaagccccgagccctcggggggcgacatgtcgggggtcgggtcggggggagctcaattgtcgggggtcggggacccctatcgggtagtgatcaacaaaattttttaacgaaaaactcaatttttatttttaaatgctcgtaaaacttcctttttcactttaatcatctgatttcgttagcgccaacaagagtgcgttatttataagaatgttctgattttggggtagcgacgaaaattgttcagatttcttaaatatatttataattttgaaattttatggcataatgtcattaagcagggttcgtaaatgtccgtattccttctttctaagatttttcatattttcaggcttcatctaaacttttcaaattttttctgattaatgttttatttcgctggtttttgagaaaaaaaactttaaaatggccatttttatgtaaaaaatgctaccaaaaactcccaattttcaatttttttacggcggcacctatcggcaccgccagtccgcaaaattgttcttaaaaattttctcacaaagcgcgcaaaaattgtcatttgggaaaatctgtggg

SEQ ID NO: 24225 - DNA, 1177 bp, Heterodera glycines
  unsure (1)..(1177): unsure at all n locations
gggggaataggaaaatggggaaataggaaaaaattttttggaaaacggaaaggaaaattctggaaattaatcgatgaatgaacaaaccgcccggtgaccagcccaacgtcgccaaaatggagacggaaatcgcgaaacttctggttggacaacgctttgattggcgaagtgtaaatgactctaaaaattttgaaattattggagaggggcgaagaattttggcaatttttaaccgaccaattcgttttttagaaattatattttatgtaggagtacagacagcgaaaagtcaggacataattcatatacatatttcggggtaaaaacgaattattgaagaattttctaaaattttaaatcactttttaattttcccggcaattaaaaaaaagtcgaaataattgtcaaaaaaaaacagaattgtgccaccccaccccaactcacctcgtccggtgcagtttgcacaatgccaccgcgtattccgccaccaccgttttgcccgcgctggtatgtgccgcgacaaaaacggaggcgccctgctccatgcggacaatcgcctgctgctggaacgggtccaactcgaaggggtactgaaacgggaaaaattaaaaacgtttaaaatggcattttgtttattcatcagagaagatgaacgcgtttttgacttttagatccactattccacttaattttaggggaaaactgtttttttttttttttggaaattttcttaatgagtttttttgccgtaggggaaaattggtaaattttggccatattttaaagattttttttttttgcggaaaattttaacgccttttttgaggaagaaataactaatatttttttcaatttgttaaatttccgtgaatcgtgtctgtctttaacctgcttggccatgttgtcccggagcgcgtcgaattctggcacttttttgttcacgtccagcatttgggcgaacgcaaatttgctctccggcacagttttggcggggatgggtgccaccgacggattttggcgcagtttcgccacttgcggcgacgccgggacggggtttggtcgggcgcagcggaagcgtctgcggcgacggaggcctcctaaaatgatntttcaaaaattaaaaaaaatggagaatcaaccccaagcttttggacgtctcgtccatgtgcgcagagca

SEQ ID NO: 24226 - DNA, 1103 bp, Heterodera glycines
aaaaattgtttataactcccattcagaagaaggggatagaaaaaaaattaaaaataggttttagagagcccgggaacagctgcatcggatgcaagtgcccacgttgctgtacacttaacagttggtgagcaatgacaaaataaaaattgaagcttaaaaaagaaaccaaacaaactcatcaattgttagctcccgttgacaaaccgaaaggtacattggggcaatggatgttgggctaccgtatcagttattaaaattgttgtttttcaaaaaggatactaaaactgggataacccattcagagactagtcaaaaaaaataataataggcttggactaccatactaattagaatttttagaatgtgtctgttaaatgcaaaactgttgtgaaaaattgttataactccattcagagaagagatagaaaaaaaataaaaataggtttagagagcccgtgaacagctgcatcggatgcaagtgccgccgttgctgtacgcctaacagttggtgagcaatgacggaaaattgcttaaaaaagaaaccaaacaaactcatcaattgttagctcccgttgacaaaccgaagggtacattggggcaatggatgttgggctaccgtatcagttattaaaatttttgtttttcaaaaaggatactaaaactgggataaccccattcagagacaagtcaaaaaaaaaaataataggcttggactaccatactaattagaaattttagaatgtgtctgttaaatgcaaaactgttgtgaaaaattgttataactccattcagagaagagatagaaaaaaaataaaaataggtttagagagcccgtgaacagctgcatcggatgcaagtgccgccgttgctgtacgcctaacatttggtgagcaatgagggaaaattgcttaaaaaagaaaccaaacaaactcatcaattgttagctcccgttgacaaaccgaagggtacattggggcaatggatgttgggctaccgtatcagttattaaaattgttgtttttcaaaaaggatactaaaactgggataacccattcagagactagtcaaaaaaataataataggcttggactaccatactaatt

SEQ ID NO: 24227 - DNA, 2020 bp, Heterodera glycines
  unsure (1)..(2020): unsure at all n locations
gcatggtcattagtggcagcgattgcaccgacacgttaaatgnaaggcgaattgagttcagtgaccgaacggtgcctgtgatcagaaaagatgacgttagcagagtaattggttatcgctgttgaaaaccttaaaaatggggtggacaaatgcaattggtgttggaacggacgcaacttagtctccttgcgaatacaacttaaagcctggaagactcgtttttgaattatttgtggaagtgttggcacctgcaatcgttcaggagtggtcacttcgtaagaatcgaatgggaaaagcacagtcatatttgtctttgaaaaggaaaagaaaaatggcatccgaaaattaagccattttaataataccataagtggccgagtttgagctgcactcagcccaattgttgtcttttgggtgataagcatttcactgaacaagtcgaataattttgcaaatccgagcggaacagaaaggagcaacagcgaaacgccaaaaagagacgcgaaggagtacagcaaaggggtggacaaagagagggaaagggacaggagagagagcgaaatgtacgaaggctaaaagagagaaaacggactgacaaatggcaaaacattaaaatgaaatgacagacactcaattacctgtaaaaaaagatgagagtaaaacatgtcagcaattccgaccagtacaatgatgaccaatgcacagacaacgacagtttcgtaaaagcgcgcgatgagagggcgacgcactgacgcgggggcggaattgctgggaaagggctgaacgacttgaagatggtgaaaggcagcagtgctaaagccctgagactaaaaagagaaaagtaaaacacaaacaaaaggatggaaaaaaatttaaaaaaagctggtagcaccggatggtttcgatccatcgacctctgggttatgggcccagcacgcttccactgcgccacggtgcttacgaaaaaccagtcattaaattattaaaagaaccaaaaaataataggcgtgatgactattttaagaaaaaaaaggttgtagcccaaccacctggaaaatctatgcaaactttgatactatcattctatgtaacaagggttaattttttttttgtggttcaatttcgtattttagaagggaaaaaaggcacattcttaaaaaccaaactggaaaaattcaaaatttttctgtacctcaatgaaaaagtaagagaatggtagcagtgcaaaaagcgacacattgctgagcatgaacacgtaattccacagagaattgatcagcgatgcgttaagccatttcaagtagaaattgtcggggtatcgctccaaaacttccgagccgagcacagaaaaaggcaaaagtgtgacggcaccaatggacacggacagagaacagcagcaaatccaaacacggaaaatgcaaaaataacatttaaaaccagggctgccagattaaaattttcaaaagcctcatttttacaaaatttattcaaaacacgtttaaaatgttcaaatgttatatttttgattgtccatgatcaatttgagcattttttttgttagaaataagcattttttgggattctgaacatgaaaaacgaagttgcttttttgcggcgcttttcccaaaaaacttttgggggacagggggaccggcggtgccgataggcgccgcgccgggaaaaattttgtaattttcaatgcgatttgttaacagattttgtccgaaaaatgaccaaattttgcgattttgagcaaatttttgcttgtaaattaagatttttacgggtccggcggtgccgataggcgccgccgggggaaaaattaaagaattttgaccatatttttagcatattttcattaaaaaaaatttcgtatttttgtgatttttccgaaaaaaattggtatttttctagtttttatgaaaatatttaacaaaaaaaacttaaaaatttctccaaaaaacccacaaaaaagccccttttttgaaaatttaaccctccttggacctatcaaaaaacc

SEQ ID NO: 24228 - DNA, 1712 bp, Heterodera glycines
  unsure (1)..(1712): unsure at all n locations
gtcttgtaaaaatgcattttcatcgtcacgctntaaacagtcaattntatgactgactgattatgaattaattggtgttacattttttaccatggaaaatcgtcatcttgggatagacacacacacccaatcattttttcttgctatattctgtcacaatattgtttgtgtaggaaaaatatgtactctgtttgtgtgtctggtattacatttagacacaaatcaccctgaaaatgcgaattttttttttcaaatttagaatttctcattcaattttttgggtgatcaaaagccatccatccttcctctaccactctgctgatcagttagcctcatttgtccatttttatgtgtaaatacaacaacatttttctgttttatgacggggcatccaatgaaattcctcaattttcaaacactcagctctcttctctcccttttctctgtgctgccctcccattttccaaattcgtctcctcatttgtacataaatttttttttatgaattttcatcggattttcgcattttggcgcttttctttttttcaatgctatgtacataaatattgacntttattctccgttacagtgtgtgttattaatttgggtaaaattgcggaatacggtatcgactcaaaatcgcacaaaaacacgtacatatgggttttcttaggcgctggaacgatggaacagctaaaattcggcgcggaaaagcatttataccggtttaaaactcgaaaatttgagtgaaaatggagacttctgacctcttgaaagcgtcaaactcggacaacgtgctgattgtaatatttttcataatttctcagtaaagataaagcgtacgaaatgcagaattggaaaaatcacatttttaaaattggtcgaaattgaagccgaatccgtgctcagcgccacagattacccctaaaaataatttttcataatttattaaaaaattctcaggaccaataatcttaacattccccaagtttttattaagtcacgtgaactgtaaaatgaacaaagaaacagaaaaattaattcttaatttaatcatctcaaagaggaaaccaaagaaaagtgtataaattcgagatcaataatgcacaatgtgaagaggtggatcgttgaccaaggcaacaaagtgcaggaagctgtctgtcattgggcggccagccgcgcatgccaatcatgaaaaggcaacgcgatatgttctgcatcagaattacccgcgcttgaacagttgaactaaataagaaaataattgattgaaaaaaattgttgtcgattacgttgcggcggtcagatgagcctcagtgatgtccaaaatctgattgtttttctcagcaatcacacgaacacccgccaacaggtggtcctgaatgaaaggaaacagtgaacaggttaaaaaggcattttgattacagtctcgtctgatttgttggcgtcgtaccgcacacgatgccgaaaacgctcgaggaccacaaggatggactgaagaggtttgaagagcggcaatgctacaaaacaaattttcaaatgacaaactgtcgtctaactggcagaaaaagtttcgaagtcctcgcgcgactaacgccacgtccagttcgccttctcgaacttcgggctcgacagcgtgattcgcagaaatttcttcatgcatgaacaccgcggatgccgcaaaaatttcaacggcagcaaacgcggggcgc

SEQ ID NO: 24229 - DNA, 1741 bp, Heterodera glycines
cagcacagcgctggtctgggtgctgagctgggctctggtccgagaacgattttcaacgctcaaagtcataattggtaattaattaattgatatattttgttattttcgagttattctacccccccccccccctcctctccccctaatgatgctcaagaccgacaattttccgagactcgagacctagacttgaccccgagactcgagatcgggtcgggaccgagacctagagaaacccgagaccgaaaccaaaaaacccgagacttttctcgagtcgagaccgagactctcgtgcatcactgaccttccggacacgcttaaaaatttttcaaaatttgtacttgagcgcgtgctgatcgctagggctgcagtttggatttacttttacatattttgacatttcctcatactacataattacacatttttctacatttttggattcttccaactttttcatgttttcatgagttcagcgaaatgtttatgaatttgatgataattttgctccttatattacaaattttaaaaatttttagagggggcggctgggggtaggggggagtagcataaatgccgaaaacaccagctttgaaattttattatttttatttatttattttttgttgcacagtttgtcgccgttttggtggcaatgtttggtgttctgctggtcgcattggacaacgaattcgctgcgaatcgtctcggcatttgtcttgctattttcagtaccgtactcgcttctttttataaggtgtgagcagatgattacggtggttttcgcttccctgtcgagtacagtcattttgcagaggattttgagaaattgccaggaaaagaagtggatttttgaaaattgtgctgctggacagggaaacaagctgaaaatttttttttgaaaaaatggcaatattttttttgagaaaaaatgactcaatttactttttttgaaaaaatagctttttttagtcaacataacttagtaaattaattttccattaaaaaattaatttactattatatactcaaaattctgttttccaaaaaacaacgtacaaggttttgaaaaagttttatgttgtttatgttttttattaatttttaaacaaatctatgaccaaatgaccctcatttattaactagttttgaattttttatttaattgattgaccctgtggcattgattaatattttccgaaaaaatcaggactcttgtgaaaatcctgatttggtcatttttcttgaacatgttttttcgttttaaatttcctctctgccctaaaaggtgctgttcaaattgtgcattggcaatgccacgcttggccaagtgtcactgttcatgaccgttttgggtgtgcaaaatttgttgctgaacaccccactgtccgccctgcttgtccaccttggctgggaccgtgttgagtgggcccacgtcccatggtcaccgctggtcggttccgcactgcttggactcggtgaaaataattagggctgggaatttaagtcaaatgactcttttttttttgctgactaaatggctttaaatgacttaaaaatttttctaaaactttgtttgaagcttttaacagacagtatgacttttttttacacttttttgggaatcttttatgacttttttcgccttttgaagcaaaatttgaattcatcaaagaaaatgccgaaaaatacaaagaaaattccgaaaaataaaatttcgatcggtgaaaaggcaatgaaa

SEQ ID NO: 24230 - DNA, 744 bp, Heterodera glycines
ctgaaaaaacaattaaggtaattaccatggtacttgcaaatatgaattgttacatcgctttttccatttttttctcagcttctttccaattgtccgacatttttttgcttgtaatcaaataaaattttaaaaaattttccaaatttatgcgctctacagcaccaatgctgaggggaactcaacactggggatgctgaacctaaagttggtggtggtgttggtatacgagtgagtggcgtattgccatggttgacaagccctatgagttcgtggatcggaactccttgcctggggaccagtgtgcttgcattcgaaaaaacacgagacataagcgcccgaaggcctttggcctgaggaagtgtcctaaccgggaaatccggagtgctcgtgtgagtgcctgtgcactgccctcggagctgtgtccagcggcgagatggttcttcccaagtccgggaagctcggatgcctggccagcgctgtgtcattaccacttgctcggtctccttcgctgcccatgcgcacgcttgcgctgaacggagttgtttctgctgaaactatccgtctttacaagacggctgtaatagcggcgcttggcaacgctcgctagcagctatctggttgatcctgcctgaactgatgtgttcatttcaaagattaagccatgcatgtgtaagtttaacctgccagacagggaaactgcgtacggctcattacaccagctataatttacttgaccttgacttc

SEQ ID NO: 24231 - DNA, 482 bp, Heterodera glycines
  unsure (1)..(482): unsure at all n locations
gatatcaaaattgtatttggcaatgaaaaagtttnaatccaaaaatctgggctgacgctaaaaaaacccattcncactgattcagcaatcctgaaaatgtatgacgaattaaaagagttccctgcctatagtttttcatcgggtcaattaaactaaaaaatgccatttcattttccaaatttgcagactgaaatataaaccacaaataaaccgacaaaaacgaaatggctccacgaggaaacaacatggtttaccaataaacatttgtgtgatcaacttgcatttgcgcaccttttcagcttcccaatgcccacttccacaagcattggcagcgtcgtatcaaaacttggttcaaccaaccggcacgcaaggaacgtcgccgcgctgcacgttccgccaaggcggcccgattggcaccgcgtccggccggcggtctgctgcgccctgttgtgcgttgccacaagcgttcgctacaacaagaa

SEQ ID NO: 24232 - DNA, 1180 bp, Heterodera glycines
  unsure (1)..(1180): unsure at all n locations
aaattttaattttaaaaaatatttcaacttttttctttcatgttaagcatcctaaaaacccaaaacttattggtcattttttacaaattctgttaacaaatcgcattaaaaattacaaaatttttcccggcggcgcctatcggcaccgccggccctccttgtcccccaaaagtcttggaaaaaacgtgccgcgtaaaaagcggtgttgaaagcaaaaaaaggtcattgatttacattaatttacatggccggagaccccttcgcaaaattggaaaattggccgctgattattcaaaaaaccgcatgtctctatgacttataccggctgaggtatgggcacttcaattttgacgtagtgtaaaatgcactattttcttaagaaatacagtactttttataggcaccgaaataaaagtcgacgtatctcagcgggcctaaatcgtagacccactattccaaaggcaattcggtagcaaattttgtgctctataaaatgggcctactcaaaatttccagaaaaattttcccaaccccctagaaattttttttgaaatttacccctcgttcccagccaaaatgggctgatcagatcaccatgaaggagtgatctgatcaacttggtgttgctaccttttttgatcagcatccaaagttatgcttacctgaatttttttagatttttttaatgctgatccagagaagcaatattttaaaaatgaaatgggacaacacttttgaccacctatattttgatcaaattttgaatatggtaaaataaatcaaataaatgtttatgtcacaaatgcaaatatggtatcattggaaagcccataaaaaatgctatccaatggtatgctacttatctgttgaaattggaaaatgacaattttatacgcaattatttttttcaaagcatgatgggacaacacttatgaccatgactgtaggtttattatttatttagtaatcagaacgccaaaactttgcaaaaacttaaattttccggngattttcccttgcaaaagcacaagagccgatctcgagttagaaatatactttcaaaaacaaaatagaatcgatagatggggtcaaaaactagcctnagcaaaatttcaagaaaatctgacccgaggaaaaattttttgaccctagtgtaaatttcaataaatttctatcattt

SEQ ID NO: 24233 - DNA, 1340 bp, Heterodera glycines
  unsure (1)..(1340): unsure at all n locations
aattaaagaggaacggcgtaaaagcacacaattgagaattttgttcgatccaaatcgacgcttaattcaattgaccttcaagttgcaacgggtgagggtcatttccttggatttcatgaattttccccactatgtccttgaaaatcggcatacccgtccttggaaacggaggatggacgatgggagccctgtcttaaggcctatcatgttctttcaaatatttccttttctccactccaaaattttattaacaaatttaatcgatactgtaaattaaacggccttaaaatcgcttcaaataaatgtttaactttacatttaggacacaaaaaccaaaaaataaattattttattgatgattttccaattcctaaaaatcccggaaacgaaccagtcagagaccttggcatttattttactaatgatttgaaatgggcacaacatattgaaattatctcgaagaaagcattacgatctgcttttgctatattaaagtcaatcaaaactggtgatacgaaaatacttgtaaatttgtttaatatttattgcagaccaattttagaatttggatctccaattttcaatccttatttaaaaaaggatattgaaaaactggagaatgtccaaaaaacttttttgagagtaatatttagacgtaacaattatgctgctgatttacctaattatgctgaattgttaaacatttatgatcaaaagtcgcttgagagtcgtaggttaaaaatagacttaaaactttttcatgaaataattttaggtaaaataaatttacaaaataatgaatccttttctttttccaaaaacattgtaaaaaatgaatacactataacagggctcccatcgtccatcctccgtttccaaggacgggtatgccgattttcaaggacatagtggggaaaattcatgaaatccaaggacatttaaaatttttattatatgcaatgaaaaatggttaaaattacacacatggtaagcaaaagtgcctaaaaacaaatttttacacttaaaaaagattaaaaatgaccctcagccgttgcaacttgaaggtcaattgaattaagcgtcgatttggatcgaacaaaattctcaattgtgtgcttttacgccgttcctctttaatttgcttatgttctttgttttccgtgtgcgactttatggccgaaactcccatcgactcgacattgatgtcttttggcaaaaagcacaataaaaaatccattcccgtttcggctctcttgacaaaagtatattgcttttcccnatcgggatcgaaagaacatttgcgcttatttgggacattctacatataaattatgtcgcaa

SEQ ID NO: 24234 - DNA, 1703 bp, Heterodera glycines
acgatgagaagcggcgatgaggtcgcttttgaagtgctgttgttgttgcacaatgaacggacgacgatgataaacgcaaatagttctgttctaaaaaaagggaaaagggcataaaaacgtatcacctccaattgtgatcggactaaacgatatttaggcatatccggacaataaatttttgagtttttcggtttcggttttttaaccgaaaccgatcgaccgaaataatcaaaaaaccgaaacaaccgaccgacttttttaatgcgattttttaacagattttgtccaaaaatgaacaattttttttcaattttgagcaaatttttaaagaaaattaaggatttttgggtccggttgttcagataggcgccgctgggggaaattttgagaattttgcccatattttttgcagattaaacgttaaacccagggctcttatgaaaattttcaaaatcagcatttttgtggcgcacttttttaaatttagtcatttttggacaaattttcttaacaaatcgtattaaaaattgcaaatttttcccggcggcacctatcgacaccgccggttgcctgcccccccccccccctgttcaccaaaattctttataaatattaaagagcatttttctgttaataaaaacggtttattgctttttttggaaaaaaataaataaaatcaaaaaaaaaaccgaaaaaccgtaaatttttcttcggttttttaaccgaaaccgaccttcttgtccggtctctagttttaagcgatcattaaaagtaaccgttatcagaaaaaaaagttttaacggctctccattcgaatccttattttttaaaaaagcataaatttctaaaaaaaataataatgccatagttggacagagaatatttgttattcagtatttacaaatatacattaataacatatatggtatgtacaaatcacaacaaaattcacacaaaatcgtatggcattttaacttcgttttgctcatttttctcctccgtccgtccgttcctttctttttccgtcgccgtccgtcacttacagcagcagcagttaatgcatttgaccaaacaaatcacgaggcgaacaaccaggcaaaaggcgagcagcaacaccaggacaaggaaccacgatttcattctgaggcaacaatctgaaaaatggagaggggatggcattcgaaaatggcacttttcatttcaaaatggcacttttccattcaaaatggcacttttcatttcaaaatggcacttttccattcgaaaatggcacttttccatttacgatccaatttttttgaaaaaaacgaatcctgaaaaattcgaatttttaactttttttcgagttcgggtagttgaaatgggcctaaataaatgccatattcatgttcaaggcacaaagaagccgaaaagtgccacaaaacatttgtcatgtgccaatttcgtgtgccgacctgcgccattgtctccacagcactcgaaataatgcgcaacggatggttcaccgcctgaaaaagcaaacaaaatgcagaatttggtaaatgaatttgtgtggaaatctcacagattttggcgatatcggaggagacacaaggagaagaaggaggcgccaaataaaaagacgaacatccgggcaaaaatgggacgaataggaaaaggacgacgaacagcgaaaaaggcatcggagaggacggcattttgga

SEQ ID NO: 24235 - DNA, 1528 bp, Heterodera glycines
cctatttatcctgaacctgtattttctcggtcaaaattttggtaaagagagaaacgaagaattcctgggctagacccaaatcgatcaaattaaatgagaaaaacaatgaaacgggaatgatttccttcagagttaatctcccataacaatcggatgatttcatccgtaatataagcatcgattgctatcagattattattcatgtccaaaaaagaagcattttaagtcccgcagaagttcttttgccccgcattttgtcgccgtcaaatgttttctgtgctgtctgtcgcccatccgtccaaaagaccgccgaattgactcaaaaagtgaatgggacgaaggaagagagaggggagagattaacgggtggcacatggcaggggaaacagctgtgccaaaatgggtccaaaacgaattggcccgaggggcgaagaagaagcatttgcccccctcacaaattgtccactttcctctccccatttcctccaaagctctcattatttttccatgaatttcctccaaaatgagtgcccttctgctccaaattggctgttgatggcaatgccaatttcggcaccttcgctctctttttctctttgtcggtaaacttttagtgcttttcacttcaccgttttaacaaataattctttggtttgccatcttttgcaatggcttattggcattattggctaatgttccgccccccccccccccccccacagttcgcccgttccgctcattttgctgctaatttgtgtggttttggcccacaaagactggaccaattcggcctatcccgacctgcgcggtccgacctttcacgtgagaaagggaatggacagattggacaaaacaaaatgattaattaattaattgtgtattagttaattgccagaaattcatcgcctttagcaatgtgccagccgaatgccggacaataagccgttgtttatttgtgaccccgaccgcattttcaacgccacacaatgtaactgttgcggaattagcatctttcaattgcaaatataattctgcccagtgattcggatcaacaacgaacttgccaaggtggccattggcaccccgtgcccgtgccagcggcggtcgcaatgttcgagtaaagccaaagggcgaaattggggggcaatcgccactcactcggcgccaattcaggcggctacagtctcaacgggaacactttccacggatttattgtgtccatcgctttggtggacaatttgcagatgaatttccactcgccctccgagcagtaattttcatttcttttctccgtctgttgtcctctttaatcccacccttgggatttcactgaatttttaattgttatttaaaaatgtcttattgcaaagatcaaataataattagtaattagggatttaactaacgttttaaatgtgccgcccctcccaaccgaccattttaattttttggtctccgctttttcagtccctttttttcatttcccattcccccaaggcaactgattgaccgcgcagagagtttttgc

SEQ ID NO: 24236 - DNA, 2040 bp, Heterodera glycines
  unsure (1)..(2040): unsure at all n locations
tgattatggtgttatcgtaccttgattaagcccaccacagaaagtacaatacgtggaataatatcctttattccgatggtacatgtttaacaatggtgagctttcccgattcggagcggggagggagggggtcgggatccgaatccaacggccaggtggagtgatgtgtgtatggacaaaggaaaagcatatacaagcacattgggggaggagacaaagggaaggaccgcccaggcaaattgtcatatggctataagcaaagaagagggagagaagaaaaagagtagaggcaatgagaaaaagagtaaatgattagatattagtcaccctattgtgcctctcatccatgtaacacaggggtgaaatttgtcaacgttttttaaaatgtattattttgtgacgcacactattgtgcctctcatgctttagagagagcacatgtgctgaatttgtcaaatcgaattgtttgttattgtattgttatgagatgaccctgattatggtgttatcgtacctttgataagcccaccacagaaagtacaatacgtggaataatatcctttattccgatggtacatgtttaacaatggtgagctttcccgattcggagcggggagggagggggtcgggatccgaatccaacggccaggtggagtgatgtgtgtatggacaaaggaaaagcatatacaagcacattgggggaggagacaaagggaaggaccgcccaggcaaattgtcatatggctataagcaaagaagagggagagaagaaaaagagtagagacaatgagaaaaagagtaaatgattagatattagtcaccctattgtgcctctcatccatgtaacacaggggtgaaatttgtcaaagtttttaaaatgtattgttttgcgatgcatactattgtagctgtcatgttttagagatagcacatgtgctgaatttgtcaaatcgaattgtttgttattgtgcattattaacgtgtgaataaattttgatgcgattttattaattacaagtaataatgaatttatgaaataatcaattagtttaattcatttgtcttttgccctccctttttgccagaaatcaaatattttgttgtcagaaattttgccaatttgaaaataatccaagcaaatattcccaacagtgccgcaatggacagaatgatgtcgacgctataataggccaatgtgccgagctcttcttcncagggcaagttcaactcgttcaggtcggggaattcggccgcgaattccacccatcggatcagcttttcctttgccccaaaaggggttgaagcgaacttttgtttcaataatttgacattttgtatgtatgaggggtcatttagcacctgcaaagcaataaagtcattaaatgcataatcagttcatgctaattagccttgtcaagtccatcgaccagcagctgttcggccccgtccccgttgagttgaccaacatccaattggacagcaatgcctttcacacgtgccataatggcattgtacagttggtcggcaagcaacggaatggccaaaattggaactccaaattggacagcctcgttgacactgttgaaaccgcagtgggagacgaaggcgcgcattttgggatgcactttgaaatgaaatttcaaattagaaaaggaaatttattaggcaattaagggtaattaactgtagtgcatttgatatgtattaattgatcaaatgttaacagaattttcggctctattcagtttattcgtccaatcagtaactatcgttttagtttcttgggccacaatattttcaatgcctatattgttgattcttggtatcaaacgatttctcagtctctggaatttagaaactcaagaaaacatcaaaatcttgacatagaaaatagcaatgagaaatgcggaattcagaattttatagtaaattcaagaataattttttgtctgttgcatttagccgagaatttagctatacaaaaacttctgtagactttgatctttcgtttgataccaagaatctaagcattgacgaagt

SEQ ID NO: 24237 - DNA, 1182 bp, Heterodera glycines
gggaacggatttatatgtgctaaaaaacaccaaatatgtacatatatatgtgccaaaaacccccaaaatatgtcctaaaaacccccaaaaaggtcaaaatattagggatgtgcgagagtctcggttcccgattcggggaatttctcgggtttttcgcttcccggtttcggtcccggtctcaagtttttagtccggaaaacgagaatttacactgttaagaatggccttttcggggagtgggtcgccggtaaagggagaaacaggaaaaattattgaaatttttaataaattttcttaataaaactctaaaaattccaaaaaaaaatttccggcggcacctatcggcgccgtcggcccataaatctctacaatttcaaaatttgaatataaattgctcatttttcagtgaaccccgaagaaaaatattcaaaaaattccgtttttttctaatgcggcgcctatcgcggtaaggggtgaactctatgttacaaccaatttttttaccgctggcgcctgtcggcgcccgccgccggtgaatttcttaaaaactggcttaaaaacaaaaaattggtcaattttagacaaaatctgttaacaatttacacttaaattgtcaaaaaatttttccggcggcgcctacggcaccatctttccgcaagagaattaaggaaaaagagcaccgcaaaaaagcggtttttaaaagcaaaaaattcgttaaattcggtgttgaaagtcgctcacaaaattggccgattggccgttgacctcctcacgcccagggcgtaggcaggggcggggggaacgggctgcgccggctaaagacccccccccccccttaagcctaaaaaagaaaaaattttctgcaatttttttggaattttatgcagtgtcgatacaaatggcattaaaattttcaaaaattttcccgtctgccctaacggcaccaccggaccccattttattatatttttggaaaattaagacgaaaatggtaaaaatagtaattttttggtaaaaaaaaacagctaaaaaattttaaatttctcggttctcgattctcgagtcgagaaatttctcgggtttttggggtctcggttcctctgttctcgtatcgtttctcgggggtcatttctcggtctcgtttctcggttcccgataaaaatcacttctcgcatatcccta

SEQ ID NO: 24238 - DNA, 1932 bp, Heterodera glycines
agcaaacggcactcagccaaaggcggcttcgtcatcatttgccacccaatcggcgatcaaaaaggacaattatcaggcccacgagttggtgctgaaccgtcccaaggccgaggtggacaaatggatggcggacaacgaagtgaaactgagtggccatagtttgacaggaccagtgaccagtttccaggagtcgacattcccaggtttgcatttggtgatttggggcacctttttggggtgatttgtccctcttttattggcactgaccaatagcaaaaccgaaaaataatatttgattttcaaaaattattgattttttgagccatgcccaacacatccacggcacaatgcggacgaggcatttttgtgtatggatgaattgggatatggataaattgtgtgggataagttggtttaatccccgatttctaaatttattcttgtctcaagttgaataagtgccaaaatttattgtgtttggtgattcgtaaaatgcggagaataaattttttacaaaaaattttcctaaaattgcattgacacagtctcgtgtcatctaaaattttatacagaaaatactcattttttttctttcagcaccaattgttgcccaactgtccagcgtgttctccgcgcccactgccatccaggcaatttcgtggcccgtcgcgctggccggaaaggacttgatctccatcgcaaaaacgggcagtggcaaaacgctgggcttcactttgccaggtttggatttccttcccccgatttttagtgctgataaatgtgccccgccggtggtaagcgttattcaacaaatttcaagtttcaccctgttgtttggtttacaaaacaaccatcatttaaataaaataaattttcatccaaattcatggtatatgtttctgattttgtcaaaattggtggtcatgttcggtgatcagtcaaactcaaaaccaacccagacaacatgttcataaacaaacttttaggacaacaaatttttgttttcttcgaaaatgggagagaagagagctatgggtttcattacccattatataaaaaatatattttcaatgaaactaagaaaaatgaagaattttgaattgatcataaaccggtcaaaatttcgccgagcaggttggcatttaatacaaccggttccatggcccgacctttccaaaaccagtcaacccggattcttcaaaaagtggcggtccggttttgccgggcccgataaaaacatgtaccgggcatggccagggtttcgcatccacttacaattagcaggaactctctgtcccgggttttttgtgaaaaatactgggcacataagttttaattgacccaatttttctttctttgattaccatttcattttcagccattgtccacgtgctgaacaaccaacgaccgcagcagcagcgtcgtcctggcgaaggtccggctgttgttgtgctgttgccaacccgtgagctggcccaacaggtggagacggttgcccgtgaatatggccaactgatgcggctcaatgtggtcgcgtgttatggcggtgcatcaaagtggccccaaatgggtgcgctgaagcgcggtacgttcgacatttaagaaaaaatttgttgcttggtagtgcggaacccccccccccccccccaaaaaaaaattattttgtttgaaatgtaattcttccgaagggagtcgggccaacataacccgaaatttcgtcactaaactttccaaaatttaggcgtggacatctgcattgcaacgcccggtcgactcaacgatttcatcagttccaacgctgtgtcaatggaccggtgcagtttcctggtgctggacgaggcggaccgcatgttggacatgggttttgagccccaaattcggcaaatcatctcgaaaattcgggtttgttttttcgcgactatgaatagcaat

SEQ ID NO: 24239 - DNA, 1643 bp, Heterodera glycines
aaatttctttaacatattcataacaacaatttcaacggcgtaaatcattttcaaaatggagagaataaatttgatcactttaacttgtcaaaagcaaaacatgcaatgatcaaaaacatttatatattcaatgttttatcaaatttgacttccattttcatttttgcttattcataaatattttaaataaaaataataatcatttatttttggtaaatgctttacaaatattttttgttggcattttgtttgctgcttgtgcaacgaataaatgcttaccaatgcggcacatttcaagaaaagatcaaatattatcataaatcagcacatttgcccaaacaagaccttcaacctcaagtaaaattgtttattcgttaatatcagcaatcatcacaaatcctaaatttgaaaatattaatatttttattagaagaggagaaaaatatttcacatttgccatgttttgagaaaaatggcttaattggtgggcaatttttttttgaaattgcctattaaacatttatcagtcgcctcttttaaactacttttagaattttgaaaatttaagaaaataaaaagattctggcatttttgagaattttattacatataaaaacgcttcataatatacgaaagcataagaaagcataataatttgattaagcagactccgatcgaaaaattactatatttttaccatagttgaattaactctgtcccacccttatttttctcccattaagatcagccacggtaatccggtaaagtcaaacaacaaatggccatggttggtggcactgtttgcccgcgaggccggcatttgtggcgatggtggcaacaaattctgttgtacggcatcaatcattgggccgcagcatgtgctgaccgcggcacactgcttcatgtctttcaaaggcgaacagcgagaaaatatgcacgaagaggtaaatgaaatgatgcgactaatttttttatgttcctaattaggcaccctaattaatgattatgattttcaaatacatagaaaataggaggctgatttaaacaagtacctgggcagtggaaaacaaattttcaactttgaagtagggatgcctcccccattccagcggtgctatgtcgttataaaaaagccatgaaaagcccaaagtgttttccactagcctgtcaaatttcaaaaaatttcactatgttttaaaaaagttttagccaaaaattttgaaaaactggttccgggtgtattttttggccataactttgttcaaacctgattaaattttttgaaacttaggcgagcttatagcgaattgttagagatatcgaatgataccaagaataaaaatttagttgggtttaagcaaagttatggctagtttgttgttgaaaattttcatttgatggttttttataaggccctttttgatggctttttaccaattgaaataaaatattgggaatttatcaagtttgaactgtccagtgctgacgaaatttaacggattttttttaaaacaaggcattcaaaaattgaatgtcgtccaaaagagggctaatcgccacattggcatttgaaatttttttatccttttataaatattattattatttttttgttgagaagttaaaaaagaattaatgttagg

SEQ ID NO: 24240 - DNA, 1947 bp, Heterodera glycines
  unsure (1)..(1947): unsure at all n locations
tccaattcaaagtccagcggctccgattccaacttcgtctttcgtgtttcaaatttcactttgcctaaaagccattttggggatgggattggctaaaatgacattttgcggattgtctcctcccttctccctttttggcatttcccttggacctgtgctcattttcagttggttctcccgctgcacagtgatttcgtagtacagctgcactttctccgcccccacaaatacgtcgtgttcgaatagcacctcgggcgatgtttcctcttccgttggatattcttccgcactttcgctcatgtcaattagcagcgatgccctgcacagccaaattccgctcttctgcttcgccacttgttctttgctctgaaatgtgagagtgaaagcgaatgcaaaaatgggatagaatttggcaaagtttgatcaatttgccatccatcgaaattgngcattttgaatcccccccccccgttgcgtttgattccgcccctcccattttttcttcgtttacttttcccgcgtttatccacaacaattggtttatgttcggcacgataaattggccttcgcaattctcttttttctgaagattattaatttatgcttctttccttttgcttgtttcttttaccgttacggggaacaaataaaagaggagaagctccgtcggtttcaacgccttccaataatcggacagccaaaactgttcaatgctgaccagcaaatcgggcattttgccattttgggtgagattgtatttggccttgggttttggcaatttgcgaattgctgcaatgaatggatcaacaatgctttatcaatgttctgtaattagttggtcaccggaggagaagcacaatttggaaatgccttcgtccgaatttggcctcagcgcacttttcaacgggcgcccttttgaggtggggagacggcactcaaatggggacgaagttttgtccaatgctttgctgggcactttttcgttgacaattcgaacattgggccccgaatgggcgcattcgcaaggcgacaaaatggggggagaagcggcgacggaaggcaaattcaaagggacgggcagaagacaaacgctaaattagcagcttaatgaacccaaacaaagcaattaactgagaatagcagatcaatgactttttaataaaaatggaaaaaacaaaaacaaagaaacgaaacgacggccgatgacccccgccccgccggtgagtacgagatacgccgcaacccccagttcaataccccctaattattggattggcttttcgtgttttttgcccccccctcaattaaaatgccggccaattcccccccccccccaatgttcttttctcacctgtacccattccgtgtgcactgctcgcatcgctcgcacttttctccttcctccaattcggccttctcaaaaagtcggagtgctgtgcccttttcttgcaacggacaaatcacttccacacaatccgaatgatcagattcaactgcttcaaggcaaaacaacagcgaaatgagaacaaagcgaagaagagaagaaacggtagtcaaatggagaggaaaagaagaggtacggtatttgtgagacattccaaaaaggagggacaaatgacaatgaatgagtattaattattaagtaagggcttcttcttgggttgatgatgacataaataagcagaacaattagtcttaattaatacaaaataaaaataagtgaaaaataaaaaatttaaattaattttgacggttaaatcggaaaataaaataaatcttaggaaaggggaaaaagggggggggaagcgattttgagggaaacgaatgcttagggataagtgggcaaaagcaacaaacagtgatgagaacagaagaaaaataaacaaagggaggcgaaagtggcgaagacaaaaatgacttaggaagcgattggagaagtgaaaacaa

SEQ ID NO: 24241 - DNA, 1971 bp, Heterodera glycines
  unsure (1)..(1971): unsure at all n locations
tctgaccctctgaaaaaaacaaattatgcaaaaaatgatatttaattctaaagagattgaaaaagggaggcaggcaattgggatgaatcagcggacggttggccatcttggtgatgcgacatttgcggcgcagacatttgcggcgccgacacttgcggcgcagacatttgcggcgcccacccaaagtgacaaaaaaccgatttttttctgttccagatttgagaacgagactctcgaacatcactacaaaagggaccttcttcgaagtcagtcaaaaatgacaatggctggttgttttccatatggtttttcaaaattcgaaaagcccttgcatatgtgcttgaacgccgatttgccattaaaatatacgcagctggtattgaaacatgttcaaccagcgtgtttatagtatataattgaaggaaatttggtgggctaactgaattaacgggaccaaaaagttttattttctattttttcaaaaacctttgaatgtcccatctcctgaccattttttataagaaattagacgctctaacccgcgatctgtacaaaaaaaaaaacagcctctactggttctgccgttcgagaatcatataacaaaaaaagatttccatcttcgtccaatgtaaatgatcccttaaattatgctaaatttacaacagtacccctttttaatacttcaaggactatattttgtaattcctttctatcgactccaatagccccagggatttcccgttgccttagtatggtgcgttggtccgcagaataagatggcaaagccaaaagcgctgagtcgtccaagtttgagcgcatttggccaattatctcacgaggtgggaggagtttgttggaaatggcaacttctttcgcttcttcaattttttgcctgacctatataaaaaaatatcaaaaattctttccccgaaattgaatgaccactgtcttatctgcattcggcaaatgattatgtgccgtaatctcacggagatctgttgtcccagctggagcatgtgctcttccggcgcaacttcgttttacacaaacccaaacctgctcaaattatttttattttttttcgtaagaattttagtacttgagtcatccccgtattaatcagctcctttttgcgcatttaaacccattgaagaagactaaatctttgttttttgttgttcgtgaatttggtggcggagaatggacacatgataataatattaaaaaaatagttaagcaaagcattgatctgttggaaaggattagcattaacaaaattttgaactgttctaagtgaagatgatggaaaattcagcggtttgaggaaattgagaatgataaaatttgtggacggatcaaattgccgcagaagttcgagaacaactgataaaaaatttgtggaccgatcaaattgccgcaggaatttgagaacaactgataaaaaaatttgtggaccgatcaaattgccgcaggaattcgagaacaactgataaaaaatttgtggaccgatcaaattgccgcaggaattcgagaacaactgataaaaaaatttgtggaccgatcaaattgccgcaggaattcgagaacaactgataaaaaaatttgtggaccgatcaaagtgccgcaggaattcgagaacaattaaggcaaaggtgaaacttggcaaaaaataatttgaaaaaaatcaaattcaactttggaaagacattaaaaaagaaaaaactagagaaaaatttatagaaacctttattcagtcttcactgatcaaaaaattcctgtttcctgtgaagtcacccctaaaaaaaatattgactttttcacaatgacacttaatgaaatttatttggctcttaataaactagaaaacaataataatacttccattgacagcatcccgaatatttttctcaaaaattgtaaagaaaatttggtttatccgctnatttcattattttttgtttttcaatgatg

SEQ ID NO: 24242 - DNA, 1790 bp, Heterodera glycines
cgtcacaatcgcaagccgcaaaggtagtgatgcaagtgtgtttcgtgaacggcacgcacgtggtgccgtatgaggcggtggagcgcacgctgcgcgacgcggacacggtggagggcatcgacgggtttgaagaggtgggcaaggggaagcagtactttacaaagcaggaaaagcattcgagagttgggaggttatctcattttcaattttaaaagaaatttaaaaaaatttatttttgcttaaatataatttttttattagataaatgttttaaatcccattttatatttaaattattttaaaattttaatttaatttaaatttatatgtttgttaaacattattttaattttatttctttatatttacaaagattcactttttaattgctttaattatcattgtggaaaaacacgattatattccttaatttattagtttattataattttttttgcatatattaaataaattcccaaacataattaaattttataatttgcctattcttagtactaattttagatttttttaaagatttttatgttatttaaatttgtaaatttaaaatttggcgcacattcttttttcttcccaaaaacagaatttgtttgtggcttcttcgtcttgggcaaagggcggcgccgaatttttgggcgctaatcgcccaacaaaattggcccaacggcggcgtcgcgtccaacgacatttggccaacttttgctctctttggcactgatctttggcgcactgtttttcgccgtcggcacaaccgttggcgttttgttgtgccaatgccggcgccgctttgaggcggagaagcgattggcactggcggctggcaccatccgtgccgcttctgcccatgccgagtcagtcgggtgatgattcgttcgggtttcatgccttttttggcccaatcccatctggtctaatatttttttgacccgaaattcatcctgaatttttttttgccaaactttctcttgactttttcggcattttctggcccgaattctaagcttctttgccgccccgacttttttttgttagacccgatgggttatttgtaatccaagcaacattttcgacccatgtgccaactctggtcctaatttcgcgaaattttatcctatctttcgaggctgtcgagcttttactatggcatttttgccggcatttctatgccattttccgctgattttccaccattttccccaagctgctgttgctcgtcgtccattgacaatttgcatttgtccgctggtgccgccaccgttgacgagaagcactacacattggcaccgtaccatcagaaccatttcatcacttcggcagccgccgcttttccttcgcctccaccgccttcctcctcacacaactcacagaaaagcgttgccaaaatttggtaatatttttcaaaaatcatagaattttttttaatttcatgaaaaatttttgaaatttcctaacgattactaaaaaattttatgatggattactaagttttaaaaaaaaatatgatggcaaaagaaaaaggatggattttaatttccctttcgattaaacggtaataaaatttctttgtcagttgccccattaattaattaattaattgcctaattaggcgacgacctttgcctccggcgcctctttgcccccatcggcggacggaaccttttaccaccagcaccaaacggcgccggcacaccattattactcagtgcaggagatgaaaatcaatttgtgaacaccaagacacacaaccgggaagagattggcactttgga

SEQ ID NO: 24243 - DNA, 1399 bp, Heterodera glycines
ctttttaaactctatcgaatggtgtgccatatggccggaaattttcaaatttttcgagctaggccccctagaaattttcggaaatttttttcggagaaaaatgggggtgaaaaatatttttctggggtaaaataaggtgctgagtacgaatatgatgtctattttaagtttcataatttttggaattttttaaaaattctttattttttggcaattttttggccctcgggattttggcctaatatttgaaaattcataacaaatcgaagggtggatcaattttcgtgcaattatattataaaaatagagaaaaatcaggagaattttatgggatttatttgggatttctatcttaaaaagaaaacaagttattccagaatttctgaaaattttcgatttttcagaaaaaaattcataacccccttctgaaaagaaatttttgaaaattaaaatactacaaaaatccgcaatttttttctttataatataaattttattttacatttttatcactttcttacgaattgttacaaaaataaaaccgattttgggattatggaccaaaggggtgagcataggatttttgggttgaaaaattttttcaccaaaaatcttcaaaaaatatgtctttaggggttatttgggccgctgatcacgaatacgtgatcagattttacttttgacatcgtcaagacctcagaatccctgtgtgattggggattctgaggcacccttatgaggagggggggggcggcaggttcggacccggacggtgtacattatttttctatgcatttttgggttattttcactgtttataattaatttgaagatttgttttaaattatttaaatttatttttttttttaattaaagaaattattttttgttttattattattaacaaaattattttaattaaatttaatttttcttttgaaaaatagatttatttttaagcaaaattagatttaaaaatttggatgcataataattcatttcaaaataaagtaaaataaattattccgtttattaattaaaaaataaacttttacattttttattattttgtttttttaaaattttaaaataaacctaattctataaaattatatttaaaattatgaaattatttttgtacatctcataacaagttagacttttgtacctcttctaatcacagttgtacctctttaaatcactgtttacctcttttagtcactgttgtacctcttctaatcactgttgtacctctcttaatcactgtttacctcttttagtcactgatgtacctcttctaatcactggtgtacctcttctaatcactgttgtacttcttctgatcactgttgtagcacttttaatcaccattgtacctctcctaatcacagttgtacct

SEQ ID NO: 24244 - DNA, 2410 bp, Heterodera glycines
  unsure (1)..(2410): unsure at all n locations
ccacctgctgatttcatttttataacaattccaacaaacaaataaataattatagtcattaaattgaggtaaaagtaaattgctatttgatgattaggatgcttaaaggaatttttgttttaattttatgacaaaagattgttttgaaaaaccatgaaaaaatcaatgtaatttccagtgatcatctgatcaccatacaattcaatattctgataaaaagtgtaacataaatctatacagaaaatagagcaaataaatattatcgtagtcaaatacagtcggattttgcgcttgttttggctgtaacaaatttaatgtaaaggcgaatattttttatcgtttttttacatttcaccaaaaattaagacaattagtcggtcaatgccagtgaacaacattgccgaattaattccgcctgcatttaaatatatttttaatatataatatttatacaattttagctttatgaattacctaatccaatcacaggaatgaataaaatcattgctgccaaacgatactcaacgaaattttgtccagacaaagcgttgtacacaaacagaaaatggccagttaggtgaagcaactcaaaaaaggagcaaagtgccaaaaggtaattaacggtgccattcagtgatcaaaaaattaaattttaaaattaccaaaataatgataattaattatcactttgttttgatggtgacaaaaatcacggacaaatgaaacaggattccaaatgaagcagtgattccaaaaattgctgcacatccaatcagagaccagctgggatgggcatctttgaaggccaaataaaactgcaaaatgattgtaaaaatattaaaataacactttaccaattaattaccgtatcattatcgtagttgtccaatttggccataaataaggttaaaaaatgtaagtaatttttaaagtttttatctttaagtataatattttagaaaaaagcattttaaattaattctttattttttaattgcttttgcatcagtggagcaaattattatttttaaatatctattttctaattagttagtaaaaatgtgatatgcgattctctcaatctaatgaagagagctttctttttattgtattttattacaataattgtgaaaaaaatgaatagctactttattcaattaagagttaatttgccatttattaaatattggaattgaaagaatgtaataaaaagttcatttactagtttaatttaatttgtttcagattgtcaaatatttatcagttttttgtctgcctttcatttcagcaaacaatttattatttcaacagttaattaattttaatgccaaatgatggcaatgaaaacaattcgggtaatttcaacaattcacatgcctattaattaatgaaattacacgttgttcaccgataattacatttacatggcaaaaatgagcttttttttctaataatatatggtaattttaagatattttacacgtttttcgccgataattacatggcaatttttttttttttgattttacgaattgtcatacattatgtatatgatgcgaacaaatgaactctaaaaagattttgtatgacaataattgtttaaaaaaattaaagaattcataaatattttgtatttttttttgtaaaatgtgccgaagtgcgccttttggaaacctattgaggcaaaacggcatttttccaaaaaaaaaagtcaaaattttcacagaaataatataattaaggaatcacggttttaatagcattaacttttctatgggcattttttgcaaaataacaccaaaattttttcaaaaaaagaaattggtaaaaaaaaaaagatttctgcaccaaatttttatgtatatatatattatatgttgagacaatttttaaaaatagaattcatttcaagctggaattcagggacaagatggaccgcaaggctgaaagcaagctgtttttgtcccatatcgattctgttctgattttttgtttgttcgaaaaatgtttaaaagtaatatcataacatatttattaatgtatttccaacgaaaaaaaaaattacaaaacactgaaaaatggttacgggcacatttcttcgagaaataacaaattaacattggcatggaaattgtgatcatattggtgagcgggttaatgttgttgatggcattataataaccctgtaagagagaagaaatctctcatcggctgcacgatatttgagcgactttggaggagggattttcaccagcgacgcttcgtgcgatgtctgcgttaattggcttttgctcatatcgaatggctcccggacatttcgacagcaaaggacatttcgacagtaaacacaaaaataatggactttttgacagtaaacataaaaacaaattttcttattaaaacanaatta

SEQ ID NO: 24245 - DNA, 1732 bp, Heterodera glycines
  unsure (1)..(1732): unsure at all n locations
tagtcgcgcatgacaaaaaaagcgtctgagggactttcagctgaataatattaaacattatgtgccttcatttttaactcaccagttatgtcgaagacgcgttcggcacggcataagtcattgtaaacggcacgcaatagtcgcggacccaacncaatgcgccggtaagttggtggaaccagaatttgtgcgatgcgcactcgttccttgtccggatggtggtaaaaacggtacaaattgacgtaaccggcgaatcgatggacggaagaaccatcgccatcggaagatggacgcacggcaaacagaaaataattgaaataacgatggtcatcattgtcagtgtaagagacctgaaaagagggaacaaatggatgagcggaaaatgggaaaatgaaagagcgaaaacactgaccgcatcgatgtaccaatgggccaacgcttgcactcgctccagaaatttatagccctggtcaaattgagcatcgttttgctgttttttctcgaatttataaagtataaagttatgttcaatctctgaatctgaaattagtatttgaattataaaacgaaaaaattaagaaaaaactgagtttgatgagttcagacggtgtgtcaccattcccttcactttccccacctttaaggcaaaactttgtgatgagttctccgaaaggaacaaagttcttttgctcgctgagtttctgcctgaatttctcaattgtcaaataggcgttgagttgagtttgcgggagcgcgtctttgattctgtattcaatatcgtcgcactaaatgacggcaaattagctaattaatgagtcattactgtttgaccaacaacgaaccttcgtagagtcatcctctttctgttcgcattcataaagggaagtcagaaaaagggttggatccgaataaagcacggacactttcaggtttttatatccgacaattttttcactaaaaacgaatttgtttagaaaacgaatgagatggaagggacctctcgaagtgttgatgcgcaaattcgggcgcaaaaacaggggccgtttcaagttcatcctcagtgccaactaaagaaaaaaacaattcctttgatgaagataaatgggctaaaaattaccaaatgttaatccaatcgtttccaatgcgtccgaaacaaacgcatcatcagcactgagaaaaatttccctcggttcatcgatgtcgtgcattgaaaacaaagaggaagagagtaatgaatgattaatgaatgtggatgtacaacttgcaattggagataaataaaaataacaatttaaaaaagcacaaatatgacaagaaaaattttttgagcaaaaccaaatgagaaaattaataaccgaatggaaaacgcgccaaaatttaaaaatggaagcggtgctattctatgagcgcgtctgttcccggtgggcgtgggggaggggtggggtcaaatccctctggctatccgtccgagttatgtacttatgcctaaattgtaagctagtgctaattgtaagcaaataagagcaacagagaaaaggttattctcgaatacaccggcaattatggaggttcaaaccgagaataaaaaaaagcagaaatttgtttgatatttaataaatataagaatcattaaatcatataatgattatgactaaaaaaagaaacaaacgaatgaatgaaaaaaaaaaatttgcactttataaaataatacattaaatcactggatcttttt

SEQ ID NO: 24246 - DNA, 1357 bp, Heterodera glycines
ttcattcgatccagtgtgccccaatgcctcatcaaaaaaggagctcagcgtactttccacccaacaggcatctaagacgagcacacagctgtttcaatgttaactttgaagcccaagacgaaaaggtaacagcatcaaagccaccttctgaagtgagagtcaccttaaaatattttcctttatgactttcataaaagtggattaaatgcctcgtaaaacacaaagggatagaacaaaatattaatggccgttaaaaagcttagcaatggattttaaataattttagacataatagatatcggagttttttttaatagcaaaacccaaattgaaaaactttattgaacaaaaggtgcatttcagttagctaatacaatgtgcttttcgcaaaaaaaatttcttgtaagaaaataattatcactatttttaagttctgaaatttttttttttttgctttatccttgaactcattcctagccatttgctattcaaaatctccttttgttaaaaaagaaattttacaatagggttataaacctaaaataattcaatattaagcccaacgatgcattgaaaattcatctgttgcttttaacataccgatgtaaattcacccgcatattgtaaaaaccaatagcatatgatatggcctgattcatgtacgctgtcgcggcacgtgccattcgaatgttggtttttttccaaatccattgcctcgctgaactgtttgttgttgttccatcgcctgttaactgcacatcttgtccgtcccgttttttccaattttctctgaattaaaactatttttatctaataatcatatggaatagtgaatgaaataaacttggttcggagcgtgattgtgtggtgcggtttcatgaagcgttctcgatcgaccttgagactcagctctcccttcacaatttggagtcatacacgtccatacctgctcaaattgttttttaaacaaatgcttcatattcaaattgttttttaaatatttaactacttgaatattcccatttatttttctcttgttttgcattctgtatccattaaaatgggttattcttggattgtaagaaatgacatctgtcacttccaaaatagaattattatgaaaaaaaagccaagtccggtgctcaggtgcgtgatcgaatggcttggagccggacgatttcggtgcaaaaatacttgggccatagtgccaaaatagatttattgatttaacctatatttacaaagatgggatcagtaattttgtcaaaacttgttattagtttaaacataaaatttcggattggaaaaaattctccagtttattctaaaaaaactcggcctaaataatttgcaaagg

SEQ ID NO: 24247 - DNA, 1155 bp, Heterodera glycines
aattgtttgaggtcccccaaacgggccccttgaaaaaaattgatttttttttttttggggccagtccccccgaaaccgatgcgcccagatttatggggagaccgaatcctttggggaatagcttccctatagcctgtacttttattcttgcgttggatttttgctccccataattgtttgagtaccccaaacggacacttgaaaaaatgttttttttgttttcggggcagtccccccgaaccgatgcgcccagatttatggggagaccgaatccttcgggaatagcttccctatagcctgtactttaattctgcgttggatttttgctccccataattgtttgagtaccccaaacggacacttgaaaaaatcgatttttttgttttcggggcagtccccccgaaccgatgcgcccagatttatggggagaccgaatccttccggaatagcttccctatagcctgtactttaattctgcgttggatttttgctccccataattgtttgagtaccccaaacggacacttgaaaaaatcgattttttttgttttcggggcagtccccccgaaccgatgcgcccagatttatggggagaccgaatccttcgggaatagcttccctatagcctgtactttaattctgcgttggatttttgctccccataattgtttgagtaccccaaacggacacttgaaaaaatcgatttttttgttttcggggcagtccccccgaaccgatgcgcccagatttatggggagaccgaatccttcgggagtagcttccctatagcctgtactttaattctgcgttggatttttgctccccataattgtttgagtaccccaaacggacacttgaaaaaatcgatttttttgttttcggggcagtccccccgaaccgatgcgcccagatttatggggagaccgaatccttcgggagtagcttccctatagcctgtactttaattctgcgttggatttttgctccccataattgtttgagtaccccaaacggacacttgaaaaaatcgatttttttgttttcggggcagtccccccgaaccgaaggcgcccagatttatggggagaccgaatccttcgggaatagcttccctatagcctgtactttaattctgcgttggatttttgctcccca

SEQ ID NO: 24248 - DNA, 995 bp, Heterodera glycines
aacgaaattttggggaattaggtgcgaaggttgaggcgattcgcaaaacaatgctgaaattgaaaagctaaatttgaaaaaattcaaaatctttcttgacttgccaaaagcatgcccccccccccctccttattttacaaaatgccattaaattaattttttgtccattttttgtcattctctcccgtcccacttaaaaatgtagcgaagaagcgtcagcacatgccaattctgcatcagccaagccttgtggattataattggcatcaaactcaatcgaccaattggtgaaagagcatccgacgacgaacggcggaaggagacgaagaaaatcaaggacagacggaccaatttaggctgttatacatacatacgcatcatgggtgcaactttccggcacattttggctccggaatgccgcgtttaaaagcaatcgcattttgccggaaagcgataatagtgcctatggtaccccccccccgccttgttcccccataaattcaatgtctaaaaggttgtctagtttaatttaaattttggacgaaaagaagcatttaaaacccctcgttccggcctcgcaccggaattccgcgttccaaatccaaaaattatcagcatttttttgcattgtatgcggctgcacccctgatagatggatattccattcataacatcaattttgtttttaatgttcgacatatataaataagaaaaaaaattgctgtcacaaaggcgcttcattattaattaaggctcataatttatgcacgtgcatatttttatcggaaagggtttgaaaagcgtgttaacaaggctttgtaccaaataattttatgctgtattatttgtttttgtttttattaattgcaatagttgaaataagaaaataaattgtatttttagaattaattataataatcatggatgggaattttaggcaaatgcctagaaaattttgcgtgcatgtaacgttgagataagcacaaaaaaaggag

SEQ ID NO: 24249 - DNA, 1911 bp, Heterodera glycines
aagaagcaatgagtgtgggatgatggtggtggtgggtgtttgttatattaggaacaagctttttgatttgttaaaatttcttttttcaaataaaaaataaaatccttaataatttattatttgtaacaattatttttatgattaagatcaattttttgaaattctattcaatttttattgtataaacacacgcataatttatatatgtttaaaaaataataagaattgatatgtcatatgaatatataaataattttttacaatattttttgacctttatctttttaaataaaaattttttatgtaataatattttgataaaatgatttttatatgtaaattttcatgattatgtgaaatgtgatcaagtaataattttattatgtaagtaaaaaatttttatagtatgttaagaataatagaattgatatacatatgtataaaaatactctttttgatttttgaaattaaaaaaataatttttggtattattttagatatagattattacacttaaaactcaaaatggcaccaataattatcaaccattttttgtttgaccgcctcctcctttatgaatggtcaacatctcctacatcattcatgtccagttactttattatccaattcaatcctaaaaatgacgcttataatttttactcacatatttttttccttaattatatttttataataatttttattttaccattatttatttttttacttttgtgcacttttatggatttatttttcgtggattcacattttatgtcattttggtggtgttggtgcgcattattgccaggaacccagacacattattattattatcctagtaaacatattttttccaattttcgccctcatatttttacaaattcccttcatcatttttctattgattataacaaaagttaaattcatttaaattttaatataattttttttaaattaaattaatacattaataaatgttacaaataataaacactttagtgtagtgaaatgttttaaaataatttttttatgttttaattatataaaaatttctttaataatcataattgatcaaccagtttattaatacatcataattggtcaaatcagtttatgtaatacatcataattgatcaatcagtttatttttaaacgaatttttcaaaatatcaaaaaagtattacattccatgattattcatacaatttttaatacaataaagaaaaggtttcattacagaaggtcaaattagtcatcaaaagaataaaataattctttttttttgtctgtgagcgctttgtgattttctttcccgcttttcattgctaagcaaatttcaaattagcgtaatttgtaatcgatttttcttttattataatatattaagctttactttaaaataataatttttaatgtaaaattatttctctaattttagataaaattaattccaacaaaatatgatgctccaatgaaaatcgccttaattgcattgttgaaagctttttctcccgcttaattaaaacaatgttggctaacaaccgatcagcactgcttaatttgttgatcggtgtgttaattggatttgtgttgtcattagcgcttttcccatccactgattttccaagtgtcaaattgcctacatattccagaccagtggtgttgattaaggtggataaagaatatttttattagaaataaaattttaaaaaacagaaaataatttataaaaaatagaaatttatattttgtatctaatagagatatgttttcttgtttctacctaatttttgggctattaactttttttttatttacatagaaaaaaaacataaaaaataggaaattatcgcaaatgaacaaaaaaaaaatgaatgatagaaatatgaaagctatgcaaaacatattttg

SEQ ID NO: 24250 - DNA, 2028 bp, Heterodera glycines
catttttacccaataacaattatgaagcattattttatcaaaaaataatagttgttgcatgaattagagcttttacccaaaaaaaaaaatctaatcttgaaattttttttttcaatttttgttcgaaagcgggtcaggggttcggaattgggcaaatccgagttcaaatgcgtaatcagcacccttgaaaacccctaaaaacttgttttagcccaaaattaaaaaaaaataaaaattagggacccccattcttcaggattgcccaatttgctaccattcaattaattttcgtacattatttacacttccattttctgttttttcagattccccactttgtttttacattttgtgatcagctcacatgcattttgctgacctgtccctaagtgaacgggaaaaagcgctgagtgttcgctatttgcaggagcgtgatgcgatgtttgaggtttggaatcaaatcggggcggggcattattaaccgggtcttaaagccagggctgccgaatgtgaggcttagcctcattttgtacttttttaagaggccgatgaggcaaaattaccaaaaaactttgaggcttttgtattttttttgagtttttcttaggcgcttcgtgttttttgggaaaaatccttcaaaagtgtcattatttggtcgaattccatttaacaaatcgtctaaaaacgcaaaaagaaactttttttttgcataaaaattgttacatagtcagtcaacttaatgtttagaaattcaatatttttgaaaataatttgacaaaaaaagagccaatttttttttaactatgtgttttgagtcccccccccccccgaattttgtgatgaattttttctttaaagctaacaatgcatacgtattacatcagttacctgaaaatgtgaagaaattaaaattagaaatcaatgattaggattaatgagttataatctgtgaccgaaatgaatatgagaaaagacgtaaaacgaacaataacattgatcggtgaattgtcatcataatacacatttgaatattgcaaagttaacctttcggaccaaaagctctttaaaaagcgataaaaagggctctcaaattttaactttttttattttacctaatctttgattattaatttatttcatatcttttcgttgtttatgtaactcatttaacatgcattgtttgcttaaaagaaacttcagattcggtgtttatctcttaaaattaccgcagaaaaatttaaaaaacaaaaattcaagggccggatctaaacagaacaaaactgttgcatacatttacatgcacttttcggtttgatgttgcatcccatttaaaaagaacggtgaacaaagggcgatcgatacgcataaaaatcgatgtaatttttatgcatttggggaaagtttggcgacgaaatttattgtgtttaagccttcagaataagattgtttttttggtcaaatttattttctttttgcattgttccatttacataaatccatttgaggaaatcttggctcaaattgcggcattcatgcccattatataattcttgcgcctagttttgcaattcttccatttgttgattaaaaaaaaaatttaggccccaaaacggaaaagtacctattactattccccccaccccaaaccccgtaacattttttaagtttctcgtaatattttttataattttatctctgtattttattacaatctaaaaacattgcctataattcggactccaataattcaacccccgtttatttcaactctaaaaagtgtttttcccgttgcagcgtttttcggagtggacggagcaggaccagacggacttctgcaaacaccttctgcagcgcatgtgtcaccaccaacacggccaaattgaccaatttttgggcccaatgcttcggcgggacttcattgcgttgttaccaagtttgtttttgttttgtctgggtttttcccatttttagtgccaataaacggtggagagtccgccgctgtcaaaacgtacacatacaattaattaa

SEQ ID NO: 24251 - DNA, 1306 bp, Heterodera glycines
gggatacggtaaagggacagagtttatataagtaaacccatcgatacggtaacagcaccaaaaatgggcgaaaaatggggaagagaaaggaaaacagagcatgagcacaccatacacattcaaataataatgcaagaataagggcaagaaaacgaccgtataaattaattacagtacaccaccgtaaataaattaattaaaaatagtcttcgcacatttcaggatgtgaatcaaagatttatttttttttgtatataggtaattctttcctatttgttgggcctttgaaacagaaacacggtaatggattgtgcgtactgtaaatggacacagtaagaaaaataataataatatcgacacatttttaaaccaatttaaatagaaagcaaaataatggtgaggatgacaattgcttttaagtaaataagtacaaaatcaaacaatacataaaaataaaatggaaatagtaaaatttatttgtttttgggttttacaatttaattcaatttattagcacccaaaaatgtttgggagaaaatgtgcgaaaaaatttaacattgcccataaattagggaattcaaaaattccttgtccagaaacctgtcggggtcgtcaaaagtctgtaagtcggcgagaattgccgggaaaaaatgcctgaatcccggaaatatatgaccatgaatgttccaaaaattttcgggtcagtttcccaatttttgaaatattttgtgcctcggatacatcacaaaaacacacacaaaccaatgtcctcaaaaacgagaattcggtagagaccggaaatttcaaatttgcggatcctgttgcaggattggaattcaaaattttttacaggacaggatccggcaggattaatcctgcaattaaaatctgcaggatcctgcgcaggattgcggattttaggaaatttcaaaaaattctgtattaataaaaaagtctttcaaagtataaaaaagtattaaagaccgatttgccaaattgggtggctcataataatagcttaaattaaagtaaaataatttttatttaaatttctttgcaaaaaagccataattcattatgtatagggatgggatttttaggcacaaaaagtcgcgaaataagcactttaaaagggagaaaaatcctaaaataggcacgaaaatagtaaaaaaaaattttattaacgcttttttagggtaccaaaaacataaaaaaattcatttgtataaacttttttttcaataaaagataaaatttttaaaccgaaaaacttttatttaaaaaaaaaattttttggaaaaagaaa

SEQ ID NO: 24252 - DNA, 952 bp, Heterodera glycines
attgcgccaaagacaaacttttaatttaaaaaagagttaaatggcacgccacaaaaaaagttggaaacaaaagaaaaaaaagataaaatgatgataaaaaattaagtagtcatcaaaaggtcagccagcacacacagaaaaaatacaattaagagagaaaaagggaggagtcaaatcaaagggaaagagccgccactaattaatataaattaatgtgttttgttttgattttgctgttggattggcgccatatattatcaataaatattctttcttccgtctctccatttaatgatgatgatggtgttgatggggcaagttgttgaagtcgaacttgcggaacagttccgtgtccgcctccgtcaccgcccgcttcgcttttgcgcacgaaaagcgcggctgctcccgcgtgaatctgaaaagggaaaacggaggaaaaattaaaatttttagtctttaaaaaacgaattttaaaaataatttgggctctcagttgtatggggaatttgaatttttgcatttaattgataaatttctgtagattcttgaaatcttccggcgacaacaaaggcacaattaaacccatttttttgtgaatttgacggtaaaattcataaattattacaaagggcccaaaatgtgagactatttcgcatcgaggggggggggggggtcgcagcgaagggtaaaagaggggaatttctgaaaaatttggctatttgcttaaaaaattgcattaaaaatcccatctttgaatacattttgttgatcaaatttttagttttttttgttgcattttacgcgaattacgtcattctttcgtcatttttcggcaattcgcagagatatttcggcacttggcacaaaaattcagacccctccactctccctcactttgctcatgtgtatgatttagtggttgtttgttactcactcctcgtcaaagtggaca

SEQ ID NO: 24253 - DNA, 2281 bp, Heterodera glycines
  unsure (1)..(2281): unsure at all n locations
aaaattaaaagaaaaaattccaaaaaaattggggaccaaatcaaattaaaattttccaaatggaaaaagagaatttggaaggaagaaggacaaaaaatttttcagttgaagaaaaaagaataatggtaaaagcaatttgatcaaatatatggcaaattaaaaatgaaattcaatgaaaaattggagggaaaaagagaaaaatgcaaaaaaataatagcaaaacatttggacacaaatatttgaacaattttttaattgaaagaaacaataaaaagttgggaaaatggtgaaaaagcaaaaaaactgatgatgaaaaaagagaaattgttgaaaaatatttaaattaaaaaatgaatttatgcaaaatgagaaacattcacgaaaagaatggaaagaatntaatgcaaaaattaaacaaatgtttggaatttattatagaacaattgaaaaatgggacaagaaaattggcttaaatcaaattctttcaaagggtgaaatttttaaacaaattgttatttattaattaaatttaaaaatttttattatttaatatattacagggcagaagcattatacatttgcggaaaaaacggaaaaaataaaacaatattatcaattgaaaaaccaaaacccaaagctcaacgatcgccaaattgcggaaattttaaatattacaaaaagatctttagaaagatataaatctgaattcaagagaaaaagtgaaggtgtcacggattgactgagaatatttttaagctttcagggccattcattgttaggttttgataaatttaaatttcttaaaaatttatatattattcggcatttcattcattttccaatttgttgcttatgtaagagttaaaagtattatgcataatgtttgaaggttgttttttttgttctattttttgttgtaattgccagggaacggatttatatgtgccaaaaaacctccaaaatatgtgctaaaaagctcaaaaaaggccaacaacatatgtgccaaaaattgaaaaaaaactgtcaaaaaataagtgaatttatcaaaaagatcacatttttttatccatttcgctagtacaattctaatcaaaaacatttcaattctttgtgacgtaaatatntttctcgctctccaagatttacttatttttctgtttttcatcgataaaattcaaattttgccttaaaaatgaaaaaagtcattaaaaaatatcaaaaagtgaaaaagaaaaaaaaagaaaatttttgatcatttttggatatcttgccaagaatttgagtgcaaaaaagctactttcgtaaaaaataaaaataaaatttccaaaaaatccccaaaatatgtgctaaaaaaaattagtgaattaatgacatcagatgagaacgaaaatgtgatatttgtgatagttaccttaaaaacctccataattatagttatctcatattaattactacccaattcgctgataaaaggaaaatttaataattgaattattataaaaatgttgtatcaaattaatgaaataatgattaaatgtggttaatattgattgaagaaaaattaagccatgctataaaattaataattacaaaattcattgcgaaaaatatttttataaaaataattcattatatttttacaaaaaaatgaaaatattattaatatttttattattatgcgcattaatattcaaaaaagcaattaaccaaattgaggctggcaaaataatccaagaaaaaagttttgctgaaatatttggccaaagatgggacgacggagcagaagaaaacatctgtcaaaatgatcaaataattcatggagaaattgctgatcagaataaccaatttggacaaaatgttcgacaatttgatcagatttttgataaaaatgtggaagtgaaagaagaggagagtgaagaaatgtccacggattatgatgaattgggcgaccaattgccaatgccaacaaataatggacaaatttatgatcaaattcgaattttaaatgacaaacagaagagagaaattgtggaaaaatttcataaaattaaggagaaagttaagcaaatgggaaaaaaatattcaacaaaagaatggaaaaaaattgaaagaaaaattacaaaaaaattgggcgtcagtcaaaagaaaatttacaaatggaagagagaatttggattaatcaaaaacagatattcggatgaggaaagacgtaaaatgttaaagcaatttgatcaaatatatggccaaataaaaaagaaattaaatggaaaattggaaggaa

SEQ ID NO: 24254 - DNA, 628 bp, Heterodera glycines
tggcaatttcagtcaacgcgcgaacgctttggtgacgagcacaacgcggagaagctcttccggggcatcagttggcgagcgacgaatgaaactcacgaagaataatgccaatgacaacagcggaggacgaagcagcggcagaagaacgacgagggaacggagagaggtgccggagagagtgacgagacggaaatattcactgccatgacacatttaaatgccaataaaacaatttttgaagggaatttgaaggagtacagagagagtcaacccaagttgcgtttttaaggaccgccgtaattaaactctaattaccgtcgaattggccttccgtttgggttcgagatcgacctttttgacctgctgatggatctgttctctgtctgatccacattcaaatgatccttctctttccccaattcactaattgctctgctcggctaattctgctgtgaatcccgtctcttctgacgtgagtgatcggcgccggatgtgtgccccttgctgctccctttcgccgcctttccttctccgctttggtcgatctctgatcgatttgaccccaacaccaaaacagcgccccccggccgtcccgacgaccccggccaactgcttcccttccctccct

SEQ ID NO: 24255 - DNA, 948 bp, Heterodera glycines
gagaagcgaaatgccaaagaacgaaggccaaagggcgcggaacagttcaatccgcgcgtcggtgcacagcgcggcaaacagtgcgcgacatcagcagcagctgaacagcgccaaaagcttttttgccaaagtaccgcaaatggacaaaacgtcgaaaactaaaaaagggggaagacaattggtttatcacctcatttggggtcgtttcacgcgcactttgtccacttttgtcagctccaatttttctacgaacattcgcccctccggcacttcgcccctttccttttgctcatcgcttacgcccttctcggcgcattgctcttttttgtgctcgaaagcgaaaatgaacgccaattgttggcggatgagcagcgccaattggaagtgttgcggagccgaacccttcagagattggacggcacattgagggcatcggcaagggaccggtggagcaaatcgaagttggcacaaaagggaggggagacaaagggagggggaagggagagtggaaaatagagagaaaacaagaacagggagagagagaggggaaaagagagagagagagataaaaagggaaagaaaaagagagaggaagatagagagagagagagagagagagagagagaggaacagagagacaaaaagggagagaaagggggggagagagagagtgaataaaatgggaaaaaagcatttcagcattttagaaaagtcttgacggactacgaacgagattttgcgaggttaaaagtgccggaaggaacactcggtgcgtgccaatggaatttaatgcagtcgattggcttaaaatggcattatttttgttcagaatggacctatttgggtgctctgttttacggtaagcgcagagagtgggaagaggcggttacggtcgcttttcaagttggcactgtctttacgaccattggctacggtaacatcactccg

SEQ ID NO: 24256 - DNA, 1164 bp, Heterodera glycines
aataaacgcgaaagtgaaccaaaaagtcgcgaagccttctaaaataaacttgcgtataattatgtccttgaataaatcaaccaaatatattttttaaacctctattttgctacaattttcaaatattagggtaaaaaataaattttcatagatcattgtagacttagtgcatggccctggagccgataaagcttacacatttatcagtgttaaatgcacatttaattcttttgagggaatttacacgtatgaatgtctataaagtattgtaaggatattatttagaatatgcggctagagaaatagttgaaaatagaaaacagtacaacacagggcaataaattttctatagtgtttaatgttttcgaatatttctaagttaattaattaaataaacgcgaaagtgaaccaaaaagtcgcgaagcattctaaaataaacttgcgtataattatgtccttgaataaatcaaccaaatatattttttaaacctctttttgctacaattttcaaatattgggtaaaaaataaattttcatagatcattgtagacttagtgcatggccctggagccgataaagcttacacatttatcactgttaaatgcacatttaattcttttgagggaatttacgcgtatgaatgtctataaagtattgtaaggatattatttagaatatgctgctagagaaatagttgaaaatagaaaacagtacaacaatggacaataaattttctatatgtttaatgttttcgaatatttctaagttaattaattaaataaacgcgaaagggaaccaaaaagtcgcgaagcattctaaaataaacttgcgtataattatgtccttgaataaatcaaccaaatatattttttaaacctctttttgctacaattttcaaatattgggtaaaaaataaattttcatagatcattgtagacttagtgcatggccctggagccgataaagcttacacatttatcagtgttaaatgcacatttaattcttttgagggaatttacgcgtatgaatgtctataaagtattgtaaggatattatttagaatatgctgctagagaaatagttgaaaatagaaaacagtacaacactgggcaataaattttctatagtgtttaatgttttcgaatatttctaagttaattaatt

SEQ ID NO: 24257 - DNA, 2140 bp, Heterodera glycines
aaaataattgggcaactttaaaagcctataaccttttataacttgacaacaattttaaaaaattaattgaaaatttgttacaaatttcagttttgggagatcatttgaaagcaattttggagagaattggtgaaatggagaagcagcaacaacagcagacaaaaggcgaggagaaattaaaatgaaaaaatatttaatcgaattaaatgtttccattttaaatttaaaaattaatccgatttttaagctactgcggggcaattgtcaaagattttggaaaaaattgctgaaatggaaaaacagaacgaaaacacggacaaaggcgagggaattttagcgaagaataaattatcacttattaaaaattcttttttttttgaataagtttcttatgaattaagaatttcatttaaataaattataacatttttaatttttgaaaattaattttaggaactttggagcaattttcaaagatggaaaatgatcagaagaacattttggaaagaatcttcagtgaattggagaagcagacacagaaaaaggtgaatgaattggaagagaaaataaaaataaataaatttaacggtaaaaatattttaaattaaataaattatacaaatatttatttaaaaatatcgaattatttactttcaggggttttttaaattccaagaaaattgttgggatgccttcgcttgtcacgaggacatccaaatcagtggtgacaaaagtctcattgtccagcataagggaaatgatcatggtatttttaaaatttacataaaaattcaatttcccttaaaaaggttggcgctccgtcttcgctaaatatccgattttgctgaataagcatttgtccgactttttttactacgaaatttcagttatgaaagaaatcgggtaagcgaattttatataaaaagtgaaatattttaatatttttttttctttattcagttggggcatcttcggattcgctgttaaacagcagacaaaattggatggatcaattcgatgtgaaaagggcatttatgcatatgaaagcgatggcgatattcggattaacggaaaaggaaagggaacaaatgccgaatattcctacggtgttggtgatactgtaggaatgggcgttcatttggccagtcgacagctctttttcatcaaaaatggacttcgtttgggttagcaaataataaataatataattttacgattttaaattacaatttggttaattgtctattttatctaatttattttatgtttaaaataatcaaaaaccccttaactttttcacagataactctgattttttcgttgatccatcttttgctgatggttcatttcatccattcgtttctttgcgcgcatttggtgacaaaattgaggcgaattttgggcccaatttcaaattcgatttggcaactctctgaaggaagaattaattatttactaatgttttcgatcaatttgctcgtttttatcatttttatgtttttcttcttcaattaaaatttggttttttgcattaatcggaaaattttgtcgtttcccgggtatttaagactaaaagatgaaaatttgcaaaaaaatagggttttttccaattatatgctaagattcatattaaatatctgctcatatgctatgaagaaatgggctcaaaaaagcatttctacgttaaaattttgatttgatgaggttttttagtccatataaatccatatttagcgtttttagtttatatttcggccatttttaggaaagtttcacaaaattcaaatgcatcgctaagattaaaattcgcaaaacaaatcgtccttccagtgtttatgtatagcttataagcagggttgcgatttttttaaagatgatcctttaaaggaaaagaaaacattttctgatttattaaaattagacttattttgttgcaatttccaaaatgacatgaaaagtgccgatgccgtcgctcggatggcatttcgaattccgtcgcctttcgccgtcgccgcgttgcaaaagtcgccgaagcaccagcaggtggactcctcgacggagctgaactcgtccagacagaccaacgcgcgttgcgtgtgtttgcattcggtgttgattttcaatttccagacagaggaat

SEQ ID NO: 24258 - DNA, 1546 bp, Heterodera glycines
ctctctctccctgatcactcttattttctctcctccacatctctttctctctcatttttctatgacttctctgtcctctctctctctctccctccctccctctctctcggtctgatttttatcttattctcttccattttcatgtttaatgccccatgcaccagtattccccgacaaaaaaatattattttttctgcactccccccttgccagactttccccatgtcttatccccccccccccggtgacaaatggcgccaaaatgatctagaaaccggatcagccacagcaaaaatgtccccgggcgatttggccccaaagaattggaacgaaattttcagcactcatcaccttaatttgtactttttgttattttaaacagtcaattcattagtttaggtaactaattccatctgtttttattctttttttacgaaaatatttggtcgagaatttattacttttgaaaatatctgaaaaaaataaaatatattttttcgattttttatttaataaaatttaaaattaagccaaagactcgaaaattaataaaattcaatagttcaatccgtttttatgaaagccaaacaatcctttaactaaatttaatcgttcagataaattaaattaaaaaataataaaaatattaatttatacatcgcaaatttttaacccattttaaattttttggcaaaaaaaaacatacacttaaaatattttttcattttttgattaattaaagttatttttcaattttaaagacatcataattttttttctcgctttttaataaaaataatcagttttcgacttattccctcggctaaatgtatcttgtttttcatccttccaccaattcactttttggagtttgttctttcttcatcttttgagtgtgcaaagattaaaatttgcacttttagtgctgttctttataaatcgccggaaattcgccgaatgaacggacggactgtgccctccggcgccgttggcgttgtgtcatttgggcgcgcccttttccatcacacatcacataacgccaaactgtttttttgttttcctccaatttcattcatccaagttcataggcttatcccttactatatattaagtgaggcgaagctccgcccacttttgcccttttaaatttgcgcctaaagtggtgttttgtttcatagagaaaaagaaacataaatgagaggatgggaaagagagtagagagagcgaagggatagagagaaagagagagagaggtgagaggatgagaaagagagcagagagagagagagatcagcgagaaaaaagagagaagggagaaagcagtgagagagagtagagagtgagagagagagaggtgagaggatgggggagagagagcagagaggatgggagagagagcagagagagagaaagtaagagattggggagagagaggtgagaggatggtgagagagagcagagagagagagaaagatatcagagagagaaaaagaaagagagaataaagaaaaaagtgagaagggagaaagcagtgagagagagcgaa

SEQ ID NO: 24259 - DNA, 1817 bp, Heterodera glycines
tggaggcgttgcgcaagaaccgcacggagcaggtggtgtccatccggaaggagaagcgggatgacatcatgtccaaacggcgcaacattccgaccgaagagtgggttaattaatctggaaggggggggggcgtgagaaggctgatttcggaacaagaacttagccgcacttacaattagcgtgtggtcttatacgagaaaattttttgtaaacacatggaaatggtggtaaccgccagcttttagcgccactgaggacgcttcgacaagcaatgtcactggcgttgcggtgccttacgatcgtaccaatttgcaggtctccgtgtcaatttcctaacaattcatcactacatcctttgattgttttttaggagattgtggtccaagcgcaaagtgctgacccggaagtgcagatgctggccgttacccaggctcgaaaattgctctcctccgaccgcaatccgcccatagacgacctcatctccagtggcattctgcccatcctcgtcaactgtttggagtcgccaaagtataaattacaaaaggggtgtactacttctcccctgaaattttaaacaaactttaattattaaaaaaattcaagaagaaatgatgtgggaaaagctggggtcgggaaaacgagctaatcctttaaagaatattaattaaattcatttcttttaattctgatttatttaagtgccacgcttcaatttgaggccgcctgggccctgacaaacatcgccagcggcacttcagaccaaacacgcgctgtcgttcaggctggagctgtgccacactttttgaagctgcttgagtcccccaacatgaacgtgtgtgaacaagcagtgtgggcacttggcaacatcattggtatgaaaaatggggccaaattaaattaatgaaaattgtgggtaatgactattttgatttttatcattctttccaattttccttttagcacattaattttgcgtttttggttcaggcgatggacctcactttcgtgactattgcattgagttgggaattgtgcaacctctgctgaaatttgtcgctcctgaaatccctttgaactttctacgcaacgtcacttgggttggttttttggattttattgctgtcatattccatttcttttcaggtgatggtcaatctttgccgtagcaaagacccgcctccgaaccgtcaaattgttcaaatgcttttgccgatgttggccattctcatccatcaccaggacaccagcattctcgtggacactgtgtgggccctgtcctatctgaccgatggtggaaacgatcaaattcaattggtcatcgactcgggggttcgttttttattaaaattgacaacagcaaatatttggttaaaaacaggttgtccaatatttggtccctctgcttggccatccggaagtcaaagtgcaaacggccgcactgcgtgcagttggcaacattgtgaccgggacggacgatcagacgcaattggtgttggactgtggggccctccaaatgatgccggcacttctctctcaccaaaaggaaaagatcaacaaggtgggcggacaataaaaatccatttttgtttctctgtttgactttaaccctttaaatgctaatgctaacaataaggaggccgtctggtttttgtccaacatcactgctggcaacgaaaatcaggtccaatcggtcattgacgctggccttgttccgatggtcatccatctgctggacaagggcgatttccaaactcagaaggcgagaaaaaaaactatgagttttcacatttatccatccgccatctctttaggaggct

SEQ ID NO: 24260 - DNA, 1291 bp, Heterodera glycines
  unsure (1)..(1291): unsure at all n locations
cacgcttttgtataatcctatggtcgagtttgttttatcatatggtcacttntaatttaccgttcatatacttcttccgtcggatttggtttgcacaacgaaccgttgaattgcattttcggatcggatagctcaagggaatgcgacgcttggacaaactttaaaggaattaaatttgtgaccgaaataattaaaaatagaaaaatagtttctaaatatatcatttccataaagcccataaaataaaataggaaaatctttaccctaaaatttggtccttttttgtcgggttgcctttcttttacccatgcttccatggaacagttgcagctgcggtggatcgacgattggacaaacttaaaggaattaaatttgatcaaataattaaaatgggaaaacaattgttaaatatatcatttccagatagaccagaaaaagaaaacaaaattgttaggtaaatccctaaaaaacgggtcccttctgatcgagttgtttttctacccatgcttccatgaagcatttggagctgcggctgatgaacagctccatcttaagctgttctctttgttctgtttggtgtgccatcggcagcatgtcaagtccaagaagccaaaggtcggcataatccgacaaaaaagacggaccatttgaacggaggaaatcattttgaatggcacggccatcgaagtctgagaatggcattttgggaaagccgagaatgccaatttaaaatatataaaataataatattctcaccattttcttccaaagaaaagcgagtgaatggctcagcaatttgattcgatgcaaaaagcacagaaaaattgcgttgtcctgcactcaaattatatcttaaaattattttaaaaattattttaatacaaattttattttataaacgtgtaatattaaaattttaaaataaattcaatttcgcacttttgcttaaaataattaaaaacattcaactgtttctgtgaagcaattgatgactcaaaaataataatgcttccaatgttttggtccttttgcattggcactgtgcgcaatttgaggccacgccaaatcattgtgctatttttgtggacattttttgccatttttttaacacattcttctgcaatagaattgccctggggagggggttaattatgtacttaataattagccagaaattgtggtgagagagagcattttaccatattaacagcaacgatgaattttcttttaactttataatttctgttcgtgtccaaatgatcgcctcgttgaagcattgccgggtagcaga

SEQ ID NO: 24261 - DNA, 314 bp, Heterodera glycines
ctgaagacctttttttttgctatttacccaataaaaaatactttttttcccgctgctgggtaaaaattccacttttttcactaaaaaggacccaattttggccgttttacggcaaaaaacttgaaaaaaatagtggaaaatggaggtccggcggtgccgatatgcgccgccgggaaaaaatttggaaatttgagtgctatttgttacgaaaattgcctattaaatttttaaattttcgtttggggggaattggaaaaaattttccattatttgctggaaaatttttaaaaattttcattttggggggggggatt

SEQ ID NO: 24262 - DNA, 900 bp, Heterodera glycines
gtgattagcgctaaaactttaacaagtctttgccaacttttaaatgggatcgacccttgggagagacttttgatttggttaatattctctcgaaacatttttcagttaaagtctcttcttatggtggacaatgctcagcaggacatggacattatggccacgaaaaggcattccattgctttgctgctcaaaattgtgtcctctttctcccaggccattaaagttcatttgtggttaattatgctataattgacaacattttctcccttacaatagccctacggccaaactctgctcgaattggtccaaaccgtcactccgttcgtgtcgatgatgcaacgggccaacctcgtcccgattttggccgcccttagcaatttagcatattccgtagacgcacaagccacttttctcagcacttcaattcgcgcggacatcgaattcattgaaaatgagcctttctccgccagtccgtccaacttcctcatgcacagcggactcacctcaatgccggaccaagtggcggtgctgaaccagcagtgtcctttctatcagaatcggctaaatgtcttttggcttttcataaaattaaaaatgtttgaaattttagctaaaagcgagtttgacagctttggaaggcgttctcaaccaaataaatatttcgtcggatgaatcatcttcgaaaatattcgctctttttcggcctgttatcccaaaattttttcagttttgcgagtaagtttttgtttaaaatatctaatttcgcgtttattatttgtctttttggtgtctgaatttgatttatgaacaacaaaattcgtctttgattcactccgtttatgggccatcagtgctcgaaatgggctcttcggagaggctaatgcttgtctgtgagtttgg

SEQ ID NO: 24263 - DNA, 1748 bp, Heterodera glycines
cagttaggcacgaaaattgcgaaaagtggaaattttggaaggttcttcttaataaaatttttacaggcttgaaaaacttttcgtctttgataaggctaatagagcatgttaagagctttcgaatgataccaagattgttagatttagatgccaaagaaaaaagcttaagtggaaaaacgagctggcgccgaaacgggagccccgaaacacgagcgccgaaacgggagcgccgaaacgcgaacgccgaaacacgagcgccgaaacgggagcgccgaaaagcggcggtggctccattaataaagtttataccggatcgtttgaactggtgttaattgaggccattttttggccaattgtttgtgccaataatttaaaaattgaattcacaatttctgattggaatctcttttttttcactttaaaggctaccgaaaaaattttctaaattcaatttgctgaatcagtttaaatatgtgcctcctcctaattgttatcaaatttattatctgatttttcctttttgtttcgttaagtttcacttactgaagttgcaatttaattattcgggtttcgcttgaaatttatttccaattaaattatatttacttttgtgacataataaaaattaattaggctgccgtttgtgcgcgaaattttcccgcccaaactacgcaccggggcggttaactacttttctgactaattttctctcaaaaaagcgacagttattagtgattatttatagcctttttctgttaaagtgctcccatttgctttccaaaatgcgggaaagaatggcgtgcaatttaataaattaattgataaaatgaactttaattcacacacttaattgaatttgcttaaataaatcgtaccaatttattggaaaataagtgatcaaataaattaatttaaaaaatatttgcttagaagaataagacaattttcatgagtaaaaaggacaattttatgtaaaaaattagaatttttttagctttcgaaattaaaaataaaattctcttacttttataattacttaacccattttgtaccaaattggagacaaaataattgccaagaaattgggaattggaagtgcaactctgaaaagatggaaaaggaatttgcttctatttcgaaaaatgtgattttttacggtacaaaatgggtaagataatcataaaagtaagataatttttaattttatttttaatttctatatttaagagactcaaaatttagtgaagaaaaattgcgaatttgaaaaacccgaaaaattttacatattttctctatatctatttcacactattgcaaaaatggtttacatactaaaaaaagtgggcgccggacttttcgacagcaaaggacatttcggcaaaaatattataaattttaattaaaggtttttcgacagtaaaaagtaattcagtttcaaatttagtggggtgttaaatcttaaaattttctccaaaataagaaacttaagccaattcagtattgagcataaacaattaattttggagatgaatttttgagaaactttttcattcttcttattggtgtatttttgaaaattttaggcggcccattcttaagggatatttttctgaattttcctaatggtttagcaatacataaaatttaataaaattgacaaacaaatataatttattttaataagaattttttgtttttatgtttactgtcgtaaagtccattattttttgtttttctatcgaaaagtc

SEQ ID NO: 24264 - DNA, 997 bp, Heterodera glycines
tttcgtccccaagtcctctaatcattcgctttaccgagtataactgcttaacgagctccagctatcctgggggaaacttcggagggaaccagctactagatggttcgattagtctttcgcccctatacccaagtcagacgatcgatttgcacgtcagaatcgcttcggacttccaccagagtttcctctggcttcatcctgctcaggaatagttcaccatctttcgggtctcagcgcatacgctctgtctccgccccatcgcatgcgatcgagacgggactatgttgcgccccaacaccgcagtgccagggatcacacatcagctccgtaagaagccttcactttcattgcgcctttgggttttgaacacccaatgacttgcgcatacgctaaactccttggtccgtgtttcaagacgggtcgaacagatgaccggcttttacaccgagaacgcacaactgagagcccgagctggaccgaactggttgctggtacgtgtcgcacgcgaccgccaccgacccccagctcgagtcaacacggacccgaaaccattgcacaattcacccagagtaaacagcactcccccgatccgggtaccagaccccgaaaggctggcctcaagaccgagctcacgcagctactccgagcatctcagcgcactccgcctgcaaatgccccattcgccactgaacagaaggacagcaaaccccagtctggaggctagcaggccaacgtacagcaacaaacgggtgaatgcagaccagatacgccagctctgtccgtttccacctcatcggtttcacgtcctctttaactctctcttcaaagtgctttgcaactttccctcacggtacttgttcgctatcggactcgtggccgtatttagtcttagatgaagttaccacctgatttgggctgcgatcccaaacacccgactccagacacgtaaagatgggtaggcacccccagtggacaggcctgcacttctctggagccc

SEQ ID NO: 24265 - DNA, 1900 bp, Heterodera glycines
tcgaaacgaggcgaaatcagtgccaatttgaggccgagttgggcatggtcaaaaaatgctaaaatgtccatcaaaacatcagtacaaatccaactgaaatgagaaaaaaatataggataaatttttaatttataaatttcataccgtcggttcatttttgctgcaattagcacacactttgccctttttccaattgattagtgtcacagagggcaaacaatgtgaaacttaaaatagagacactttaggaaaaatactagagcaagaacagaacccaaaaataggtataccggtttccaaggacataagaagaaagggactgggtcgttttggcgccgacgttttggcgccagcctcagtttttttattttaactttttttcttgttgaccaaatctaacaatcttggtatcattcgaaagcccttcacaagctctattagccttacaaaaaacaaacaaaaattttagcttctaaaaaagttattaagaaaaaaactcaaaaatttcgacttttttggaatttcatgttataacttttttgataattgtctaatcgcgaagcaatagcttagaaatatcttctaaacatgttaagctttcgattgataccaagattgctggatttggttaacaacaaaaaaagttataacccaaaaacttgggctggcgccaaaacgtcggcgccaaaacgatacggacccggaaaattgtgagataaaaataaacaaaaataagtttcttattgattgaagtgtgctctttcttctgataccaaaataaaaaatttatcttaatgctaagtatttttaaaaccactttttacaaaggtagtcaaaactcgacaaaaaaaattttagagagaaaaataattttatgaaaataacaaagaattaactaaaaagacctctataaaattatttttctcaataatcaattgtggtaattttttgagccaatttaaacatttttcaaaattctttaaaataaattaattttaaaataattctatccctctaatagtgccacgtaacaaaaattatcccataaatagaagagaaaaacaaaatttttatgtgaatttacccaaaaattgtctggggtcaaataaccggtagaataagatcatagttcatggtcgtttgacggagggtggtagtcaaaacggcacttcgtggtcattttcttattctacgggttaccaccaacttcatggtcatttgaccaggtcatttaaccatggtcgtttgaccccgtcatccgattaatccaaagtcatttttatcaatgttgcttctttttttttacttgatcattgtgactggcgattcgtgcaaatccatcggatgaggcacttcaaaacagggatatctgaaagaaagaaattatttaaataactttgaaattaatttaaataacttttttttaaattcgggttcgctcaaataaaatacataatcaattaattataatgtaattaatttatttctttatttaaatgtaattaatttttattattaattgccattttgtacccttgggcttgcatgtccacaaccagcaggtcgttgcgcaacagcacagccatggcgtgcggatgttgtgctgcgctggcgtagggcgacgcgtgcagcggcaacatggacacgattgggtggtccatctgaaataaaattaaaaattaattaattaatgatctaattgatgagcccacctccagcacagtgagcgaccctttggcacgcatcaccgtcaccgatggcaatgcgccctcgtccattggcatgcctaaaacggcacattttttcaaaatttttcaaatttcatggacgactttttgagtgttggtgatgatgctttttcatagccgaaaaatttcaataaaatttaaaaaagggctca

SEQ ID NO: 24266 - DNA, 1590 bp, Heterodera glycines
  unsure (1)..(1590): unsure at all n locations
atttaaaatcaaatagggtttttaattttaatttttcattaattttgtgaagtgccattgtggagcgcggtctgtcttctgtctcggcacaaatgtgcaattggatgatgcgaaacggtaggccaaaatgcgcggcatccaaaaacccttcaggcacattctcttttttacgcttttggcacttttaaaatggcactaaattttgtttaatcaggacaataaaatgcaaaatttgtgaaggatgacacagagagattctccgctgcttaaatccaaaagcccataaacccgtggaggagattggatattagggcacccatcttttaaaattggatttaaaggaatttcgatccaaaatatcggttcggaaagtgatgaattctctcgttttggaagcgacttgcttggtccttaaaaacaagcacagtcctgaaaaccaaaaatcattgcaatccatggccgggggggggggggggggagtgaccccgggaccggtaaattggacaccggaaaattggacaccagaaaattggacaccaagcggaaaaatggacaccgccggaattttggacactaaaggaaaattggacactaagatttcctttttaaaaaaaatcaagaattaggtgaaaataaatttgagtagaataaatgggttaatgcattaaggcacttagagtggatcaggcattcgataggcaattgccctcaaatattggaggggatgacgatcggcacgcgttgcaaatatttcccgaagattttcatcttgctcaatataaagctgtttgcgtttcattcctttccctctaacgtaacgattgatcaatgggccaaaaaatgcaccagaaatgagggatgattgatcaatgggccaaaaaatgaaccaaaaatgggtgacgcttgatcaatgggccaaaaaattaaccaaaaatgggtgacgattgatcaatgggccaaaaaatgaaccaaaaatgggtgacgattgatcaatgggccaaaaaatgaaccaaaaatgggtgacgcttgatcaatgggccaaaaaatgaaccaaaaatgggtgacgattgatcaatgggccaaaaaatgcaccagaaatgggtgacgattgatcaatgggccaaaaaatgaaccaaaaatgggtgacgattgatcaatgggccaaaaaatgaaccaaaaatgggtgacgtttgatcaatgggccaaaaaatgaaccaaaaatgggtgacgattgatcaatgggccaaaaaatgcaccaaaaatgggtgacgcttgatcaatgggccaaaaaatgaaccaaaaatgggtgacgattgatcaatgggccaaaaaatgcaccagaaatgggtgacgattgatcaatgggccaaaaaatgaaccaaaaatgggtgacgattgatcaatgggccaaaaaatgaaccaaaaatgggtgacgcttgatcaatgggccaaaaaatgaaccaaaaatgggtgacgatttgatcatgggccaaaaaatgcaccagaaatgggtgacgattgatncatgggccaaaaatgaaccaaaatgggtgacgattgatcaatgggccaaaaaatgcaccagaaatg

SEQ ID NO: 24267 - DNA, 1059 bp, Heterodera glycines
actgcgctgcctaacggcggtgcttaaagtgcgctacccccccccgaatgattatcaatttttatttttcttaattccaattcgaattcgaaacgcaaaaatttaatcataattcatgtggtaaaaaatgcatttaaaaataaaaaaaattcttgaatttgcttctgaattttttaattttaaatagaaaattactttttcgaaaattttgcacaaataagaggcggagaaattcaactaaatttttattaggattttgatttaaaatgttgagaggtttaacaaatttgtacactgaatgttggatcgtcaacaccaatgagaaatgactaacagaaaagagggagaaaagggcgttggcttaggaaaatagcttataataaaggagagacgagcagacgatgagtgagagaaaaatagtggtaaaaatggtcaactgctgcattggcagagtcagagaggggtcacaaagagttcgcacagcatcgaatatttccttcattttgggcgtcattcttccccactgcacttctttcttcggtttaattacccaagtttgaggtacttggcgtgtcctgcccataatatctgtggcatggaataaattttggaactgcgctgcctaacggcggtgcttaaagtgcgctaaaaatgatcaaatgattatcaatttttatttttcttaattccaaaatgaattcgaaacgcaaaaatttaatcataattcatgtggtaaaaaatgcatttaaaaataaaaaaattcttgaatttgcttctgaattttttaattttaaatagaaaattactttttcgaaaattttgcacaaataagaggcgaagaaattcaacgaaatttttattaggattttgatttaaaatgttgagaggtttaacaaatttgtacactgaatgttggatcgtcaacaccaatgagaaatgactaacagaaaagagggagaaaagggcgttggcttaggaaaatagcttataataaaggagagacgagcagacgatgagtgagagaaaaatagtggaaaaaatggtcaactgctgcattgg

SEQ ID NO: 24268 - DNA, 2253 bp, Heterodera glycines
ctacagaagtttggaaccctaacttaaaaaaagatatagataaacttgaacgcgttcaaaagtttttcacgagaaaagcacttagaaaatgtggctttgtgtacaaaaaatatggggaaagactaaaaatcactgatttacacaaattagaagaaagaagaaaaatcaatgatttaacaacagcttttaaaataattaaagggttcaccagccttgaggctgagcaaaattgctttttctcggaaaggcccaggaggcctttacttttgcgagtaaagcgccacacggccaaaactcaaaataattttttcaatagaatagtaaaaaactggaataatcttccactggtagcggtgcaaattaataaggcaaaggaattcaggggtttactaaaagcaatgagttctgagtaggattttccatgttgccatatttacactatatttttatcacctgtgaattcaacatttgattgaattattttattcatttttattacggtattcattttgtattttttatttgatcaaatttatttgtttgttttcatttttgcaccatgtaagagcactaatgtgccgtgccgttggtttgctcgataaataaataaataaattcgtgctctttcagatgggcttaatcattttttcacgaaaatcttttttcaacccacgaggaatttatcaaaaactttctcgatttcaagccattttcaggttttcagatcaccattgaaggagtgatctattttgtgttaccaaaaccaaaatagaaaatttttttattaagaaatctcattttttggcattctgcattgctttgcacaatataaataattaatttgcgaaaaattttatcacattgtttagatgggctctgcgcaaattcgggcgattgtcccaacaaatttctttgtgcaacatttgcggattcgaaattgagtgccaattcgtccaaaactggttactgtatcccgggaataattattggcaaaattgtgaaaaacaatggcaattttcaacccgattgttcaccggcaccgcaaggagcacaaaaatgtagcgggcttaacggaatttattatgtggacaattaatgatgacggatttattttgaacatttttgatggcatttaatgagattttgaaatagttttaattcaatcctaagcttttttttttgcctttttgaaagtcgaaaattcgtttcgttttttaatttacatatttataaaagtttttgaattttattattaatattattattttctggcgtaaaccctgctgccaacaacaaattgagttttgactcccactgaaaaacgcagtaaaaatccaacgctattgtttatattaattatatatatatatatatatatcaaatgtttaaaccttaccaaacatttgaacattccaaaaattagaaaattttccaacaaccactctaaattgtccaaataaaaattacatatttttaaaaagttttataatagtccaaaaaataaaaataataataattcaaaaattgcttcaattgcccgcggctgcctgagggcaagaatttttagaacagcacaacatttaaactttatacaacatttaaagattacaaaaattaaattttcattttttacatttaaattatccaaattaaaaaaagaatccatatttttataaagttttaattagccccaaaaattttttaaaaaatcgcttcaattggcccggcgggtgccttctttctttctccctcatcagcgcacggcatttttctatttgccaacaatgcgcacaatgttcgcgctgcacagtccgcaggtcaatttacagacggccatcatccgaagtatcagaaatctgttcaagcattgtccggcatttttgatgcgattacagaaagtgtttggcatagcgtcacgacaatttgcttgaccggcactgaacaaaacaaacaaataaaaattaaaaaaaaaaattattcgcatgagtaaaaattaattaagtggtaaaattgatgttagaaaatttgccaaattttcctttcgacttttcagatttaactgatatgtggattatacatagtataaccaaataaccaccagcgcgggcggaaaattagaaccccaaagaatttatttttctttaattataaccaggactgcaaaagaccaaaaaattgcccaatatgcatcaaatatgcacaaaaatcgcaaaatatgcaccaaatatgcacaaaaaaatttgatttaatttt

SEQ ID NO: 24269 - DNA, 1546 bp, Heterodera glycines
tttcctcttcccaaattggctgttcttctcccactggtttcccctgctccattatcattaattaatattaattaattaattaatggtccgtttaacaccaaatgagtgtcattgttatcgctttaaaacaaagacactaacccaaatgccaaaaggatgttgcgaagaatattttgcggaaaatcaaagaaacattcgcattttgacactttggcgaagcgaaaagagaacaaataaaaaagaataattaatgaagcaataaaaagttattagtccaattcacaaacatttgtatgttttgttaagcatttgcaataattatgcactgattaatgaaagtaatgctcgagaatggaatgaaaaaggaaattcccgagttgggctcggaatccccgagcattttcaattaatgaacgcttaattgaattgtcggtctctgccgttatcagactgattattctcaacaatttgtcaacttatctttcgcttttctctctctctcttcataactttagctgtctctctcaccgtctctctctctctctctttcttttgtttgtttgtctgtctgtctgtccattcatttactgtctcataccctcttttttttgtttttaattctgctgattgacctcgctttaattacgtcaattagctgcccaattagtgatgggtctccgccgtcaccgctttgctttgacgtcacttttcgcttgtgtttccccgtgcgccctcaatttctcgtaaaatgttacaaattccaattaggaaaataaaatgcgatggttatttttagatttaaaatgttttttaaattattatatgctaaaaaccaaaaatgaaagaagtgccaaaatgtgtattaaaattgccataaaaattcaattgtttttaatgagttaaccatttgactttaatttcgacagcctaacctctttctttcttatgggtctggattttctggattgaatggtgctatgaagttagtcaaaaaaccatcaaatgaaaatattttctgatataactttacacaaaagcaaccaatttttaattttgatataattcgatagccctaagtattttttattatcctgcaaaatttcaaaaagtttcataaataattaaatctcatttctctcctcctaaatttgtcgaaaagttcgatttaatttaattattctttaggtcgtgtatactaaaatagagccaaatatatttattattaaaagattgttattcaattataaatgaattaattaatttaattatttaaattaattttctgtactgaaatgacccgcctctttcgatcacccatcatcgatacttttgacacttcgactcaccacgagaaaaactttgtttagaagaaagcggacaatgttatttcataatgtacatttacgtagttaaacttttacgatttttgacaattaccatgattatatttatagtctgttcaaaacctgagaaatatccaatgaattatttttaattgaattcatttcgaaattattactaaatttggtcacttaaattatatttc

SEQ ID NO: 24270 - DNA, 1408 bp, Heterodera glycines
  unsure (1)..(1408): unsure at all n locations
acgaatgctcatcgnncaattaaatgtttagttcgattttgtaaaataaatttggcaattttttttttgtaaatgnaataaaatttgccaaaaaattgcttttttgttttgnatcgccttccatccgcaacaaaccgtgctcaatttacgtgcatggtcacgctccacgtcgtccaactcgcgttcgttgcttttgtgatgcgttttcgtgaggagaagcatccgacccaccaaatccttaataatcgttgattgcaattaatttgccagccaatttttatttaaattattttttaagtcatacacccaaatgaatactctcttaattaccgttgttgaaacccccggggttcggctgcattctctgtaacgccctgcttccttcacttcggcataagtgtcctttccatcggcggtcaaagttatgtcatctaatggacaaaattggaaggggttaaggaatttttacaaaaaataaataaataccgccatgcacacaaaagtcacaattattctcatccaaagttttcaaggtggtcacatatggagctgcttccacaatctgaaaaaagtcagaaataatagtttctaagttaaaagataagggtgaaaaagatattgtttttgtctgaaagttcctaagtgagtgggcattttagccaagtgccaccaaatgtccaaatttacttcgtcgacccatttgatgccgcggaccattcggtaccgttctttctcgttgaaaaccggagggcctttgtgctttccaatttcttcgtcattgtgaacctgaccaaaaagtaaaaatgatgatataatacatggaaatagaaatgagttcaaaaacgaaccccaaccaccaaataggcgcccatttgtttggcttgacgaagttgattagcatggccgaaatggaccatgtcgtaactaaatgtcatatgaaaaagacaaattgggcaaacaactcaccatccatcacaccacactcgatagttgtgcttcaccacttgctctttaggtccaccaaattccgtggtaccattagcattagcagttgatttaaccattataaatatcttaaaaaaaaaacattttagtttaatttaaaaaacaaatgaaaaacgaatttttaaataactatttgtgattaatttaatcatgtgacatacattttaaacaaaaatgaaatttaaattacaaaggaatgtttgaggggtcgtcgtttgaatgaaaggcaaaggaaacgaaaaatgagaaagggacaacagacaaacagagtataaataacggacgatgggccgattgataaaattggggcggggcgaccctttcttaaatcagcagtgatttcttaatcatttaacgtgtaaatataaatatcaacaaaaaggagaaaacaaatttttacaat

SEQ ID NO: 24271 - DNA, 1722 bp, Heterodera glycines
aggtccccccacgaagccgatgatgaccagtatattatgggagagacacgaatccattcgtggaatagcgttccctatagcctgtactttaattctgcgttggatttttgctccccataagtgtttgagtaccccaaacggacacttgaaaaaatcgatttttttgattcataaatatttttttcagaaagacatgcgcacccgtccgatctggcaagttaagcaacgattgatgactacccaaaaggttcggtgccgtgatgaaacaaaccagcactgcttaccccgcggcacccggtacggtcccccgaaagaaaggagttaattaaattctctccttcggtatatttttttccattatgtcgaccgctaacgatcgattgctctagtcaatttttctaaatttttgctgaaatatttgtcgtgctctgaagggagtggaatggtgaggatatattgtattgcttacaaattatttaaactaaataaaacatcactttttatatttttattaaatacgtatttaatgactttttgattttgttctgtatggtccgagcattcatcgattcaataaacaaattaaataataatttcttatttcttttaattaacgatttaaaatattagcgcgtaattatcttggtcttatttggttattatgttgtatatttattatcaaatgattatgttcgggccaggccgttttcgcgttgctggggacgttttcgcgtgagggcctgtttaggactgaagttctactaataatacctgcagagcattagaccgtgaacaaattattagaatatatatttgtcagtcttaatttagtttctaaaattcactttttcatttaaaatatatattgaattaagcacccgaagtaaaatgggagtgaaacaaattttcaaaatataaaaaagtaaaaaattctcttatatgcaaccacacgaaaacggcccacgcgaaaacgaccctgaccggattatgttatgtcctcttgctgtacacagacgctaataatttacatacttaaatgaataatttgctttatgtcaaattcaaaaaaattcatgaatttattttttattatacagaatatttataaaatgaattgcaaaataaattattaaaagttttctttaaataaatatttatatatttaatttttaattaaatccatatctaggagagttttaaagatttttattattttttctttagaatgtatacaattataaaacatatttgaatatagtggtattatgacttattctctataatttatatgtctgatagtcatgaaacttgaattatttaaaaaaaagagaatattcggtttaaaataccttggtgtaaatcatgaatgtacgttccgtttttattttaattattaatgtctttaagttataagaattatatttattcgttttaatttctttgtttaaagcaaaatatttttatctaacatttatatttcatctttttttataaaatttcagattctttttcagcacaaaaaaaaattcattaaggtaaattcaccttgacaatatatgtttttttatgaataaaaatacctttttaatttgttatatttatttatttttactcatggactttgttaatctttattatatttggttttaagtttttaaggttttatttttgttgtgtgtatagaggtaccttatatcggtttaatatttattgtgcatttat

SEQ ID NO: 24272 - DNA, 2018 bp, Heterodera glycines
taattaattacatgccgacaaatcaagcacaattgtgtcgccttcgcaactccgctgatgttactgttgttttcactgacgatccgtctattgaaggagtgccacccgtaacagtgccagcgccggcgccagcggggagaaagcggttgacaaatgaggactaaattaattaattaattaataataattgttcttgcctgattcgcagattgaaaataaaagattttaccacgaaaaaatttttaatagcagtatgaaactgactggaccaatcaaatcgaatgatttaaaatgtttaaataatttaattttgaggtttaatagtgaaaataaattttccggcatttggtcgcgcaaataaaaaaataataaattagcattttcgacctataagccaaaaaaaaaacgagggaaaaaattgccaaaagccagaaaaaaaatcgaatttactttaataattttcggtataacaataaataattgtcgtaacatggctaacaatagatttttgaaattttcattttttacacatttacattttcccgataccagacccaaccacccacccacacaccttcttccccccaacagcaatttgctggtgcttctgcttggttttgctgctacttttcgtgttcatctcctgctgctgctcgtgctctgtctgctgttgttgttcttcctcgtcgctggccatctccacatcggactcttcagtacggtggcggtgtcgcgcctcgggcgacgaccccgacgacgaatggggcgacgtcatgttctgctgctgcggttggtgctgcttcggcttcagctgctgctgttgcttcccgtactgcttcaccttcttcttggacgaacatcgatgttgttgatgatcacggtgcctgtccttgtcctttttgccctttttcagccttttgagcacagctttttttgattttttcaacggcggtggcgtcggggaatgcgacagctcgcgctgcttttgctccttgcgctgaaatttttgcgattttttttctgtaaaaattttgaataatttttttaaatttattttttttgtttaaaaatttattttaattcaaaaatcggtttttgttttacatatttccattttccatcataatacctcactctaaataattattaaataaaaatattagctcagaattttgtgtttacctcacccttgaaatcggggctttatttcataggggggttctatctaatacaggggagagttctcattgcgtaaatacggtattttcataccgtacccccgcccacccacgcgctgtgctaccgtagtgacaatatcgctgtagtccaatgacttctcacgctcgagcgacgagcgatcgtcaccagcaccggcgccgccacccaatgacgaatttgtggcgaccgattggctgctgctgctgcgcgagcggcgccgcgaccccgccgagcgcgaacgaccagcgctggagctgcgccgcgagttggccgagccggaccgtgcccggcgcggcgatgcgggcgagcccgtgcgactgttggtgtcaacggagcgcgagcgtgaggccgaccttattgcgcgaaatatgggcataattagggctgagaaaaattttgtttttatagccacggctgggacaattaagggatactttagttttcaatagcagcaaaaaattatttctgctggggtaattaatttttggctattatctgtgattgttttaaggcttttttgggtttgtttaccaaattaattattttgcttttgcaggaaagcaatttcaaaaaattaaagtgttacgaatttttttcctcagaatttttgtgcatacagaccggaacctgggttaaaatatcaaggaacctgcgttttttaggaaatttgtagaacataaaaggtaactcgcccggtggggctcgaacccacgaccccagcaatccgtgccgtgctctaaccaactgagctacgggcgctacttatagaggttctctcaggtcctttatcccactttctc

SEQ ID NO: 24273 - DNA, 1395 bp, Heterodera glycines
ttttttttaattaaatgaaaaatttgcgttatcgggattaaattgatcaacagattcgattcgtgcgatttcgaagtcgcagtctctcgctcgcttctcgtcaaattgcccccatcttcaacgatgaaggacgaaatttgaaaggatggcgaactaggtcaaccatcatctttatacaccgtttgggaggagcaatgggcgaatgggagggaaaaagagggggaggagaagatggagggggaaagagagaaagggggggggggaagagggtcccgaaccgcgacaacaaatcggactgagtcaaaaaacgaacattgcggtttattttttgttaatccaacattgaagaaattggacggagaagcgatcggaaaaggatttactgcacatttgcaatgattcatgggcttataaagggaaggatttgactttgattgaagaaataatggcgacagaagcacagaggacgatcttacaacaaaaggaaaagtgaaaaggaaatgaaaaactaaggcatttaaagagggggaggagaagggggaggggatgataggagaaggaaaatgtgaaatcaaaaatatgatcaaatcaaattaaatctgaataattggcatcggcaaatattcctgcgctgagacaatcacttggtttagccactgaaacggacatttcggaagcatttacaacttttccaagcaaagtaagtgcccattggcccacctgaagtcgttgaatttcgtctttgaatgccacacaaaagccggggaatttccccttgcaaaaagtcgcccttttctctcttccgtatacgaaaaaggtcaatgggtgcgggtagggacagcgccggtcggactcggcaccgacaaaccaaagcacttcgtcgactttccattggcactgccttttcattccgcgtgaataatggcacacgtgcactccgtcctcaatgcgaagtgaggccgtcttgaaagtgcgcgagccgggctcagccaacttcaaatcctcagcaaaggcacggccactctcaaaagggacagaacgattggcaagtgagagaagggcgactgatcagttttttatgattagactcattagctaattgagtttatggccgagtgatcagctggccgggaatcacttgtggttggaagggatgcggatccttcttcagcaagaggaagttgtccttctgctgctcttccactccgtccgtcatccatcgccccaatacaatcgatttcagcgattcatttgcgccaattcgtctctccaattgcccttttttgatcatttcgaaaagcgcataattttcgcaaggcgacacaaaagccaatttttgaactttgaattggaccacgtgtgaagctgtccattcctgattggacattaaaacat

SEQ ID NO: 24274 - DNA, 1448 bp, Heterodera glycines
ccccctttcccttcccctccatttcccgagcgccgcgaatgccgctgctgcctcctccttatgaggaacgctaccggattggcgaaacaggtcagtgcgtctggacggacctcggctggagcccgatttaaaaaatatataaaataaataaaaagcaaaaaaaaaaaaaaaaaaaaaaccttttagttaagtgccttggttttgcttttatttattatttttatgtgctcacttacatttttttatgtatgtttctacaatgttgttttgcgctttcttttgatttttctctctctccctcttcatctttctttttctatttataatttttgataacctatttccacatttatccctttagttaattctgttatggcttatttaatcgttctattttttatctttctatttgttctctatttttattcattttgtcatatcctttttaatcgtttttcttcttattttatttttttttggccaaaaagaagaaaagaccagggacggtcttctggtcggccgggaggcgtaacgtacagtacccctgtcccccccccgtacacacagtaacaaaagaaggcgcgtattaaggaacaaccaagaaaaataaaaaacaagaaaataagtgaggcatttaaactatggccaaagcagccaaactttttttctttttcattggggcgcaaatgagcactcaccgcccaaggagtgcccgtttctcctgtattcgctggtgcatttgctttacttttcactttgatcctccccttgtctcctcaaatccctttaggtcggacaatccctctctctatatctctctctttctccatctctgtccctcttcctctctctctccctccccttccttctacatttttctctcccctcttcctctctctctcttccctttgtccctcttcttctccctctctctccctttcgccctctcccactctctctctccgtccctccctccctctcccccgtcggcgaacttggcttgtctgaactgctcctcagaaggaaacagcaaaaaggggtcgcggaatgaccaggataactgaaagaacaaattgcttagaggggaaactttccaagcagtaaactgagcctggcaatggttccatttgtgccgatgcaaaactaaaagagcgaagagaagagaatggcattttggaaacttttgaaggaaattattttgcataaattccacaaaaaaaaaattaaaaaaacgaccaaccaaatcgtttggcaatttgatgccttcttttgagatttgtggaggaacaaagagaagaatgagcaagaaatgacaggccaaatagcgaaatgagaataaatgggggactaatcagaaatggagggaaaggcatggcgaaacagagaaagagaaatgggaaaagggagagagaaaaggaggaagaggaacggatgatggggagatcaaa

SEQ ID NO: 24275 - DNA, 2495 bp, Heterodera glycines
  unsure (1)..(2495): unsure at all n locations
aagtgaaaaaacaaattattccacgaagaattaaatgaaaggaacgaacaaaaaacaaactgcacctgattgcccccgtcctgcagctgctccatgtccaaaacatttgcccgggaagtgggcgaccgatccgtgcctttcttctttcctccgctgtgccctccgtcgtgtcgtcgtcgtcgcgtgattgtattttcatataaatttttcgttattgtttaagagctcccccttttttttgatgttttctggatggaaagatatcgatttgggtaaaaagactatgaaaaacaatacgaataaatcgcaaaatatgcgcataaaatatgcacaagaaattgcaaaatattcacataaaaagtgaaaaatatgcacatatatttttccatattgaggacaaattttcaaatttcttcatgttgttaaatttaagcataaaaatcccgaaaatagctaaaatagtatgaatgattattttagaaccaaaaaagtaatatatttatttattttgaagataattgagcatgaatggagaattttcaattttctgactatttttgggataaagcttcaattttttaataagttatctttttatcagaaaatataccctaaaatatgatatttttgaataattttcggtcattagagcccaaatggccgctttaaagccgggtgccgtttaatagaagatctattgagacaatggccaaatatgcatgaaattccgaaaatatgcacaaatatgcaaatacgcacataaatcgcgaaatatgcatatggaaatcaattcttcttctagaagcttctaatcaagttaaaaacatgtttttcatgcgtttcaggcctcccgcagttcaggaaaaaaatatgcatgtgcatataattaccagccctagtaataattgtgcgaataatcgaacacctaattcttcacacgttctctacgataaaaagcaaatatttcattgaagaaatttttgagcctttttgtagttctttggggaaaatcactcaaaatttctttaaatcctgctacatagcaaaaccgcaatgaaaattccaaaaattttctgaagtcgttggccaaaatcaaaatatcgagcttcgaatttgaaaaatgttcgtttctgacaaaaaaaggctttatttaaagggcgtaatcagaccttttgcttcggggggggggctgaattaaaaaaaatttgattttagaggttatttttcagttttcttaaatcctgaattaggggggtgtattttaccggaatttttaacggttttcgcaaaaaaaaatccctccgctcgctcgggctccccactcttgcttcgtcatcgcatgctcgctaagagggcttttttttggatttttttataaatcctagtcatatttccgtatttttttaaaataaatccattttagcttttcatagataaaatcatatgatgaaaagcatagatttttgcagttttgacgccaaattcttgattaatgcataaaattaccccagaaaagtgcgtgctttcctttgttgggatcacgacatttttatgggcggggggcataacggaaaattaccaaatctcgaacatttattttctgtcgacataagcacaataatacatacatatcaatcaggaggaaattgggagtgtgttcagtatacaataagtgccgaaatgaatgcgtgggggtgaaaggacaaatggtgaattatatacaatataacgagcaaatagatcaacgtcatcggcacgatacaatataatgagcaaatagatcagcgtcctcgcggcacgtcactcggttcatcaccagcgttcagttatcggtcatcccccgcggcatgccagtcgcgcgcatctgagcaaaatggacaacgtgctgaagtgcagtcaaaaggggaacaaaatgaagaaggagacagacgcttattatgtcagtaaaggacaaatgaagaatgattgtttctgctcttaaatcgtcccttttatacaaatattttcatacccgtcaattttcgtgtaaaaattctctataaaaagggatgaaattcgcgagatccactcattcttcgcatcggcgacgttcactctctgctgaacaatttcttctctcgacgacactttgcgcattcaatccgagcacacttcttcacccatcagttgatcccatgtctcttcaatacgtcggcatcgctgcgttaatcctcggaagtaagccgggacgagcagttaatccatgttaatttgctgctaattaatccccatttttcagctgccatcgctctgttccaaactgtgtcgctcagcaccagacgacaaatcgccgaaaaaaaatggcagaagtagcagcagcgacagcaaacgtncaagcaagtcgccgtcgtccgcgaaaaccttggcacacaanatcgctgcgacggtcatcgctgagaaagagctgagctccatccccngacacgaaatcgtgcagctgatggacaccgctttca

SEQ ID NO: 24276 - DNA, 2871 bp, Heterodera glycines
atgaggatttaaatgataatgcatcagagatggaattcctaggcccaaaaaatttaatctaaatttctgggcctaaaaaaattcgggactcggaacccgagcttttaagtaggatttaaatgagttaggcttctgctcattttggtcattaaccctttaatttgacttattaatatgaaattaattgaccaatttctctaattaattgaaaatgaaaatatgatggaataaattttttggttgttttacacttttactgcagaaatccattccatcggacggagccaaaaaacgggaaaaaacaaatgaatgaatgaatgggtaaataaatggagtgagcatattagcacaaaatgtaaattaatcatcataatttggtttggtttattttattccgtcaaatgatttttctgtgattcattgggaaagcgatagttttgagcttctgtttattttgtataatggaaaatgtaaaaaaaatagttatgtttacgaatatcgtaaagtcaaaagtattggatcttaattaagttaaaaatattgggtcttaattaagaaagaagtgttccatttggtgctcgatcgaacctaaaaaaattatcaaaaaataattgaaaaaatttacaaaatttaaaataatcatacccaaaagtttgaaaacccaagactcaaaattgtgatctaaattcttattccagatttttattaatatttacaataattatttgagacgttcattgaattaattcccttacatttgtctcttttgtaaaattgatttatatttggggtaaatttgtaataactaataaatgtgatccggggtatgtattttaactagtttagcattaagtattgtagtacaaaaggtcaagactgtataagaattcgtttgaatttgtcaattcaatctaatgagaggttcaaaatttgggactccgttttcatgtctgattagaaagcatttaattttttatgtagaaaagtaaaaattttgccaaatattaccactacatatgtttttttaatattttccttaaaaattttgccaaattttttaaaaattccaaaatctaacctaatggatttcaaaaatttctgtttttccataaaattcttagattttttgaactttttttatggccagaaaacaaacacatttaatataagtaaatttatatatttttaattataagttttttgtcaattcttattgccttcgcgtgttttttagtcaatttaaaaatttaaaggaaattgtggggcgccgctgttactaaaagtgccgccaggcaaaaacttgaaattttggctaaatttctaagagattttcacctaaaattgcctttttggatcaaaaatttaaataacgaattgctaggaaaaattgtaattttcaagctttttctcgtcacccgctttttttgcagtacgctttttttaatttctagggaacaagggggtccgcaggaaattttttttattgatttgccgagataaacctggaacccgtttcttttttcctctaattatgcaattgtataaaaattgtcatattttggattgtttgtaatgggttctaaatccggaataaaggataattatcccaatttttctgtttaactcattgggacaataacaaatgctacttgattttagggatgagattatggtaaccatacccaattattaaactaccattcaaaactatttttgcgtaatttgaaaaactcgtagccatgaactctgctgaccacggattccaaaaatgccaaaaataattattaaaattgttttgagaacaataacatttgcgtataaaacaaaaggatcattaaaactgtggaaaatgatcaaatgaactcgaatcaattaatagatttaaaattttcaataaaatggtggaaaatgatcaaataaactcgaatcaattaatagatttaaaattttcaataaaatggtggaaaatgatcaaataaactcggatcaattaatagatttaaaattttcaataaaatggtggaaaatgatcaaataaactcgaatcaattaatagatttaaaattttcaataaaatggtggaaaatgatcaaataaactcggatcaattaatagatttaaaattttcaataaaatggtggaaaatgatcaaataaactcgaatcaattaatagatttaaaattttcaataaaatggtggaaaatgatcaaataaactcggatcaattaatagaaaaaaccgcgagtaatctttggggatcctgaaatttagagacacgacagttggggatcctgaatttggggacccgacacttagggattccgacatttggagacaaaacgacgattggagattttaatgaaaaagacatttaaatattcaagtatttagccaaaaattgagcgaaattcaacacattttttgttcaaaatagtttttttgttgaacgtaaaaatcagggtcaaattaatgaaattttaaagatttttttattttaactctgaaattctttaaagagagacaaaaatttcaatttttttcatttgagaatctaacaaaaaatttaagaaaattcaagcgttttctttttttttggcatcacaattgcctaattaatcgatttaattttggggtttaaagcaaaaaatttttccgttgaattttgagccacccaaaaatcatcaaaatttcaattttttcattgagaattgcacaaaaaatttgaagaaaattcaagcaagttttcaattttaaaaaaagtttaatttttacaaaaattttataaaaattccgatttgatgtgttcaacccaaaattggatactggggccagcaaaaccctattatcagcaaaaaaaaaattttgtattt

SEQ ID NO: 24277 - DNA, 969 bp, Heterodera glycines
gggggggtcgcaaattttgaaaattttcttatcaaattcattaaaaagtccaaaaattttccccggcggcgcctatcggcaccgccgaaccccaaaattcctatttttcttaaaaaattggctcaaaatcgcaaaaattggccattttttggtgaaaatctggtaacaaatcacacccaaagattgaaaagtttttcccggcggcgcctatcggcaccgccggcccccctgttcccgaaaagttttttggaaaaagcgcgccgaaaaaacggtttttgaaaagcaaaaaaggtcatcgccgaccctccttcgcaaaaaattttaccgacccacccccttttttaatatatgatattgttttaaacttttaattggttttgaaagttatgttcagtcagaatatttttggtaaaaaaaaacaattcctatgttttttaagcgcaaggacaacaacctgaacacgccggaggaacgaattgcgaagagttcggccgacataaatttgggagttggtcgagcaattccggtgaagcaggactatctttacaaaaagtcaaagaatgggctgaaccgggagtggaagaaaaagtacgtctgcctgtactcggacggacgcatttgctaccaccagaacttgaaggtgtgcttgacaacaaatcagggaggaggtcctaggggtcggagcagatcgtttccgccatcccgcttctttcctctctatcccgaatttcttaaaaaaatttcaaggaaatttttttttcaaaattttgttatgaattaataaatggaaaaaaaaaattttttttgcttgaaattttttaaattagattgaaagttactaatttttagattttttaaaatttcggtggggaaacgaaggagggggaataaagtgcaccacccaggagttcctttggattttgtttttgttggcagttgggagggatgggttcacggaggaacaattat

SEQ ID NO: 24278 - DNA, 1335 bp, Heterodera glycines
tcggtctgatcgaacacattttcaaatgtaatggataagcttgagaataatgagggaatgaatttggcgctttttgttgttttttaaaaatcttggtgtgcgacctcaaaacaggaaataatatattaggtaaattgcaagagttagaaaaaacaaacggcgcgcttcgagagtgaaataaaggcatccgagaaaatgagagagagtgttttaaaattgcataatgcaatgcttttatactatgagtctagtacacaaagacattcgttatccattaattgcatccggtggtaccttttttcggttcattttcttgtgaattaattgattttgactttcattcgctttcctttaattaattaagactgattatgttagacttttcgcagcgcagcggccaattcttcgacggtaatactgacttttactggtcccataaaaaaaggaaataaaaagacggccttttacgattattcgttctattcgagggttatcgaggccgctgatcacgaatatgatatcataattgtcatatgatatcatctaatctttgatttttttgtcaagtctttgattttcttcaagtatttttttcattttttagaattataggcataaaatatgttttgtggagttatcggggtcgctaatcacgaatatgtcatctatttcgaccaactcccaagctctgacccgaactcgaacaaaaaatcgaaacttgacatttttacgaattacgaatttttcgtcttaaaatgcttacatgactttttattacaggaatgatggctttcggtttgtttcagtgcatttaaaccattttcgaaacataaatccaaatttcgaaaatttgaactttcgattttctgttcgaattcgggtccgggtttagaattggtcgaaatggatgtcatattcgtgatcagcggccccgataacccccgggtggaaagaagaaccgtagaaaaacagcctttttattcttttttttatgggaccagtaaaagtcagtattaccaaagaaccttattttcctgacgatgtatatttgcattgtttttaaacatctaattttgatgtcgcattttccggcgcccttcccagcagacgatcgtatggctgttcaaattaattttacgaattcgttctgctgatgatatgatacatacgacgagtgcacacaatcagtaaaaaatacggtataattaaaagaattttgcttaagtatagcctaagtaataatccatttgcattttttacaatattttatgaattctatttgattttttaaaattggcaaattaattaactttatacataatattaaatgggaaa

SEQ ID NO: 24279 - DNA, 1615 bp, Heterodera glycines
ccgtgatttagggtcaatgaaactcattttgcgaggtatgtattccactgacacaaaaaattttgcgcagggacaaaaaaataaaataacgttctcaaacatttcttcctgattatttgcagcctaatccaaactttaattttcaatagaatttaatgacattcatatttatggttgtcaattatatacaaatgtatactttttcctggactgtgggaggtctgaaacgcaagaaaagcatgtttttagcttggtttaagcttctaggacgtatttctatatgatagttgtacatatttcgcgagttatatacatatttgttcatattttagcatttcaagcatattttatgtacacatttgggcattttttcacaaaatcttttattgaagcagcccttttgattcaaagtaccaaaaatttttaaaaaatttaatttattgaatatttttttgaaaataaataaaaaatgtaatttttttgaaaattggaaattcgtgccaaaataagtccaaaattaaagaattttcgatttttttactcaaattttatcaaaattatcttgattttatatctaatattttaagcatcaaagcactcgagaagtaatcgaatttttaatatgagctattgcagaacaaataactaattatgcacatatgaaacggaaaattaaaaaaaaattccaaatatataaagaaaatacgattacaatttaatttcttaatccatcgattatctagtaaaaaattttaaaatttttttaaaataatttaaaaatatatttcctagtaaaaaaaatttaaaaaaaaaaatttaaaaatattttttgctaatttatatgaaaaaacaaatttatgaaaatttctataaaatgaaatttgttattatatttaaaactattttctacttgtaagcttaaaaacatgccgaacattaactaattaaattttaaaaaagttatttaaaatagaagcctaacaccaagggtagtgaatcaacttgtgaccacttgaaaaaaatacttacaaagaaatatttcttttatagcaggaatattatgctcccagaacgactgttataagaaatttgtaatttagaagatttaaatataatttaaaccatcacaagagttatttattttttggtattttattcttaagtcatcaaacaatacagaaataataataattaactctaaagtttatatttaaaagctcaccaaaaataataatttcaaattaaaaactatataaactataaaaagaggaaaatttttgatattcatagagaaaattaattctaagcaaaagccaatgaggaaattcaatcccaaatatataatcatctgtctgttattgtattccagagaattcgatcagttgttcgaattccagaatttccaccgattaaagatttattaataaaacaaaataattttaaatatttcttagaaacaataaaagtgctattttaaaatattaattaaaaatttgaaaaagggaaataatagcttaaataataaacataatatgataaagttacaaatttttaaaattatatgatggatgtaacgaaaggttcgagttcaagaaggaccaaatgaaggctaaaa

SEQ ID NO: 24280 - DNA, 962 bp, Heterodera glycines
  unsure (1)..(962): unsure at all n locations
agtgaccttccgcggatgaagatcggcatgcacaggacggtctgcgtgtggtacccggtcatcgaatcgatctcgcggctgaaacgttcgtcttcgtatgcattttgaatgttcagactctctcccgtcagtgccacatggccggcgatgcctttgccaattgggaatctgtaccgaattggcacaattatttgcaaaaaaatgcccaaactttcgtccacccaccgaatttcctttcgaccgtcctgctgaatgttcaggtcgtttagtgatggactaatttcgccgttgttcgcctcgaattggctgtgctcgtccaattcgggctgacttatgtcgaaaatgcgcgcgtatatttcctgcgatttattatccacgagaaaaagcgacgcgcggtccgcgtcaaccaatttttgggcgaaattctgtcaaattggaagaaaatgaataagttgcaaaaaaagataatcaaaccgaccatcactttcattatgaccgtgtccattgtgatgatatcttggaagatggacctgaaaaatgcgcgagatgattttggcactatcaatgggtgccatttacccttggcacattcattgagtcaacttactcttggcactatcagtgagtgtcatttacccttggcacattcaactcttggcactatcagtgagtgtcaattacccttggcacattcattgagtcaatttactcttgggcactatcagtgactgccatttacccttggcacattcaactcttggcactatcagtgagtgtcatttacccttggcacattcaactcttggcactatcagtgagtgtcatttacccttggcacattcaactcttggaactatcagtgagtgtcaattaccttggcacattcattgagtcattnactctttggcactatcagtgactgccatttacccttnggcactatcagtgagtgccatttactc

SEQ ID NO: 24281 - DNA, 730 bp, Heterodera glycines
ttggcttagccaatcccccaatctctctcccctcctcccactaattatcccgagaccgaactgggagtcccttccccatcccacatttactcatcatttactcatcatatataattgtattgtgcgcacattactgaaataaagagcatattcaaatgccgccgctgggatttttggggagggacccgtcgcctatttcatggaggtcccgcctctcgggatatctacgaaattgtaaaataaaaaaataaaaataaaaataaataaatgtatttggccaggatcggattagtaattttattattataaattaaaaaaggcgaaaattattaattaatttaaaatgaaaatgcaagaaatggaagagattaagtggaagtggcaaagagcggccggaaaagctcagaggaaaagttcagattgattgacacaaggtggcgttaacggcgactgaaataatgaaaagaaaaataaatgaaagtcagaaaatttaaattaaaaaaaaaaaataaggacaattaaaagtgtgaaatgtggaattcccacccgagaatgtgtttttggtgatgatcaaacggccgaaacggaaacagacgacaaattagccctgaggggtgacgaggcaaaatatgatgaaatgttcacattgaacttacggaatgagcgaagggccgactgaatggaagaccaaccaaggaggcgacgagccacccacttttggtgtttgacg

SEQ ID NO: 24282 - DNA, 665 bp, Heterodera glycines
gaatgaacagcaaaagggggacgaagttggccggaactttggctgacgaaaacggcttggccagctgtttggtgtcaagagctgattggacgagaaagaaaaggaagaagggacataagcacagaaaaatgtgataattaatttggcaattaaagttgcaaatcgggatcccgagattaagagaaaagagtagtcagttgatcaacaaaagaattcgcattaatcgccggcaagagaataaataaaacaaattcttggaaagtaagcagagaaacaattggcaacaattgctcgtgatcattgggtcctaggccaggagaatccctctctccatcccgcattcattcgcttaacctgccaattaagcacaaaattttgttttcgttttgcatttatttctcgaccttaattacttagctgaaaaacaattcaattaacaatccttttaaacttttcccggttaattaaagcaaaagtaaaagcttattattctgatcatcaaaacggttcaatcgtgactggagaaatttgaaaagttgttgtcacggtataatcagcatttacagttggagaccaaattttccaagggaattaacagctattcagtttgaatttggccgtctgcgtgtggaaccggttggaaaaggcgaagaagcgcaagaaag

SEQ ID NO: 24283 - DNA, 2186 bp, Heterodera glycines
caaagcggatcaaatttgatggacattttgccgaatcttttcgatcgttcgaattgtgtctgacctgaatcggtgtcgaggtggacgcgatgcgagtgaagccgcggatgtcggaaaacaaaacggtcgaatttgagtagtattgaggaagcaccggacgacccgccttcaggtcctcggcaattgacctttgagttgggtatatttacattgggtaattaataattaattatgctaatgcgctatttaatatttccaaaataaaattggccactgactgtggcaacatattcttcaacagtcggtccgcctgctgctgcgcttcctccaacagttgcgtccgctctttgaccaattgttcgagatttgttgtgtactgacaaattaatgcattttaggccccaaaattgtgggccaacccatctcatccaattaattcaaattaattgtaacgaatgagtttggtggcaactgaatttccttcccatcgcttcttcgcgaatttgggcctctaatttcggtttatggcgtttcgctttttgctcttacgtcctccatcattttcatcatctgatccaccagactgccgctgcccgtcgacttcagatttgagttgaccattgtcttcatccgcttgatgttcgggcgcatttccgggatttccagccaacatgcctccagcgcctgtgcaaacaattggtcattaccgtaatcggcacaactacagtatataaattggccaaaccgatagaagttggaaattgtatgcttcttcgatggcagaaacttgctgttttgggaaggtcgggcgtatgatttggtcgtcttcgttggccaatgcgattcgttccattatttctaagacaaatttcaaaaaattaagtattttttttgtcaattttggcactttttggctgcatattccgctcatagaatggctccaacttgaacaggatttggtacagcaccatgccaaggcttcaatggagaagttgttaaattactttcttaatagcatggggccgggaattttccgtccatttaatgaaaccatgaaaagtctaagaaaaaaaatgctaacagattcaaaaattctttgggtcgatttgtgctcccccatcattctccacctgtacatgtccgatgccgggctgcccggtggcaaatgttttgtggagatgaactcgcggatgatctccggtgcctgctgaatgtattctgaagggggcggaggatttttaaaacaaacttatttaaattatattactttaattaagaataaatgaatttagaaaagacaaactcttcaggtgcgacttctcataaattttcttggactgctccaactcctcgtccgtcgcgcttcggctgtcctccgtactgtccgcgccgctcctttccttgtcacgggtccggcgccgcttctcgcgttctctgtcctttcgaattgataaagaattaattttctcgcccttttataccgtatttacggtattagaacccccgggggttctatttttcaccccctcaaaaggggggttgtaattcagggggggggggggttctaataccgtaaataccggtatttttccatattctttttttctcgattttattctccttcttcctcccactcttttctcctttcctcccactctctcactttttccctcgcttttttccttttcccacccactctcactttttctctttcacctcccactctctcactttttctcctgttcccaccactctctcattttttctcctttcccctcccactctctcactttttctcctttcccctcccactctctcactttttctcctttcccctcccactctctcactttttctcggtctttgtctttttctctctcttctttgtcgtctctccgcccacccgccgtttttttctcatcatccttgaccactttctttgcctttttgtgcgattttaatcttgattccgtcatgtatttaagctcgttgtgtctcagtttgtccccaatgatttgttccgtcacaaaatttgtcaatttcacattccttaatttatacattaaattttgaaattaaaaaatttttaccaatttgagtcgaccaaacaattttgaagacacaaaaacccatggtatttgatgagcgaaagtatgcagaaaatagaggccctaagtgttaaatga

SEQ ID NO: 24284 - DNA, 1180 bp, Heterodera glycines
  unsure (1)..(1180): unsure at all n locations
aaatgagagaaaaagaaaaaactttgcccagtcgtaaaattttttccaaagttgcgattttcttgaaaatttgcataggcccatatttgacctncctctatcgaatcacagtttattttttagctgtctagtttttaactcgagatcggctcttctttttttgcaagggaaaatccccggaaaattttaagttttgcaaagttttggcgttctgattactaaataaaaaataagcataattgtactgggagcccaaaattgggccgctgtgtatagctacaaactaaattacattaacagtttagaagtaaacaaactctgctgaaattcatagaaagtaattaaacgaccctaattaaggaaaatgagtacctaaattaaatttaagaggatgaaaagggaagaaaaacaaagaaggaagaaacagaactcatttacatatttattgcttctccttctcattttcttttcatttttaaaataatttttagcgctttttggtttatcgttatggaactcacttgggccctcacgtttgggccccagcatgttttaagtagatatcggaccggtcggttttttttcggtatttttcgattttcggtttcggtttttaaccgaaaccgttcgaccgaaataatcaaaaaaccgaaacaatcgaccgacttttatgaaaaatcagttggccattttttaacaaaattcattaaaaattaaagaggaatttggtgtccaaaattccgacggtgtccaatttaccggcccctcccccttatatgataagtaatttaaacttctaattgatgatttgtttaaattcccctttttcactaattaatcaaattaaatttattatccttttgattaccgaaagtaattgattaagaaatcaatagaaaacatccgttcagtgatcaaatgtgaacgaaatgataggaaattaaatcatcatcaaattattacatgttaatatcacttgaacaataatattctgtttcataaaataagaacagccaatttggtaatagtagggtttgtcccccccccctttttaaaaaaaaattttttttttttgaaattcatcaaaacgtctttcctgaggttttgaggtcgctgatcacgaatacgacattcatttcgaccaatttcgaaccccggacccgaattcgaaacaaaagtc

SEQ ID NO: 24285 - DNA, 1524 bp, Heterodera glycines
acaaatttaaatgacactaaaatagcctaaccgatttttttttctttcaatttgaacacttacgcgccgatgaattgaagaggtcagccgatccgttaccccgtctgggagatgatgagtcgaacccgatcagcacggaacaatcatcatcgttggcaaattggtcggacaatggcaaaggccgtgccgtcgtcgacgccgcggtgtcagtatctaaaaaaaattggcggcgtaagattaaaaataattttcagagagtctgtgtggcacatgttgggggggggtgactccgcaagccaaaaaatttttttgcaggaaattcaggcactaaaaaaattgccggaaatagggcacccccgcccctttatgagatagttttctttttactccataattccaccaactcacccatctgtccgacaatgtccgcaaatgcgttgcgcaatcctttgcccatctgtgaacagcgcgtgtccatcgctcgctgcagttgggccacaaagcgtcgcttgtacgcctccaaattgtcctccaacaatttgtgcttctcaaacagttgattgcgctcatcctccttaaaaatgaaatggaagttcacgaatttttttaagtgcatcgaatgaatgagggcgtggaaattggaaattttattccaatattttttttgcaaatttttttagatttcaaggggaaacgactcgggggaaatgaagcacccaaaaccaggttcacaatttttaaaaggccatatctctagaaattaatacacattttcagctgaactactaacccccaatttaaaaattgaaaattcatccgcgaattctgcccaccaatttccgatgagtttccgccgcctttttcagcatttctgtcaaccgcatttgcgcgttgtttgcctccgtctgcacttggtccaattccgccgcattctgtgcacccaattcatccacaattttggccctctgttcgtcctgaaaagcaggggcaaaccgttttctgtttttgaaaccttttaacaccgaaaattaaacaatttcagtcaaatttgtaaaattctaggttttccgctagattattcatcaactgaccagttgccgctgcgtgtcgcgttcccacgcctccgccgcctgccggtgttccgcctgcaattgctccgtctgctggagcagttcgtcgtacgcgcgcgcgtactgcgtcgcgcgtgcctcagcctcgtcacgctcgtgcgcacactggtgcactcgctgctgcagttggtccacttgcgcctccttggcatgcatcaggcgcgcctgcacgtccgcctcgtggcgcgtccggtcggcggtcagccgaagcgcgtggcattcattttggcattccaacaaatttcgggcgccgtcggacttcgcctgaaacagttataggggttcaaacccgcgtggcagcatacggattttttgaaaataaaatttttctggtttttcaaaaattgaacgttggctatacccccttagcccacctggatgagttcgttgattt

SEQ ID NO: 24286 - DNA, 1922 bp, Heterodera glycines
  unsure (1)..(1922): unsure at all n locations
atgaagtgtgtctgtccctctccctctctctaattttcgaacaaattttggggaagggaacaacaaatcactcctttttctctgttgttaattgtgttcggccgtttcagtctcttattagagggcacaattttttatttacatattttttcctcaaaagtttgacatttgattccgttgggttgaaatgtgtaagggaaagagattcaaatgtgaatgaataataacagagaaacagacatatggcggcacatttttgtgtttgtgtgcgttttattgttttagttttatgttggggaaccgcgttttttttttgtgattatgacaaacaaaacagaaactcagaggaactgaggtgaagaaaagactgatgagagtgacaaagaaagcgatcggaaacgaaaatcatgggaaggaagtgagagaaagtgagagaaagagaaatagagaaagagagagagacgagaagtgatatagagaggaagggcgaagagatgaagcgtgagagagagagagtgagagagatagagagaaagcgatcggtgagcagcacaaaagccgagcgctgaaaagaaaaaaccgctcttcaaacagttgatggaacagcagttcagcacagaagatgaaattgagtaatgctgatggtgacgctttttgaggaggagtgaaaataactgcaactaccgtattttctanatttaaaggccctcggggatttagggagtatacggtaatggttgtttttgagagaagtcatccgagaaggagggggacggacacattaggtcaattatttatgatagcatttacctaattggattacgttcccacccctccccccccttatcgtttcctctgctctaaaaatttttaaaaaacctaaagaatttttcaaaaaaaaatttaaaacattttttatgagattttaaaaaaaattcaataaaatcaatcaaataaatgttgtcgagtgcaaccgaccaaattctgagacgtcatttgttgcccgttaagccggagagtgagatgagcccggaggagcgcgcggagaagaaaaaggcggagattgaagcggaatttgcgcgatacaagctggtaaatttagggggaaaatggaagaaaaaaataaattgaaaaaattcatttttttaaatttaaggcccggaaattgcgcgtcaaacaacagcaagtgagttcaatgattgttatgtgtacaaagagtgtagaattttgtcggtgtaatttttcccgaaaaatgccggtgggcctcgaaaaacaacctacccgacccggattttcgccgaccgcgcctgggttttttgagggcctaaattttttttcatgaaaattctcagttcacaatcagcatttgttcaaaaatgtcgatttccattatcaaaaaataattgctttttcctccaggaaagtggtggcgccggcgatgaagcggctgctgcccaaggtgggtggtggtggacaattaaaaatttaattaaatgcccaattaataataataattattgttgttattattattaatattatttatgttttgtttgattcgtttacaaaaatttatttttattttttacataatttgatttgttagttacaaaaccaaaaaagaatgttgttgcttgtttgtttgctccattttttgtgtacatattcatccccgagtgttgctttttgttgtccacgacacatcggctaaacaaactctgatttggctaatacccttcccgagactgggcctccctaaaagccccgattctcgagtcggggactcgagaccgccgcgacttgccctcaagaccgaggcaaatagaaaaacaaaaaagaaaaccgagactgttccgctcttttggcactgtgcttttcatgagaatggtgtgccgccgtcagcatcagcgaattttcgtcta

SEQ ID NO: 24287 - DNA, 1526 bp, Heterodera glycines
tttgcgaatttatagaaatttcttgtgaaaaattaaattttttttttgaaaatgtttttctaaaaaatcgttttttttaaaggataaaaaattaatttttaaaatacgaaaatgtggatataagcctatttaagtcaattttatggcattttatgcctattaatcctttatgaagaatttttttaacaaaaaaaaacaagcattttaaatttcatatttataaattttaaactactttttgtacatatttttgtcgtccctactaaccgagctttcgaataatgtcaagttagtaaaattcggcttgattcattgcgaaaagttatggaagcgacgcatcacaattttatggatttcggtttacgtattttttccgtaattttgacccgtaactggaatgtttttcgagacattcttagtggatatggatggcaaacaactttctggcctttgaaattagcctttttatattaagttgtttaaattttgcaaaatttttgataatttcttaatattatagttaaatttttcatttctttcaaattagcatatgattacggttttccgtaaattaaaaattcacttaatgcatactgtatttcccagaattaaacaatatccatttgtgtaaagcaactaatcgaagcaaataacagaattattattcactttccatttttattttcaattttttcaaattttgtttagccctttgatcagccgcttccgccactcgactgcattttctgtccaatgccaaagattaagtaagtcatttttttctgtgccattttcagtgctttttttgctgtaggcaattgaatcggcaaatgccgaacagatagagatggacgaacagatcgacacatctaatgactgaaacagcagaaggcaacagaggaaaatgtgccattgagtaaaaggcaaatagaaaatgccgacaaacatttgacattataccttagttgttgataaataatttatcatgttctgtccagtcccattaaattttgtgattctatacaattaacgcagtaattaattattccaaaaaatttaattactatgtagttaattcaagaaattattttcaaatttattaattagataaattttttattgtgatttgattttcaaattttaaattgtcttttgaatgttttttgctatttaaaatgatgacaataatgcattaattaataatttccaaaaatcattaaatcattaattatctttcctaagtttaaatattagtttttttttgacaaaaatccttgtgatgtgatgataaattatttatgtgttacataaataaaattttttaatattaaagattttcattaaattgttaaagtatttaactattttgaggaattaaaaaaaaattgttttattaattaattctttttaaaaatcattatttatttctatcccatttttaatttatcaatttttggccaattcaaaaacaaaacatttttttgaatgtggtttatcttcggccacaatcttttgcttttatttgg

SEQ ID NO: 24288 - DNA, 997 bp, Heterodera glycines
tgccgataggcgtcgccaggaaatttttaagaatttcaattgaatttattaacagaaattgtacaaaaattactaatttttgaaaaaaaaatttaaaaaaatttccgtcttttttatcaaaaatttcggaattcggtgccatccctgctttggcactacatattgccattaaatgtcgtcattcagttggatttgcaacgacatttggatggatattctgccatttttttgtcgtcctcaacttggcctagaattggcactgatttcgccccatttcgatgttttggtggacacgcatttcgactgccaatccgaattgaaaatttggagatccttcaaaatttacaagcgacaacaatttgtttatgaaggaattcacacttcgacaaggaaaagaaaaatgattgatgttgaaggagcgcctcaccttttggtaacaattttggtatttccccccccccccccctccattttgtgaaaaaaaattttttgtttaaatcagtgtaaatgccttttcctgggttttcgaggtcgctggtcataaattttgacaaatagcgaatcctgaatttcgaacaaacgtagaaaattcaaatttccgaaaagcccaggaacgacgttttacatggcataaattttattagttttttcgaaaaattgggcgacaaccataataattaccaatgtttccgtgcaggtcggtcgccacaataagcagtttccgtgccacgagatgcccaacaaaatccgcttctgtttcctccaaattaagtaatttaataataaattttctgtggccaatggcggaaaacttttgctccgaattttttttaaattttaagaaaacggcgatcataaagaatgggtggtcccatatgttacttttttattttgggataaaaatttggaacataaaaatttgcttaaatccgccgatggataagaattttctgagggttatattttggttgggatcgaaaaagttaggcctctaatg

SEQ ID NO: 24289 - DNA, 1628 bp, Heterodera glycines
ccggctccccaaattgggccgggtcattgagtcgcgcaaggcgcgcctctaaatcgccccactcagaagctgcaaaacgtaagaggtcatcaaatagaaccttgtaaaaatgtgccaccaaatcaattccaattaaaaaaagcacacgccttttgccactccaccgcctccgcttttgcccgcgttggccgtgccgtacaacgagcgcagcgacgggggcggcaaccgatcagtgccccatgcgttttgctcgaagggcacgccaatcggtggcaaatcgcgcgacttttcagccccgaggcgactcgcctgcagacactgccgttttgggtcctcaaagcatgtcaaaaagtcagagatagagaaaggggacggtgagagagtgcgaagagtatgcggtcagacagtcagaaaccggagtgagacaaaggcaatggcattcaatccgtttttacttccatttttaatacccgtgccgttttgaacttatttgtccattgtttttggcgtgctaatgtcccccccccgcccggcactccaaaaaagacgcactgtcaacaatgtgtagcaattgttgcacaccggcaccggtttggtcggggacactgatggcactgcgcacttttggctaacgcatcgctcgcaaaagccgaaacgacaaacggcacacccgatctgatttgggtggcattttttcccattttggatcataacaaagttctcccacttcttttctgcgtcgtgtgtattccgccatacaatttgtgcacggcattttgcgtcctcctttctgcctagtgccaaaacaaacgaacaaagccgaaggggacatagagaaaattggaaattttacaaatcaaaaaattagtgcataaattggcaatctggtatttattttgttaaaaaatgcttttacatttttattggaatccttaaaagtcaaggacaggcggaagggaatggtcggtgttgtgtaagcatataggtacttatattttatggattggaattgcgcaacctcaagagcagaggaagggacaaaaaaattagagaacgaagcactctcgagggtatgggaaagaaagaaagcacaacagaaggggaggaagaaagaaagattgatcgagacaattgacagaaaggcgctgattcatcgcattggtgaagaaaaagggccaaaaatggaaaaaagtataaataaatggacatcagcagcagagaaagggtatcatcatcaatcaagtcaatgtgatcatttgggttaatccaaaatgggaaatggtcatcgctttaaggagaaacagtaataaaaaaagtcatttggacaaaagaaacagcaaaagatggggtaagtgatcactgatcagagaaagagaatgtcgtgccatcgtttatagccccacacattcacatcgtggccaagacgttcattggtcgaagaagctgaacaggtcgggctgccgcttcggctcaccgccgttgtccatgccgtcgtcccccgcggagggagtgcgcccggcggaaagaattgaggacgcactgatgccagcagaggggccaccagcgccaaagccaccgccacggagacgcgaacgacgacggaccaaaatgggcggtgccctcttgct

SEQ ID NO: 24290 - DNA, 1382 bp, Heterodera glycines
cttcatcaatgcgtagccgtgtgtatgaagcaaaacaaaatgccaaaaaaaatagtgggaagtaaggctgtaagttttatgcacaaaaatttccaaatatatgcatatacggggttcggatcggacaaactccattcccaaggacgggtataccggtttccaatgacataaagggaaaattccattaaattaaaatcaatgacatttaaaatttttatcacaataaaaaatgtttaaattttatccaatcgttccaagcgcgggttgatgccgactgtccttcattccaagcgcgcgttgccgctgactatccttcattccaaggacgtcgaatcgctctacaatcccgggcgaagtgccctacttcattacatctaaagcactttacgcctccgatggtaggcaaccccgctgttttgtattcttcttcctcttcttctcgtgaatttcccatcttttccatccacttttgcacctccttagatgccttttgtgcctcatctcccaaaatcagtgccctttttctgatttggaggagcatggagagcaccgttcgcgcttccttcgtcttctgatcctgttcaatgcttttccgcattttttccccgaatttcgtggcggcttcatttgccagagttggcgggtcgacttcgtttatcgttcgttttctggagcttacaacaatagcttggcctgttttttaaggctttctctttgtcctctcgcaaatccttttttgcctcattgttcaaagtcgactcccaaaatgcagtcgctcgtttgtcggcttcggcgggttttcgaaggcatccctttctctttcttcagaatccacaatcgagatttcatcgtctttcgttgttccgacgctgaggcttcgtttggtttccgtctcgtccttctgcttcatctcttccttcttcttttccgtctctttttcttttccctctcttcctttcttctcctcctctttttccttcatttcttcgccctttttcgtcgtttcttccttcattttcttcccactcctgtggtcccactggatatccgacgttccggatttccatttttcgctttcggtcagactttgctggaccctcagaagttgatgttcgagctttctcttcaacctcttcagagattcttcctcctctttcgataacaattccatctttaaaaatgaatggctttcgtaaattttcccgttcttttctttgggctcgtttaatctgcctttcttgttcatgttctcgattaggcctaaaagctgcttattttgctcactagcggggtcagcgccttcggcgcatcccccgctaggcagtacgattgtgttatagaattatgaatgataaaatcgactggctcggccacttcgcggc

SEQ ID NO: 24291 - DNA, 1027 bp, Heterodera glycines
  unsure (1)..(1027): unsure at all n locations
aggggtatacaatattaattattaaaacaagtaaaatggggtttagtatttaaaatgttgaatntaaaatcactagcaaagaataaaaacaatgtaaatttctaatttatttaaggctttctcagaggttatttccgatctttaccattatgttcatccgaaaaataagcgccaaatgcctatggtcagcaaaaaaacgtacgacattgtgatggcaaatgcacaggtgaattatatggcattttaaattgtttattccattttatttaaggcccttaattcagcaattatttacgaccgggacttcagctacacatattttgggtttaagacacttgaacgttcttatttgttgaaaattgacgggaaagttgttgagcgtccccaacacatgctaatgcgagttgccattggaattcattacgaagacatcacggcggcaattaatgtgttgtatagttaattataattggaaatgtatgtgtgtgcttcattaatcgcctcatttttacagacgtacaatttgatgtccgagcgatggtttacccatgccacacccactctgttcaatgccggcacctgccgtccccaactctcttcctgcttcctcctgacaatggtcgacgattccatagaaggcatttgcacgactttggatcgctgtgctctcatttccaaatccgcgggtgggattgggttgaacgtgcactgcattcgagcccaaggatcatacattgctggggttctttcccgtctttttttcttttggtttaaatggatttgcagactaatggcacttccaatggtctcgtgccgatgttgcgagtgtttaacgccatggcaaaatatgtggaccaaggggggaacaaagttaaccttgcaacagtgttggaaattgttcatctttatttttaagcggcctggcgccttttccatttatttggagccatggcatgctgacgtcatcgatttcctggagttgcgcaaaacaccgggtctgaggacgacngagcccgtgatcttttta

SEQ ID NO: 24292 - DNA, 1555 bp, Heterodera glycines
acattgattattttctttttcgtgcatttgaaacgatttttagcaataaatgtgaattttgttaaaaaatcaattttttaattttgttcgaatccgggtcaggggttcggaatcggtcgaaatggatgtcggattcgtgatcagcgaccccgaaaacccctagaaacatgtttttatgattttttgaaagttaaaaaaaaattttaaaaaagggggggtaccatctaaactattaccaaaagtcatttgacttaattcacatccctatttataactcgtgcatttttggtgctaattttcgacccaataaaagacgccccaaatgcgtgcggcttaagcttacatacacacatatgacatcaacaaaaagccttgtgcttttcaccctcacagtggtaaaatggggaagggaacgagagacagcagcagcacagcagagagggcggcaaaagaaaaagagaaaagcgaagactgactgacaatgtgtgctcaattcttttgacggagagggggaaaaagggagagaaattgtgaggaaaaaaagacgaaagacacctcgcgacaaatgaaaaacgacgaaccaacacagccaccccaccaccgaacaaacgaacgcgctgctgctgctttcttttctcctcattttatcatttctttacgcacgacggggcgcgcccccacttaacccattcattcattcattatcaattgcacacaaatgaatgaaaatgaatagcaagcagtaccagcacaaccagcaccaacattattattttattagtgtagaaataggtacataatacataattgttggggcgtgtgctctttttcctcttctgctgctactgtgtgatgtttggtgtttttcaccatacaatcattggacagcagcagcagagcacacaaaacactgggtcttctgaagaggaggaggaggaggtggggattgataggacgacaatgtcatcattattattatgatgtgtgtgctgcgtatgttattttttgcaaaatacttagtaaagcacaattcaataacagcacagcattagcagcatctgattgtgagtttttcgatgaattgacaaattttgtcatgatacaataattttgttattttcggattggaaagcaattagggtaccaaatgattcgtcgtcagttttgttcccttttcattttctccaaaaaaaaaaattgaccaaaaaagatgtacacacaccatcccagaaatgagctcctgtaccagaaaagatttgcatgtgtggctcagtggtttttgtaagatagtaaagggacaaagggtggtggttcgagtccgttgtgcaacatgaatatttttatttatttttgtgcaaaatattaaaaaatcacgatatttgggaattatttttgaagctttttggtaaccaaattggacaatcttggtatcattcgaaagctcttgatgaggaaaagctttttctaagcaaatgctaagcaatttgatgaatcagaaaaaagatatgcctgtgaggaacttgtaacttttgagtttgaccatagacaaaaatga

SEQ ID NO: 24293 - DNA, 1216 bp, Heterodera glycines
gctgctggaatatcatcattagcgtccctccaaataattgcacaaacttcatttctttttggtatattgtatcttcttaaatccactccttctcggatgccaaacaacatcataatatcaggaatgtcttcagattgttcagcagcctcttcagaaacatctttcatcattttataagattgtgaataaatataattttcacgtagatataattcgatataagaaattattgcaataatattgttatttttgtcagaactaattttgttactaatagcatttgttcgaatatcaattgcctgttcagtatctacaaaatacaactgaccattcgttggcaattcatcataattatttggttgagcaaaagtgttatacgaatggtatatattcccttgtattttaaagattgggatatttttatctgggaatttaaaccgcatgcaacccaacgaagcacaggaaaaagaagagttcaaaattcttatgttttttataaaatctttatggaaattcctcatgttcgtagaatcaatttggtcaaattctggttgaaacaaaagccttaattccattggataatcaagtaacatatcttccaaattacttgattttccgtagttacaacagcctaaaaattcattaactcctttggtattattttgttcttcataaaaatgaatggcggggcagtggttgcattttaatttaaaatcactaagtctaaagacttcaacattggaaaccatatattcacctgcttttaaataaattggaccttcactacatttcattcgttctctatgtgattgaacagcatttgcagttattattctttcaattactttttcttcctcactcattattgcacgtggttttttacgatttcgatcatattcaagataaatttcagttttttcttttgtcattttaatacgtgacaattgtttacgaatggccacttgctcaaactcagaaatctctattttgttctcggttaattcataatcacgatcaaaaaaaaagctatctatctgttacttcgtctaaattaattattctttcaagatcagatgactttcgtttgcatgtttttctatcattttcaactttgtctgaccgctttttaagggagctttcaaccctatcattacaccgctttttttctcgggagctttgaacccgtcatttgtttgttggttgtttgtcgatgtag

SEQ ID NO: 24294 - DNA, 1452 bp, Heterodera glycines
tatttacatttttttttctaattttttttgttattgctttacagacagcccgatggcttaccactgtccaaagtcttgagaaggaattagcaactgtggagcttgccatgttgctaactttgcccagttcattgaaaaataaagttaaatgtttgaaagatttgcatcggaaaaataatttgtacagtgatactgttaaaaatgaattcttgtcacaattcaaatcgccatggacaaacccatggcggcaaccagattttatgcattcaattagagcaaaaacaggtgggtgattgataaggttaatatttttagttttttaacattttttcctgagaccctcgtgacctgtaacgctcgaaaaacatgttttctttttggaaattttaaaaaaatatgctcaaagaaccgacaataaattttcaaaataggtacactcctaataataaaaaattttctcaaaattttatcgccaaaatttatttaatttctttttgctaacaatttttatttaaaaattatgtatttctctgtcaatatgatttggcttaattttgatacttttttgtataaattttttattttacgccccctaaatttgaaggtttttagcaactattttcccattttagcacctattttgaggtttttttaaatcaaaaaactattttggcagtttttagcacctaaaattgcatccctattcatcaatatttatgtaacttaactgtaagtgtctttttttagggagaaatgttctctcaaatgttgtgatcaatttgaagaatattttcaccgaagaaatgatcaatctgaaaattgaaaacaatgatcaattgggtccggacgaaaatagaatagtgcacagaaaagtgttcttctccttatatttggcaatgaacaaaagggagtttgacgaaattcgcaatcaaaaattggacgaagcaagaaacaaagccaccagttatctgattgaatgcttaagcgcactccattcataggaggatgaagcatgagatgaacaaatcggtaaatggcaactcgtacaatggacaactcgttaaaatttttatttaaaaaaacctaactaaaaatttgagttgaaaagttttttaaatttatttttgaaaagtttttggataatttctcaattttcgtaaaaaagtacaaaaaaattttaaaaacttgataatttgtttattgatgaatattgatatttaaatgaaaaaataaattttttttgagctccttaaatgcatttaagcacaaagaatatttaaataattaaattccaatccttaattattagggattcgttttcttaggcaaatgcctaaaatttctgcgcacataatacgcacagataagcacgaaataagcgtttccgcttggtctggggtgtctacgatgacttttataatgcctattttttgtgcctaattcaagaaaaat

SEQ ID NO: 24295 - DNA, 2316 bp, Heterodera glycines
tttgtttttagtaaaaataaatgatcgaatttgcctgataaaaatgaagggatttgatcggaaaagatcaagtgatcggctttgctttttaaaaattaagtatctgattttcttggtaaataaagtaatagatttgcttttcgtatcggatttgcttaataaaatgaagtgatcttgtttgcctacgaattagtgaaataaatgactgatcgagtttatctggcaaattaagtggtcggattagcttggtaaaatggattgattggctttgcttttagtatcgaattagcttagtaaaatgaacttatcgaatttgcctggaaatggattgatcgactcaaacattgattagatcaatagcttatcatttagcagattgaaatttcttttccaaaattaaaatcattgctttaatcaaatggtaatccatttaatcaaaataatataattaattttgcatatttttttgcaaccgcccacctctgctgaacatccgggtagttgagcatgtacagcaccgcccaattcagcgtggccaccagcgtctccaaaccgccggcccacaaatcgccggcgcacagtgccaacgacaatttgctaaataaaatagacattttttggtggaggaaggggggcgaataattgaaatttttcccacgaattttacacgcaaattaggcggccccttttattaggcaattaattgtgttaatttggtgtaaaattccgtttttaatgcatgtttgtgccaaggatgtaagcccattctgaattctggcccttctttgatatcctaattttttggcatcaccaaatcagactttcgggaaattcgttgacaccgactgacatttctgatcggaaattctctacataaatccgatttaaaaaataattttttattggaactgttgatcaaagaggggctgtccttgaataaggaaagcctgtctaagggtatcatgtccttgtaaataaggacgacgaatcccaaaaaagggacaaaaatctccacgcacaatgccggctcgtcccaatcattttgctgtgtgccgagcagaaaggcggcaatgaaattctcctgatgctccaacaatggcacttcttcagctgaccgctgtgccattggacttcctttcacttcgggcactttttatgaaaaaattaaaaatttaaatgattaattttggaaatctctttttttctctgatttacatgattaattaataaggccggcatttatatttatgaaaaatatcaaaatatttaaatgaattacgaatgaaactacaaaatatttatcaaatatggataaaatattaataaaaatattttccataaattaatattttatttatgaaagctccaaacatttaatttatattatggatattaaagtttcaaatgaaacatttacggcaaaaaatgaagtaattttcttgcatttttcatcaaataaacctggcagaaaaaagtttaaataaataaatttccgccctattaattacacaaataaattcaaaaaataaataaattaattaattgtcttaaaaaagtaattgccgcttacaaataaaagaaacttttcgagtcataaaggacactctgtgacagcaccagggctggacgcaattgcggattgcggattgcggattacggaaattgcggggtttttggacccccgtaattgcggattgcgggttgcgtatttttgggatttatccgaaattttgatccgtaatttgactattggattatttttcgagacgatttcttgtaagattattttttataaaatgaatttttttctatttttatttaaagaaaatatgtacatttgtttaaattcttatttctttagcaatttaaaaatgtcaaacttaaatcctggtaattggtggtattattttgagcgtcaaggcaaagcaactgctaaatgtaaagccgatggatgttcctactcaaaggcattaaatgcttctctcagtacaactgtgctgacttttcacctcaaaaatcaccaccctgaactttacaaacaacgtgaagattttgttcaagcagagaagcaaaaaacagaaaagaagggacaaagtggaataattttcttgataaaaagtgcggcgcggaacgggatcccgcgcgggattttgcgggaccccagtgaaaatcctgaaaaagcatgaaaaaatgcatttaaaatgttttttattaaagatttttcgtgagcagaacatgaaataaccaaaaatttaattttggtcatttaaatgatcattaaataaattattttataattttttcgtttaatgaaaa

SEQ ID NO: 24296 - DNA, 2040 bp, Heterodera glycines
  unsure (1)..(2040): unsure at all n locations
ttggcttggatggctgaaacgaaaggaccaaaaagcgcttgatcgaaacgacggactgaaatagatggcctcttcggcggtcacccccatcagcacgggtttgctggctcctcgcacttcccgcaccaaagcggggatgtcacgggggaggaagtcgccgtcgatgcacgggccccacaccaaaagattggggtccgcgcgggtggtgcccttaaaaaaagctcatttggtgtttttacattttgctttttcgaccattgcttttgcaatttgcacaatttgttcggcagtcagtgccttcagcttttgcttcgcttcctccttttttccctttggcatttgccacttttgctctttgccgtttctctctccgccattctccgcttttcctctgccgccgctttctctccttttgatgtccatcgctcttcccacaaactctctgctcgcctcctccgttcggccactcgccgaccattcagccaacgccgtcccactcatttcaacgcttccgcaaattaaatctgacaatgaggaacccatttaataaattgattgtttcccaattaatggaagtcatttctcaatcgatggaatgaaacattccaaaaccccagcaaaaaaagagtcggtcgatgcttcctaatgctttccacctctgctgtgcggtgacagtgccataaatgccgcggcggcccctccggcgctgagaccgacggcggtgacgcggcccgggtcgccgccaaaggcgcggatttcgttgtgtacaaagcgcaaagcctgacaaatgtcccanaggcccaaattgccgggcaaaacacttccacggncaaaggataaaaaacctaaataagcaaattcaaactaaagcgggagaaaaaggcggaagactcagcagaaccgaatgggcccagccgatattggacggtgaccaccaaaattccctgcggcgcgaaattctcggcccatccgtcgtagccgtattggcgagcggagccttcggcaaagccaccgccgtgaatataaaacatgacgggcaaaggagcagaagcagagagcgcgggacggaaaatgttcaactgcagacaatcctcagagaagggaattgactctgaattctctgggtttagcggaatggcagccggaccaaaagcgaatgcccgcaacggagaggaaagccacggagagggcggcacgggcttctgaaacgatcattccgtagagaaaacccttaggaaatgctgctgattttaagtgatgatgattggttagtgtgatcaattttgactgatcacctcaaatcgcagttggccaattggaggctttgcaaagggaatgccgagaaaaacttcgacttggacgccgctgtccaaacgccgcagaatgccaatgacatcgccgtacgaagtgcggacgaccggcggagcactgggcgacgaacagtgactatttgtgaggcaaacgacggcggaacaattgcaatcggacatcgcttctttgggtgagttaattgtgacgacagaccgaaccaacaattaattaatgaccaaaaaaacgattatcccttcatcagagcctaagaaaagtcagcggaatgaattttaatgtccttttgctctttcgtgtttaattaaggcctttattcctccgacttcgcaaattattctctctgaattgaattaccaatttgccatttttaattaacgctttgttttaattttctttgtcctttcaattcttttttcttcagccattcgctttttaatgagatgcaaaagaacaattcttgagcttcgatggcatagtcaaattgaaaaaagaatcgaaagaatggccttaacatcggacagacaaaaaatgtcagtcatattttattatttctcatttgtcagccacgggagggggagagagaggagagagggaggggcgatgggatcgataggccaaagacaaattggggagggagggaaaagaaaaggaatgataacgcaaaaataaatatttaataaaaaacgaaaaaataataatttaccaataaat

SEQ ID NO: 24297 - DNA, 887 bp, Heterodera glycines
ttggttagccgagagcttaaatttttatcagtcatgccaaacaatttaattaacaaacaaaaactaaaaatagttctatctttttcacaaacattgtccgtaatttgctgttataaaactatggatacaaaattaaaaacgagcaactacatactatatttatcaattgaaactaaacttcttaaaaataaaatcgttttattactttcgatgtttattgcttaagttgatccgaatgctctttaagggcgatgttcaagatgaaaaatcaaaactaaaactaattaatatgctcaaatatattaaaaaaaaaattatttttgtgaaacttaacgaagctggtaagaaagacaagtgttaaatttaaaaaaatagtttattcttaacaaagattaaaaaatattttagtttatttaatgttaattttttattaattatatttcaatttttataattattctgaattgtcagtcagccgagttttcctcagctgattggtcctgacgcgacatattccgtttcagttatttgattacctaataaattagtcatttgctataatataatcaatcggtgcaaccattaaacattcactgattaccattcattaaatcattatcattattcacctctctcccctccagcagagacaggggaggggcggcccggcaatttttaatgcgacttgttaacagactttgtcaaaaaaatgacaaaatttgcattttttttaacaggttttcatctaaaatttgttagattttcggaaaaattttgcgaaatttttaaaacattttggtaaggtaatggagagggaccaacaagaaaaaatggaaaatttacagcaaaaaataatatttttacttaaaaatttcggggttgggggg

SEQ ID NO: 24298 - DNA, 1547 bp, Heterodera glycines
cctattaatctctttggtttttgaaaaagcattcatttattatacaatatttcttcaatcctgtgttgtcaaatggcttttccatatttagtcaatgtcccattaatagaagaggtatgttttgtacatatttattctcatctccatttaagctcactttccttttcaattcccccccctcccgcccccaaaattgcttaattgtccccatggatcacctattggtaaagcatcgttctctcccagccgaactcttcgacgaaatgtcccgtttcgttcccggccttttttgccgtaaaactttgagcaaaacaaactcaatattttaccttttgtttcgattcacaaaacgcgcaaaacggtggaaaatcgaagtacaataatttaaattataattttgaaagtaattgctctaattttttgccagtgggaaataaattgcagaattgttttaggtttatagaaattaaaagaaattttggccaccttaatattttttacttttttctgagccccatgagcttacaaattatcgctacgttgttgctaatgagagacgattcattatctctcttctgccaccgcatggccacgggtttaagccatttaaataaataaataatattcaattatttattattctatcctcggaattaaataattacataaaatttttgaaaattgattcagaaagcggccattcgcgagcacttcactgagggcgttttgaatgaacttgaaatgcgcttcaatgttggcctgactttccatccgttgccgcttcatattgtaagcataatgaattgattttgtgggtcaattcttatgataagcccactaaatttagcacaaattatccttaaacaagtttttatttaatttttatttttttgccttttgataatgtttttgtgggttaatttcttttaattaaatattttaaaatcaaacagcaatgggacgtttgtatggtcacctttttcgccactttggatgcctgggacgggttcatgagtgaagtcagcgacctgctaaatgaagtaagctaacgtatcaaacaaaattaaatgcaattttcaaatgcccataaaaacctataataaaaaagagctgttttgtttatttttatttaaaattaatccattgatttttttagtgattcattaaaacatattttcttgcacttttcaaattatagctttatgcgcctagtccaccgccgccggctgattccccttctgaaatggagtaagaatgatcgacagaaatgctcttcgtcttacctttttttggtgccattcgtcaagtgcctctcattcatccgcctctctttttgccacctttttcctccaattttctcgtccaaatctcatttggtccgacattttttctacagttatgtttgtgcattacgtccatctctcacatcatccataacctaacgaaaaacgctcacttttttttaacatatacatgtccaacaatatattccgtcaaagggtttaaaaaatgattttgcatataaaatttaaatttaaaaaaatttg

SEQ ID NO: 24299 - DNA, 1621 bp, Heterodera glycines
aatccaataatgccgaatccgatgttcccaaatccaatggtgcctaacccgatgagccctaatccatcaaatccaatggtgccgaatccgatgtttccaaatccatcaaatccaatggtgccgaacccgttcttcccaaatccgtcaaatccaatggtgccgaatccgatgttcccaaatccatcaaatccaataatgccgaatccgatgttcccaaatccaatggtgcctaacccgatgagccctaatccatcaaatccaatggtgccgaacccgatgtttccaaatccatcaaatccaatggtgccgaatccgatgttcccaaattcatcaaatccaatgatgccgaatccgatgttcccaaatccaatggtgccgaacccgatgagcccaaatccaatggtgccgaacccgatgagccctaatccgtcaaatccaatggtgccgaacccgatgatcccgaatccgtcaaatccaatggtgccgaatccgatattcccaaatccaatggtgccgaattcggtgttcctaaatccaatggtgccgaacccaatgattcagaatccgttaaatccaatggtgccgaacccgattctcccgaatccttcaaatccaatggtgccgaatccggtgttcacaaatccaatggtgccgaacccaatgattccgagtccatcaaatccagtggtgccgaacccgatgttcccaaatcaaatggtgccgaacccgatgatcccgaattcgatgtcgaacgcaatgcctccaaatcaatggatggtaccaaatcagatgatatcaatgatgccgaatccttttaccagtttaattcacttttgatgtgcgaatttatgttctaaattcctcatttggtaccaaataattaaaaacataaaattctttattttatttcaaattgatttttaaataaatctctaaaaacaaaataaaaaataccgaaactttttgcccaatgcccgttcacacatctccggataaggctcatggcaatgcttgtcacgataaattgttggccatcttcgcctcaaaagcacccaacatttgccaagcataattgatgttgacatggccatcaatgaaacatgaataatcaattaaagaagataaatagaagaaatgaattattttactgagacataataatttataatattttttagattcaaaaaataaaattcataattaaaaaactttgattttttgaaaatttttggttggcgaaatattcgaaaaattttcttgtaaatttctcaaacaaaacataaagtttctaattgaaattgtaaaaaacccttcaattacaataataattaaaaaattaacttcaacaatttttcattaaaacaacattaattatatttacaaaataattaatttaatttaaaatgaaatattcttacatgttaaagcaacattcattaaaaggcccggaccaatccctaaaaaattaattattattattattatatttttctgaattttatttttacctgatttgattattgctgttggtaaagccacaatgccagcaccagccatttgggcgacaatgaaaaatgccgccacaaagaagtttatgccgtgccgttttcgatgaatttca

SEQ ID NO: 24300 - DNA, 174 bp, Heterodera glycines
tagaaacggaaggccaggccatcgaccgcgtccatccgggcctgccaggccgccagccaggacgtcagggcggattcgatgaatgccgcctgatcgcgcgcctgcgccgtgatgtccgcggcgcggtcgcacgccttggtccaccacgacagcaacgccaggatgacggacagg

SEQ ID NO: 24301 - DNA, 1643 bp, Heterodera glycines
acaaaatcatcattcccacattttttgaaatttcgggattttgaaggataaatgtgacgagatccaatcccgtgaaaattgaatttttatttcctcatccatgaaaaactatacatatgtttaaattgggcatcattaaaacccacgctcactcgtcactatgcatcataatttggccgctggcagacagcgcaaagaatgaatggttgtagccccatccgttccatttcaactgggaatccctgaaaaaagttaaaattcagaaatgaggtccttgacttcaaggacgcccttaaacacaccgagtcaatttttggcactcagttcaaaattgcatgtgccccacaaaccctcaagtttcatgtttttatcccaaaataacaaaggagaatatgggaccccccattcttcacgattgccgaatttacaaaattttctgggttttgaattgggccgcagggtccaaacaattgccacctccccccccccccctcctcttgttgctaattcgaataaaacagcacagatgaacgcagccaagcaacaacagcagttgaccgccagtgggagcagcagcaccagttgtgcgtgacaattccgtaccgcgaccgatggacggaattgcaggtgcaattattgttgcataaaatgtcgagtcaatttggtttcctcacaccgaaaaaaatgctaaatgtggaggggggtagagaaaggcaaaacaacttatttattagtttattcgggcgaacaaccttcacgttgttatttaattattaacaatgtttcattttgccaacaacgtataaaacaacttatttttaaaatttcggtcaatttttgaaaatttatttcagcgggaaatatcagttgggagagagataacgcaaaatgagagagctaaaaaaattcagtactgctcatacaaaagcatttttgatgaaaaaacagagaaaaaattttaatagtaccagtgccctatgggcactgaaagtactgattttaattttttttttttttttaaattgaaatagcttcgctatttaacactgtctctagagggcgctacgcgccaaaaactttcaatatgaccttatattaaaattgtttcctcttccccttcatctttttcccttctattcccatttctatattgtctcctcttcctttctgtttctctttctcttccactttatcttccactttctctttctgttcctcttccactttctgttcctattccactttatcttccactttctctttctgttcctcttccactttctgttcctattccactttctcttccactttctgttcctcttccactttatctttctgttcctcttccactttctgttcctcttccactttctgttcctcttccactttatctttctgttcctcttccactttctctttctgttcctcttccactttctgttcctcttccactttctgttcctattccactttctcttccactttctgttcctcttccactttatctttctgttcctcttccactttctctttctgttcctcttccactttctgttcctcttccactttctgttcctattccactttctcttccactttctgttcctcttccactttatctttctgttcctcttccactttct

SEQ ID NO: 24302 - DNA, 2439 bp, Heterodera glycines
atcagatggagtttgattcggtaaaaggcattttaacatttcgtaatcattaggattacatgtgaaagtaataaacaaatcaggtttgcctgtttcgttaactatagctaaagcatccataaaattttcatgcatactccttggtcctcctgtaaaagtagacggtagaattaccttttttttaatttctgcgcctgttttagaagctctattcttaagaaaatcttcaacatttaaataattactgctacacaattccatctgatgcgtccttatatattctaagcgatcccattcaattttagctgcttgatccaccagccattgttgaaagagtttttttgcgtaaaaatgagggaaaaaaataccattttctcgaaaaaataataaaaatttggtatagtcacacaaagaaattttttttccatttaaatctttgatatttacattaaatccttcgctactcattggatataataaaggataacacatttggtctacacatttgtctaacggataaatattttttaattgtttttcacctttcgggtaaaccactattcttgcaggcggaatttcatcattggcatcacaaactacaattgctccaacttcattacaccttggaatattgtaccgccttttatcacaattttcttttagactgaaaactaaatttatatttggcatttttaacccattttctttacagttattttcttctctttcataaacctctttcatcattaaaaaggattgtgcaaaagggttcaattttcttaataaattttcaagaaactcaattatatctgagcggcattctttattattttcagaacgaatatctatagcttcttcagaatctataaaatataactgtccgtttgtaggaatttcattatcttttggcatagcgttttgattaaatttgtggtatatttgtccttgtattttatagcatggagggccaggactttgaaatttaaaccgaaagcaactaattgaagcacaggcgaacatactattataacgacgtatatttgtaataaaattactataaaaaggattttcctcaaaaaataatgctttcatttcttccggatatttcgaaacacattctaaaagatttaaaagcctaccacctttacaacaactaaaaaaaatgcaatccttaactacagatttttcctcaggaaactgcaaactgtcacatttcgtacatttaaaattaaaatcaccgaggagataaagattagcttttttagggtctgcggcagcaagataatataaaccatcaaaattcctttcgcgttttcttgaaaaaacatgcgaaactgaatttgatattttctcgttttcaatttcttctaaaaacatctcactccgttttgacgccattcgaaccttactcatttctctttccaatttcatttcttcaacagtcatttggtttcgttttgctgtcattttttctttattcaaaattctttcaaattctatctcttcaacagtcatttggtttcgttttgttgtcattctttctttgttcaaacttctttctaattctatctcttcaacggtcatttggtttcgttttgttgccattctttggcgatttaaatgtctttctaattctgttttttcaacagttctttcatttctttctttattttttcgcattgctgattgtgaagttgattgtcggaaaaaatcatcatcaacttcatccaaacataataaattggttggcattctttcaaccgttttttttgggagctttgaacccggcaaatgattttttctgatgggttcattgaacccaatatttaataccggacgaacatcggaaaaggttggtggtgttgaagagggagtctgaacatcaacagaaaatatttgtttttttcgaaccatctgaaaagtaattataaatcatttcaattaaaaaaatgttcctggtgaagataaacgaaggaaaattgtgctcttattcttgaaaaattatttttaacataaaacccaatttttcaaaaaaagaattgaaaaaaacaatttaaaaaataaaaagaaacatttcttggtatataggactacaacaaaaattgaaaattagaaatcaacagcttttgtttaaataacaaatttatataaaactcaatttttggttaagtaattgagaaaaaaataatgataaaaatttgtttttttaaagggttttaaaactttgataaagcaatttagaaataagtaagtatgtctgaatgcgacattaaaaaatatattacgtatttcatcaactaaatattttttgttgtttacatgaaaggatgaggaaagaaagaaaagacaatgttttcgtgtcgaaaaatatttcaaaaatccatgaaaaaagtgtgacacacacacacacgaacggacagaccaaattagtatagttaa

SEQ ID NO: 24303 - DNA, 1461 bp, Heterodera glycines
ataagcaaattaaaacttttcaaaacattagctaaccaagcagacttttttgtctaaataaaatttcttttagcgccagtcgaattcctctttgacagtgttagagaaagtaaatgatgtgatcaaagcggagacaatggttcgcatttatctaataaaaatttatgaggccagtaaccaaaaaaagaatttcatgtgggacaacagctccttgccccctggttatgggcctgaaatttattgaagaattcccattggccgtcaaaaatgcatatttttattttttttagacgggtacaattttggcgctcggacgacatttggtccagtttggcaaggtgtctaagtccgtttttgacactttcgacactctgaccgagtcaacggatgaggaattttcgaagcaaattaaaatgatgcgaaagctctgttccgatcttgttgaagggtggaccaggctcaaggtttggcgctcagccacaaaaaattgccatcaaaggctaatgtttggtctgtcagagatggtccaatttaggactaaatttggaactcaaaggggaaaggggcgcccagaaagggggacaattgagcgacagtttagctttttaagtaatttctttcctaattacctttgaatcaagcaataatcgaaactatatattttttattaactctgaaaaaattcctaaggatcaaaaaaagtgacttgaaagccaggtttctaaaaattgccggtcccgatttagactttttcatatgtctggtcacaatcgctaccccacagtttcttagctaaaatttaatttagtataaaaactcaaaatttgtcgtccaaacaaacgtggtaccatctctaaatgacaagtcgtcattttctattctgaaacttttaaaataaacaattttcaatgacgaaaatataggtgttgagaaaaacaatacgctcacaattggatttgcctttaaaaagttttcccgacctaggtcaacgttgcaaaggatgcctcggtcaagcaggcattttgtttttttgctggacgtctgaaaaaactcgaactccatgccgtggccgaattggaaaaacttgccatggaactgaatgatgagtcgaaatcggctgcagagtcactgcgagagagcttttttgtgctgagcaccgcgttcaacaacgcattggccaaggcatgggacctgtgggaaatggttgggcaatgactgactatcaatgggaccacagatccgggatatgatgaaagttttgaaattttggaaaaaggaaaaaataatgaaaatacatttgagttctctaaagcttaattgcatattacagtttgctgttcccagccgtgagatgagcccagttctggtatggataagtttacagggtcaaaatttgctcaaaatcatgtcccgacatttgcgcctttgtccaaaaccgggttcaaaattaagttttttcaa

SEQ ID NO: 24304 - DNA, 2387 bp, Heterodera glycines
  unsure (1)..(2387): unsure at all n locations
aaaaaattttgcttaaaaaatcattttttttttttggagttttttttttaaccattttttttaaaaatccattaaggtacatattatagctccaaaaccacaaaacaaagaaattgtaagttttttctctcccataaattgaatttttcactgccgtattggtgcgccggtggcccctatcatggctcggcgatttttttaattctttttgtgaagggattttgggggttcggtggtgccgttagcgtcgccggggaaaattttgaaaattngaacgtactgaataggttttcaccaaaaagtgacaaaattttcgattttgatcatgtctttaagaaaaaatttggggttttaggcgtcgccgggtgaaaggaattttgggggttcggtggtgccgttagcgtcgccggggaaaattttgaaaatttgaacgtactgaataggttttcaccaaaaagtgacaaaattttcgattttgatcatgtctttaagaaaaaatttggggttttaggcgtcgccgggtgaaaaaagtgcaaatcaaattttattaaatttaaaaagttaccaaaaatgtgttaaatttaagtttatcaaaagccaatcattagggaagtaaaaaaatctcttttcggtctcgagtctcgaaaatcgagaccgagactgaaaataccgagagcgagaccgagaccaaaaaaaacccgagacttttctagagccgagaccgagactctcgagcatcagccccggcttttaccatttacgggattttaaaaatactttcattcatgctcaatggatttaaatttcaaccgatccttgttttgtaataaatttataaatttcgttgatggtaagcaaaagttttcccgttccaaatcacatttatcacatttactttctgatcaattcaagattcaaattctcagtctctccgggtttaagcctaagccaaggcctagcctaaagcttctaagcaattgtacgagttgtctgtgtacaagttgtcacgacacccgaaagaaactgttaaattaaaaaaaatttaatagtttattttgaaccaagataaatattttagtttatttgtttcattatttttcaatttttatagtttttgtaaattctcgtaaagctgagttgtcctcagctgactgatcctgtcgcgtccatattattttctaggcttttatttttagcgcctaaaaaacctaaaaatttttgaaagagcctatttttgcctattttggcgttttgcccaaaatttgttaataaaaatgcaataaaaacgaaaaatacacccctaagaagcgattttttgaaaattttcaaaaatatagcctaagaatcgactcaaaaatttgtagaattttttacttttttgaataaatttttgttattttacacccctaaatttgaggatttttagtgcctattttccatttttaatgcctattttggggttttttagagcctaaggcctacctattttggcggtttttagtgcctataaatgtaatccctagtaataaaatatgattccgatatttaatttgattaaaattaggtaattgtaatttatattaaatcagaaacctaggagacggttcacgacttttttatttttgcagtgttatgtatcagggatggcacggaattccgacttccgaagttccgacatttttggggtcggaattccgacttccgaaaatttttggggcctcggaactccatccctggtgccgataggcgacgctggaaaaattttgcaatttcgtttggcttgttaacagattttcaccaaaatccgagctaaataatgaattaaataattaattaatttttaaacctaaaattttttatcatgaaaaaaaaaaaattaaattttggtgattaatttttgataaaattttaaattcttaggggtgcattttctaaaatttttcggtagtcatttcttaggagtgtattatcccgattttattgcatggaatttttcggaaaaaacgcaaaaaaggcacgaaaatcccaaaattcaaaaaaagcataataaaagtcaacgtataagcttaaaaccaagttgaaaatgtgctttttatgctcaatatatcggaattaatgcgaagaataaaggcatataaaatcacctaaatttcaaaaaatttggtcaagattgagcaaagttatggccaaaagtacccaagggaccggcttttcaaacatttttggccatattttttttgaaacctaacgaaattttttgaaattttgcaggctaatagaagacacgtagggctatcgaaagatagcaagatcactttattttgttcgttttgtaagaatgttttgatcaaantaatttttgaagatcaaaantaatttaattttta

SEQ ID NO: 24305 - DNA, 2142 bp, Heterodera glycines
ctagcggcaggagacaaaaataaaagccagtttttatacactcaaacttttttcagtgtgtgtcgaaaatgtaatgcggttcattttgtgaagaacaatctaaaacagttaaatcaaacaccttctttaattgttgtaaagatggacgtttaagtccattgcaaaattttattgaggaatatcctgaagaattaaaaaatttatttttacaagggaatcctaaaaacaaaattttttaaaaaaatattcggcaatataataatgcgttgcattggcttcgcttagttgttttcgtttttcatttccgactcctggtccgccttgctttaaaattcagggacaaatataccataaattcaactcaaatgcaatgccgtctaatgaaaatgagatgccaactaatggccaattatattttgttggcactgaggaagcaaatgaaaatcgttataaatttaacaatgaacttggtggctggacatttcgacaatgactgtttcgccaatgaccgtttcgacaataccttttcgacaatgccgtttcgacaatgaccatttacgactatatcatatcgccaaaatttaaaatatcaaattaaatataataaaatgaatataaaaaataataaataaatttaaaaaaatatcaatgaaatttaaagagaaaaaggtagttatattttttaaatttaatgaatgcattatctatcgcctattgtgtatgattattaatagtgaaaaaagaagacaaaatgagacggacctataatataaatccaaaatgaaaccatttatttaaattattgtagtgtcctctttttacccaggcggcaatcctgaagaatggttgtccctaatttttaattttttttaaattttgtgctcaaaaccagtttttaggcgtttttgagggtgctgataacggatcttaactcgggtttgcccaattccgaactccggacccgaattcgaacaaaaaaaattgagtttttttaatcaagaataattttttcagggtaaaagcttctaattcattatcaactatttaggtgtaaaacaatgtttcaatttttaattaaataaaaaataagcaatttgcgccgaaaattgacaaactaaagccattctcataatgttattttgaaaaaaaacgaaaaaaaaacttttttatattgatcccaaatccgcaccgtccatataattttgcagaaatttgaattttatttaaaaaaatatatttaattttattgtcgaaacggcattgtcgaaaaggtattgtcgaaacggtcattggcgaaacggtcattgtcgaaatgtccgggagcctttaaaaatggctaatatggtattaaaaatcattttaaagaagaaaataataaaactaatttactaatttttagcgaaaaatcaacccaaaaacaaattttattaaaaatttaaataaaaatttaaataaatcaacattcacgagaaagttttttaaaaaatgatttttttcgggaatttttccggtcttttctctttctatttcctcttttctttcagttcctctttctctccacctctctcttctctctccccccttctctctctcccttctctctctctcccttctctctctctcccttctctctctctatctcctctctctctccctgctctttctcttctctctctccctcatctcactcttctctctctcccttctctcactctctaccctttttctctcccatctctcgctccccctctctttttttcgcttgccccactcactttcctttactctctcgctcactttcaattttttctttttcatacactccctctttctttcaccctctctcgcccttctctctctctctcccttgtctctgtttctcttatcactctgtctctcttctcgctctctctctctccctcctctaactcccttctctctatctcgagtctatctcgtctctctcttctctcggtctctcttcgctctatctcaccttctctcactttcttcatctctatctcctttctcgcatgtctctccccctctgactgtctctctctatctccgttctatatctctcgttttcttctcaatgtgcattctctctcctcccctctctctctctatgtctcatcccct

SEQ ID NO: 24306 - DNA, 951 bp, Heterodera glycines
agatatgcacgccataaccctcgaaacgaaagccgaggacagagggaggagacggcgtactgagattagcgaagggaaagggagagactgatcgtagcggagggagggactgattggcgcttgttttgtttttttgaactgttaaagttatgggagttttaaattctttcgcatcgtcagtacttgtcccattgtttgtatgtaacaaaagtctaaaaaccaaaaatttatttatttatgtaattcaaatacaagcgtaagcccaaaagaatgccaaattagaagtaataattagagtagagcgggaccgggaattttgggcaaaaccgggaccgggacttgccgggacctgagaagccgggaccgggacctcgatttttcttcgggaccgggaaccgggaccaaccgggaatttttaaaaattcaaaaaaattcaaaaaatttaaaaaattaaaaaaaaaatcaaattttaatttatttcaagtgaaaatattaaataattaaatttttatttagttttttatttaataaaacccaaaagttaaagctaataaattaatgaaaattttcaaatcaaattttcttcatttctttcaaacaattaatcattcggatgtccggccccacaaacggtgtaaaggccctgaagggtggaggatttgtggaaatcgaagaacagaaaacctggacaaagtccaatgatggggcgccattagccaccgaatttggcattggatgcggtttccaccgcatttgatttggattgggggcaaattgagagaaatcattcgtgaagctttaaagcgtcgaacaaaagtggagggaacggcatgactcaccgtccgttgccctccaaacggcggaaaggcctgtggaggacggacggccggacgcggtacagccaactgaaccggttggagcagcgcggagcggtgaacgcagtgccggaga

SEQ ID NO: 24307 - DNA, 1459 bp, Heterodera glycines
gagacatcacgagactctcgagcatccatcatgttcaagtctgtgaagcaccgatagggaaaataaatacttttaaaaatgtttaaactatatatttcatgagacgggtcaacattgggactcggcattagagctcggcggcatggggacggcgcacgattttgctggggtccatgcccgaaatgtcgtgtttttttttggaaattgctggattgccggattttgtggattagttcagcgggatcatgtttcgcataaaatgttagtgccagtccagggctgggaccgcaacgcgatgtgcgatctgcgattcgcggcactttttttctgcgcgatccgcggaatttgggactccgcggcaattttggaccaatttaaaaaaaaattattcatcgaagcgattgttttttattttaatattatttaaaaaagtattttttttatgtaaaaagtaagataattttgaaattttatgtcagaatatcactattttgcgaagaaaatataagatttttcgaaaaacgtgccgcaaaaaaaagcatttttaaaggcgaaatagtcatcgcttggcttttatttgcgaattggcctttttggtgaaaatctttcaacaaaacagaacgaaattacaaaaaaaattttccggcggcgcctatcgccaccgcccgaccctctccccctagcccatttcccaaaactttttggaaacatgcgccgtaaaaaattgttaaaaatctgattttctgatcccaaatgcgctgaaagttacgaattgcttatttcttcctcccccccaaaaaaatttaaatggtttaaaaattggaaaaaaattttaataatgcgcgatccgcggtccgcggcaatttgaatgcgcgatgcgcggccggccgcggttttttttgcgcgatccgcggtcgcggcaatttgaatgcgcgatgcgcggccgcggtttttttctgtgtgcgtcccacccctggcgcgaacgccatgtgtaagggtcgggggatctttataatgagatatcttctttcaaatgattaatttttattctcttgacttcgtattttcctgagggatttttccaagaatagaagattttgcttaatttttaatcataaattattatatcttataatgtgtcggaattagacgatctactaaataaattaatagtaacccaatgatattcatttatatattttaagttaaattactttggaattatttattaaatgctttaaaatcattaaaaaaatctatgaattaaaaattgatccatgtgtaaataaccaagaattgcagaatgagagagaattattgaaatattcttctcaacacgattaaattataaatacattattaaattctggacttttcatactggaaaattcaaaccaactaattcatatgcactaaatcaaattgggaaaaaatagatgacattacaaattttttaaat

SEQ ID NO: 24308 - DNA, 1888 bp, Heterodera glycines
  unsure (1)..(1888): unsure at all n locations
acgtcgaaaattttnntatttgacgatggggcgggacttatatggcctaggtgaattaaattaaaattgaatatgttatntaattccataagctaatataaatatattttaaactttgcatttttaatgaatttttatatttcaaaataggaatcccccggccttttctatttgccttcacctcgtcaatctattatcctctgtatatttctcatattggtctaattgttcaaactgttcgaatgtattggaatttttaatgtttttacatcttgatttgaaatagaaatatcgtctgttgttattttaggtcctaatttagacttttaaattaggatttttaaaaattcttattagattagaagattttataaattttcataaccacttacttgattcctaataattatgggtatgttatgaatatcgtaacagtccatatttgaatttatttttttatttgttattcaaatatgttgttgtttcttctttaatttttttacatttattatgccaattatttactatttaattccaataatactttttctttactgctttcaattggaaattgttttttttttgtttacaactcgatagccctaagaagtctcaatttacctttaataagttaaaattcacgaatcagaatattataaaatcaaatttttaattatcataataaactcagaagcaacaacctcaaattgatttaagtttaaagacctgaatatgaaaaagctaaatcagtgttggctgttacgttttgggatatggatatacgatagtagcccgcaagttaaatgaaaaataaaaaatttattaaatatctctaaaattctgatgaaatgaaaattgtaaaaaagcatttacaaaaccattttaaaaattatatgtttaattaaaagtcgattgatacaaatatatttaaagctaatttaattagacatcattaaaaatataagtaaagaatataattattttaataacatataaatatacaacatgcactaacaattaaaattttaatcgattaataaaagttgtatttaaaacttggttaattcattattttttatttgttatttaaaattaaactgatcaattcaatcttttttaattatttatacaatatatttttttttgttttaaccagcgtgggagtaaactcgtttatttattattcaagataatagtaaacgtacagaaaagatttcaactccacagttcgctcctgcgtcatcaggaagatatgtgtcactgttaaatcgaatcgcaaacaattatgtatattgaataaaaaatatgaaatagatataaattaaaattgaaaagaaatattttaataaaataatttaacaattttgagttatcttaattacattcaatgcacaaaataataaataatcaattcttaaacaaaataaattgaccaacctaagataacgcagaaccaaagtcttgcacatgatgatgaaatggataaaaagaacataattttcacaaaataaaaaatattaatcttatttttttaatatgcaatgaaaagattaaaaagaattgcttgtatttaaaatttgcagattcaaacaaactatttcgaaataaatctattttgaatgtgattccgacagaaaaaacgaacataaaatgtgacatggaaatcagtgctttaaattattgaaatgtttgtttcagctaatatttttataataaattattgtttctaattgttaagatgataacggaaaaattcaatgttaattgcatttggaaagttatccaacagtgttaaaaaatatgaaaagaatgtacatatattaaaaaatcatatttattttaattaattacatcaatatgaatttatatactaaaatatattgataat

SEQ ID NO: 24309 - DNA, 1489 bp, Heterodera glycines
  unsure (1)..(1489): unsure at all n locations
tttccaagaagggtgcatttgtttccgtcgtggtacttcgcttcaacattgcatggactcagcttcggttttccgatcccttcatgagtctcttcattgatcactacaacctcagcacctgagtccagcgcgaattccacagaattgccattcattttaatagggcattcaatcagccgtttcggttggttcaccgaattgatcagcacacctccaagcttgaggttgccttgcttacggctttgcattttcccttgccttgtcagccacgtttggtgttggttgcactgcgcttccaaatgtcatttaagaaattgtattaaatgattaaaaatatctaaaaattgccacatagtaattttaacctcaaagtgtgtgtgcttctcttccgtcagcaactaataatagttaaaataataatttcgaataaaaataatttactttacattgaattgttacgctatatttaaaatatcaccaaggcttaattttttatttcatttatgcaacgagaatataattttttatattatgattggtttaataattattagaaaataaacattctatgatataatgataagccattgacatttttagacattttttactttgcagggactttttaaaaagtaaagtgataatttaaagaacataatgtaacaatatagctataatatggtgaatagaaaatcaatgaacttaaaaagttttttattttaccaatatttgctaaaattgtaaaaattaaattttcaaatctgaaaaatcaaagcctttattgacaactttgtccaagcccgtgcacgttataattaaaaaggatatatatctgtcacatgctcggtatgtgggcgacagggacaccgaagaggtgccaagatttggtctcataataaagcattttaaaataaattagcgaataaaaaattaaaataattttaaaatcataacaaagaacaaatgtaataactattcaaatataaaaaaggtaattcaagataaaagtggaccaaatatggatatattatacaacatattaccaaaacgtctttttatactctgaatttgcgaattgcgaaattatatacgaagtaaatttaaatagtaaacattaaaaattaaatataactagtcaaaaagataaaacaaatgagcagacgagacaaagatgtataaacaaattttttaaattatatacatctaaattacatagaaaaatcaaaattttaaaaataataaattctttgttaaataaaaaaattatgttcatcaatttaaattttgatgattaagaacatagagtggccgaaaaatcatgtgataattaatcaaaaataactattatatataattttaaattaattgcattagtcactgaaaataaaatacatacaattttanaatanattcagcgaggaagtgcatgtgaaataaaaagaaagtcgtttttcaagatgaaaaaaaataaaaataacccaaaaacata

SEQ ID NO: 24310 - DNA, 1514 bp, Heterodera glycines
tttggcatcctttctctcgctatttgccacgcattttttgtcattatggctaacttattttatgaaatatatgctaggaacctgatcagactacggcagggtttccgggacctgttaattttgagaacgaataaatgaattttcgcttatccaaaaatcacaccagaaaacatttggaaatgaaaaccggtttcatacccgaaggtttgtaacgctaattttcgaatttggatttttaataaaaatgaacaaatatctaaaaaatattttgtttaaggcaaaatgaatattattcagagattttctctgcagtttgtttggctttttgtgagttttttttaaacgaagaaaagcaattttgaatattttttatttttgcaataggttgctgtgatttttacggaatttatgctttaaattttgaatgtgtgtttagtttcttttatggcactactgctggcaaggggaatgctcgctttcaaaagcaatttgctattgcgcaggagaaaatccatgcacgtcaaacagcgataattccacgtatataaattgtaatgccaatgattcaaatagagggtgggcttttccatgctttacgtctgaatgtcacagtttggccagcatctgtaggctaattcattcactagcgaaatcagtagaatacccattgattcagcccccggctttattattgcaaaattttatacagaaacaatcagttagtttatcattaatagagcccggaattttgaaatggccgtgaccgggacttggaaaatggaccgggacgggatcccgggaccgggactcccggtcccggtttgtccaaaaaaacgggaccgggagttccggcaaaattccggcgggatcctggttccgtccgggctctactcattatggtgccgggtcgttactcaaaaaaaacttggtttttcggacatttttggctataacttttttaaatattacgaatttttttgaaattttacaggcgaatatagaacatttaaggctatttattgatacaaaagattaaaaacattgttgtttttaaccaaagtcataagcaaaatttttattgatggctttttcaaaaacgccaattttgatggtttttaaggaacgtcataacaccttcattatgggcagattgtgatatttttatcattgtctttattcggtggtcggaatggtcgaagtttcagtggtgccgcaatttcttccacagcttacctaaattttaaaaaaatatttgaatttatttttattttaaatttcaatttccaccttttccacttggatcactcggttggggtagccgtcgacgccggttttactccaaactctttgcccataagaattccacgcgcattgcaaattgaccgttattttgttgaacggtggctgagttgaggtgacaattgttttttcttcgtcattgagcttaagtttaaaaaatatattgtacaaaattctctaagattgctttctaaaaaaagttctaatatattttt

SEQ ID NO: 24311 - DNA, 1558 bp, Heterodera glycines
aaaacaaaggcatttgtgtcccattgcgggatgaccctttttggagagcgttttccacggagtgccaatcgtttgcgtgccgttcatcatggaccaatattacaacgcggaattgatggcatttgggcacattgggctggcagttgacagggaaaatgaccagcaaacagtgcaaaatgaactgatcagcgcattgtcagaggcattgggacggcggcagcggaaaaagtgacaaaaattgaaaataaaaaatgccttttaaaggacaattagcaatgattcggccacgcacttcgatttggccaaattcaaagccgtaagcgcggcatttcgccaaaagaatgtggcaaaaacaatcgctgacgcaatgaaagaaattgaaaaagaaattgggaagcagaaaaaataagattgaaattaacatgaaaaatgaatagaattgaatttatgtattgtagaaaaatatctcattctttgcccttcttattgttagttacgctaatcccccagcagaattgtcatttttgattcaaagataaagccagggctcccaactcaattttaaaaaatcagcatttgaccgacaaaaaatctgcattttggaaaattttatttcaaatgaaaataataaaagatgttttttgccggttcggtggcgccgataggagcggccgaagaatatttggaatttctttaccatctttaacagattttcactgaaaattggcaatttttaaggtcaaattttgaaaattttaggggaaatgttgggagccctgaactgaagtcattaaaattaaaaaataaaagttgttttaaaattaaattttaatttattctttcaatttcagattttatgcacaattttcgtgaattaattttcaccaagaaattttacaatagtgaaaaacttgtgctcagaccgccccaaattgacgcattttgggtgcattttacgcgtcattataaggggagggacaaaccggtgcaattgtccactgattacctgaccattttgcatctttcaaaggatgtaattaaaataattttgaattattaaaaaaagatggaattttctttatgacagatcgaagcaaattcaacaaaaggatacaatgacaaattgctaacacaatttgatggacaattgggcaacggaagtgcttttctgaacgactcgaagataataaaggtacagaaatgataaccaaaaacccaaactgaatggaaaattatgaatacaatataaaaatttttaactcgaattatttaaaattacccaattaaaatgtataaaataccaaaaaattatttaatcatgtattcaaagtgactggaaaaaacaattttgagatagttagttccttgtatatcaatatactttattatacaaataaaacataaaaaatatatgtattcaaagaaaagaaatctcttttttattatcgaattcaaatggctctttcaattcggcctcactgtggcccaactcatttggagaagggcaaagtgccgttccggatgaaccatggtcggcataatttggccactgatcagg

SEQ ID NO: 24312 - DNA, 1469 bp, Heterodera glycines
ttttaaaaattcaaaaaaattttaaaaattaaaaaaaaaaattcaaattttaatttatatcaagtgaaaataatacaaaattatttggttttttatttaataaattaaattaatgaaaattttcaattatttcaaacaattaatcatttttggactaaatcatcgaatattaatagaaattcagatttgattttcacatcactttttttcggagcgctttttcaaaaaacttttgggaaagaaggggtccggcggtgccgataggcgccgccgggggaaattttaaaaatttgggtgcaatttgttaacagattttcaacaaaaaaaggttggtttttgcgattattaagctcaatcttacatttggcataagaagaattgtgaattttgtcaaaataaaaccaagtagagtctttttcgttggtcatttggtctaaattacaaagaggaaaattgtctataaaatgaacgatgaatgtataaatattttctgattgcatattccatttaaatgcgcgagaaaattggaattttggtcgttttcaaaattttataccttcaaatctaaatattcaaaaaagaaaatcgcttcaataaattttctttataaaaattttgccctaaaaaatgcgcggcgcgccgcgcacagaaaaatcccgcggtcgcggatcgcgcatcgcggattcaaattgccgcggtcgcggatcgcgcaaaaaaaacgccgcgaatcgcggatcgcgcatcgcggatcgcggtcgcgtcccagccctctctccacctaaccaactttcatttggaaatcccacggtcacacggtcatctggggaccttcctttgtaagagtcgtattttccgatcctgaatgaaaattaggtatctcgaaaagttttgatttttcgaaaaaggtttaatattaccgatttcggtatgcgagtaaaatctaggggaaaagggattaggtaggtataaatgtttgacaaaactttgtcacaaattgcaaattgctgttgtgttgttttcattggataacgtttttatttgttccactattgtgttttaaccacattcccacccctcctagcattaaacctcaacgaacaaaatgtctgaagcgaatcttcagcagcaaacgcacggcccaattgctggcactgactacgattcggcagatgaatatgtggtgattgaacaggaggaagaaaccgacttggaaaagaactcaactttgccggagacggtggctacgaacactaattcgactcccagtgacgtgcaaagtgtggcagcatcagtcggcacttttggacgcggtcgctgacattggcaatggcctcgacggagcaaaactcagtggtttcgtctgttttcccacagaatgcaatgagcggctcgaactattcgcaaaatggcttcaatcttccatttttggatccttcgggtgcttatgactttctcttctttttacttat

SEQ ID NO: 24313 - DNA, 1041 bp, Heterodera glycines
aaaaaaatcatggagcgtcttgctgacaagccattttctatatcaatcgatgcatcaaattttgggaatgaaaaactttttccccttgttgtacggttttttacaaaagataatggtattgaaacccgtgtgattgacttgaagtcacttccgggcgaaacgtcatttgaagtgggatcaattttttgcatttttaattgcaataaaaggtgcaccaatggatcaagaaaataatggcaaaatacgatttgaatgtatcaaatttgacggcactttcggcggacaacacaaaagccaatttcggtggagaagagcgcgcaggagagaacaatgtatttttccgtctaagacaacaaaatgaacgattgattggtgtgggatgtgtgtgccatgttttgcacaatgcggcaaaaaaaggcaacggacaatttgagaattgaaggaagagcaatggacattgaggcagtgatttttaaaatggccgggaattttaaaaattcaaccaacgaattgaggagctgaaaggattttgtgaggaattggaggtgcggaattaaggaatgaaaaattctaagctgttaatttaggttgaatttgaacgcttaaatcgtcatgggccgaaaagatagacatcaatgcacagtgtgttgggtaaaattattcggatggaatctgtcttaatcgcctacttttcaaaacctgacaaatgtccggcacttctttacgacttttttccgttttttctgaacaatcgtttgcgatcattcattttttacaccacgtgctaggcctatttaacaagacaattgactcttttcaggttgttttagtaatttaaatgaaacttctgtttaaatttagaaagaaaaagccattttgcccaaacttttgcttaaaatggacaaatttagagcaaaaattgagcaacgaaaacaagaacggttttatggtgccggtttggcaatggacaaagtcggggagagcacacgcgaagcgttggaggaacaatttcaagtaaaaattgtcggttgcttattttaa

SEQ ID NO: 24314 - DNA, 1487 bp, Heterodera glycines
agagcctcatatcgtatccataaaaaaataatatattaaattaaataactttggaatttccaaaatggattaaaataatttgaaagaaataattcgtaattaaaataacagtaacactcattgaattaaaaaagcattttttgtgccgtgccgccttttggtacacgaattcttttttttttgtatatctactattcatagatcagcgatggcacctatacatatttagttttgaacaacaatcccattaagctcgactggagtttgtggttcactgaccgattcgcggatgagccgcgcggtcactgggaatgccgccacgggtaaccacgggctgtccggcgccaagtcgggctcccccgccggtactcccaggctgaaattgttcggcgtaaacacagtcggtgccgggtcgaccgcgcgtttgatggccaacagtcggtcgtattgcgctttggtgtggtattggtgccacacattgcccattcgtcggtcgccgtacgactccagcagcaatttcggagcattttcgggtgccaaatcactaaagtgccctccgcttgggccaaaagcgcctttcatcgtctcgtcctgccaaccgagcaccgtctgatgcgccttcggattcgccgtcgtgttgaaaaaagcgtcaaaggtgccggcaatggtcatgtcacgccagctgaacgccgtcaaattgcgcccgtcgcggtccgtgcgcagtccgttacggtagaaagcggacgcggggccaccagaattctgcagttgtgagaccatatcaaaactggcccactggttttgctgctggtcctgttgaaaaagcctaatttggggaaagccgaaattgtctttttatataaacacaatgatgatagattatttcgaaagttttctttcattaaatactacacttaaaaattacattttttaaaatgtttatttttaattttatatattgttcatcattagggcgaggatttttagtggcaaaaaaccccaaaataattaagtaaatagttacaaaaaaatggcaaaatagtggcaaaaatagtggcgaaaaagttctaaatttaggggtgtaattttttaaatagctattttttaatttgaaaataatttaaaattaaggcaaacaattttattcactgattgcgttacaaaacattttcttagcaaatattgaacaagaaaaaaaaattggggaagaatttttgagaaaattttccaattcttaggggtgtaattttgaaaatttttagttcgattcttaggggtgtattttttgaattttttaggtcgattcttggggtatatttttcatttttattacattttttgggaaattttccaaaaaatgccaaaatagtggcaaaaatagtgaagaagcgccaaaatagtggcaaaaaactattttagtggccaacttccgaaatagttttttttagtggcaaagctccaaaaatagtgattgctagtgatgaata

SEQ ID NO: 24315 - DNA, 898 bp, Heterodera glycines
cgtcctgctgactcatactgtttgtgtcaatgttcgctttgttgagcgagtccttaccgacctagaattgctatactattaatggtgttcccaaaatatccaacggcaatattcggatcgaggcttaaagcccgacaaaagagaatccccgcgcaaacctttcaggtaccgtctgtcgcttcaccttcacacaccatgtattcggttccacaaacgtccgtcactttgacacctccatccgacataacagtgattgtgatctgaggttgcttctcatcgcttgacgtgttcattaagccttgcccatcggttgattgatgctgctccactccgtccccatcgtccatttcggttgaaaactccatttccgtcaaataaaaacgattttgagaatttttgtggtgatacctaagggcatacccgaatgaaatattgttgaaaaaaacataacaaataacgatttggcaagggcccaccaactcaaacatggaaatttcaaactgcagctgttccaggtctaatcaaatacatgaagaatccaagtaaaagatcaaacaatgcgattggaatacagaaagaacaaacaaacagcggtttataatattctcttcagcaattaatatgtaaaagtcagacgccgtaattgaccatcaaaatcatcctttcattggtcacggtcacgttcactgagtggcacatcgcaccgcttgcggttctccgttgcttgcctcttcgtcgtgcgctcgccggcgtaacatttcttcagagatgggcaccaatttgatagcgttctgcgcgttcgctccgattgtttccggctcaggctcaatctcgtgatctttcagcaattctcgcagcaagtccatgtttttcatttgaagagggaagttgtctggga

SEQ ID NO: 24316 - DNA, 1285 bp, Heterodera glycines
  unsure (1)..(1285): unsure at all n locations
gaaattacaattcgatgaatcagaaaaaggtagggatatccaattcatcgcagtttggagatcatcccttcttttagcacttctttccattgtcaagcgcaatgttgaccgtcttcatcaattatgcaatgaatggataaataccggacacttctcatctattcccgaccattaccggttattgtacgcattttgctgtgccgttcgtgccaaactcagttatttacttaaggattatttcgtaagtttttagaatgaattataaaataacagttcgatcagttgtctctccgacattgtgacgatgggttgctgaagggcaatgatttggaggatgaaagtctgtccaaattcgcttctttcttgtgccgcaaatttcttcccccgccctcagaagtgccggaacatcagaccgatgtgttttatccagaataacaattaaatcaacatttaaactaagatttagtcaaaaaaagcgcctaatttactgccgaattctgtccaaatttcgtcttcagaattgccttcgctcgaatatttcttcaacaatttttataagcttcaagtccccgtcatcattcgtggaatggtcttttttcatttataaagtttatatacatataattaaacatttatttaggtgaatgggtggccggcatttgaaaaatggagcttttcttatttgaactcgatttgtgggcatcgtttggtccctgttgaattgggtagtaaatacacggtccatatcgaatatttttggcctttttaacgaaatttttgttcaaaaattaggatgacgactggcgccagcagatgatgagtttcaaccaatatttggacgattttgtttttcccactaccaatgtgagttataatcaaagcatttttttgcaaattctttttcctttttgtttgatttttcaagaaaaatgggtaaatttttttgaaaattatgcacagttttcttaacatattttaataaaagttacaaaaaaaattaagattctagtctaacaaaaaaaaatttttcaggaatgttttcggttacacctaggttcaaaaaaagctttgaaacattcttaaattttatattttgcgcagatgttatatcccggctgacttttcggcggccatgttttgggctataccctccccctccctanaaaagttttaacaaaattttttaagaattttttaaatcgtttagccgtcccagtccggctacatggcccagcaccgactgctcgaccaattcccgacctgctcgcggatgtgctgtgcctga

SEQ ID NO: 24317 - DNA, 1889 bp, Heterodera glycines
tttgcatttgaccatcgttgctggcaatggacgcgcgtcggtgttgttacaacggttaactgaagaatgaagcccaggcacggaagcaaaaagtgctcgagcagttcaagcgtgaccatttttataaagtcgagttcaaaaataattgatgccatagtattagccaaaaaacgctatgctattttatttttcagtgctgaaaatgtttacagcaattttttgtagtttaataatattaacatgcataaaaactacgaaatctcggggttttgttttttccatgtgtacaggtagttgagacattttttgaaacaaaaaacttcaaaaattttaaatctccgagttttgctttgaatcctaaatgaatcagattccccctaaaatttcctaaaagatgcttttaaagaacgtattaaattttttgagattatttttttgactgagaggttaaaattgactcggtgggttgacattagagaccggaaatttcaaatttgcggatctcgctgcgggattagaactcaaaattttttgcgggacgggatcccgcgggattaatcccgcatttaaaatttgcgggatcccgcgcgggattgtgggattttgcaaagttcgaaaaagtttcgattaaatttcaaaaaatttccaaaaatcaaaaaatatctgaaatttttaaaaaataatttttaggggctggcgggatccattaaaaggggttgatgggtcgactaagattttttgaatggatgagacggtaaaaagagatcaaaatcaaacctgttaatggtccttaaatttgattattttgttgcttttcaaaaccgctttttttgcgcgaaattttttcaaaaaactgagaactgaggggttctgctgtgccgataggcaccaggggtggggcgcgcacataaaaatcccgcggtcgcggattcaatttgccgcggtcgcggatttaaaaactcaaaattttcaactttttaaacatacatttttttaaacttttttaaaaatttccttattataaaaaatcaattaaatctcggtgcatatgtgtaagatttgcgatgggactggagaaaggggtgggggggggggcgcgtcagtgtccaaatgacacgcaaatcctgtgatttgttatattttcagaccgcttttttcggcgcgctttttctaaaaaacttttgagaactgatgggggcatggtggatccggcaaaatttttgaaaattagtgcaatttggtaaaagattttgtaaagaataacctattttgtgatttactagccattttttttaaagaaaattaaagttttgtcagcttcgacgtggaaaaattggaatttttgaaacgaaaaggatttgtcagctctgacggggtaaatatggaatttttaaactaattttcgagaaaaataatccaagttttcaaataattttcatttaaactttggatattcaaaaaagaaaatcgcttcaaaaaaattttctttataaaaattctgccccaaaaatgcgcggcgcgccgcgcataaaaaaatcccgcggtcacgcatcgcggattcaaattttcgcggtcgcggatcgcgcaaaaaagacgccgcgattcgcggatcgcgcaaaaaaaaacgccgcgattcgcggatcgcggtcgcgtcccagccctgataggcacagctggagaaatttttgaaaatttaatgcgatttgttaacagattttgtctaaaattgaccaattttgtaattttgagttaattttttaaaagaaaaaatagggtgaaggccatccggcggtgccgataggcgccgccgggaaaatttcacaaatttgaatgaaatttgcgataattttaatatttatttattcaaaatatttgcattttgccataaa

SEQ ID NO: 24318 - DNA, 762 bp, Heterodera glycines
ttgaccaagcggacgagatcagcatccccgaatctccttagaaatatgtttttacgactttttgcttccgaaaatatcagcccggtccggtatttttgagaatccgatctctaatgtgtatccttctttcagtttattgttaattaaaaaaaatgacacaaatactttaatgccaataggccatcaatcaaaaatggcataattcaatcaatgttccctcagctgcttagtcttcgccacttcgaagaaaattctaaaaattttttttcaatgagggaagaataacatgatcaactcactcatggctatatttgcggaaaacagtgtccaagtccggataatgctgtttacgttcgatgatcatccgattgagacgccacatcagcggttcaatctgaatggaagcaatcggcaataatagtttggcgaaggagggttggaatggcaaagtatggaaaatcgaatgaaatgtcaccaaaaaactcacatcagaatgtttgaagccggtgtacttgtgcaaaacgggtccctgaatgtttaaaaggcataacaattgcagtagtgaggatgcgattctcgaaccgaaaattcaaatcgtttttggtaatccttcggaattggtgaaccgacgggaaaaagagataaaaattttcttttatctttttctagggtaaaaaaatgcaatgatcacgaatccgaacctcggattttgggcaaatcattgattttatctatgctttttcatcaagtacttgttttttt

SEQ ID NO: 24319 - DNA, 1753 bp, Heterodera glycines
  unsure (1)..(1753): unsure at all n locations
ttcaaaaagaaaaaagttattccagattctgggaattttcgattttcagaaaanaattcgtagctgcttctgaaaagctattcgggaaaagtaaaatactacaaaaatccgccaattttttgctctattaaataaattttatctggcatttttatcacttttttgcgaattgttataaaaataaaagtgattttgagattcgggaccaaagggggtggacaggatttttgactggaaaattttttttcacaaaaatcttccaaaaacatgtctttaggggttatttgggccgctgatcacgaatacgtgatcagattttacttttgacatcgtttagacctcagaatccctgtgtgattggggattctgaggcatcatttttgggggggggggggcgaagttcgagtccggacggtgtaaattattttctttgtatttttgatttatttttcaatgcttttaattaatttgaagataagttgtaaattttaaatttttttaataaataatttcattattattttttatctgtaaaaaataatatcatttcaaatttcttaaatattcaatgcattcgatttttattctttaataaaaaacttttccttatttatataattttaaaccatgttgaacctcttcttatcacttttgtatctcttcttgtcactgtagtacctcttctaatcactattgtaacttttataaattaataaaaaaataatttttaatttaaataaaataatttttgataaatgctttgtattaaaattaattatttatttgttctaattaattaaatattgtttgtttgatttatgtttaatttttttgatgaataaaagttttattttatttgacttttcgacaaataatttcctttcaatttcaataaatatttcatattatgcatttaaaaattataataaagctttaaaaatagagaaaaagcgcgaagcgcccgtcctgaggccgcgaagcggccgatatccaccacaaaatttaaaaacgggtgcggagcgcccgtcctgaagccgcggagcggccgaatatcccccaaaaaattaaaaaacgggctcgaagcgccagtctgaggccgcgaagcggccgaatatcccccaaaaaattaaaaaacgggctcgaagcgccagtctgaggccgcgaagcggccgaacgtctcacaaaaaattaaaaaacgggcgcgaagcgcccgtcctgaggccgcgaagcggccgaatatcccccaaaaaattaaaaaacggctcgaagcgccagtctgaggccgcgaagcggccgaatgtcccccaaaaaattttaaaacgggcgcgaagcgcccgtcctgaggccgcgaagcggccgaacgtctcacaaaaaatttaaaaacggacgcaaagcgaccggaactgacgacgaaaaaaatatggaagtctaaattaccagcagttgcatatttttattgcaaaatttgattaaaattaaaagaaacattaatagaatattaaattcttctctttttatattttattaaacgaatttataaattattttcaaatgaatgcaaggttgttctggttcattttgatgcacacgaccttaaaagcggagaaaattgcgtttgtttaatgaaaatatgctcaaaatatggtcaagattcttaatttttcccccggtggcgcctatcggcaccgccggaccgtaaaaatcccttaatttacaagcaaaaatttgctcaaaatcgcaaaatttggccatt

SEQ ID NO: 24320 - DNA, 1805 bp, Heterodera glycines
tctaaattatcccgatgaaaatatatagtgacagtcgttttgaattccaagcaggaaaaatgaaaaaatattttgaggaaaaattcatcatcaaaaatgtaatgtatagtcctgatctgcacgccggagtcgttgaaagggcaaatcggacaataaaggagcgcttgtacagatattttacaaagaaagacactcttcgatgggtcgacgtaatagacaaaataataacaaacattaacaacagtgtgaatagaacattgggagccaaaccgtcttcaattaattttgaaaatgcccgtgcgctctgggaaaaattatataaggagaaggaatttaaaatttcgaaaaagaaaaaatttaaaatcggtgatatcgttcgtattaccaaggaaaagggaaaattttcaaagggatacctcccaaactttaccgaagaattgtttaaaatcgttgttgccaattcgacgacacccgattcatacaggatcgaagatttggaaggaaatttaataaaaggcatattttataaccaggaattagtgaaaacagatggatgatttttacattgtactaccttcgaacacaccggggcaggagaacactacgtcaaaattcacagttcgactccccgagactttggaattgggcacaaattgggcagtagctctctcatcaattatttacccctactcattcaccgcactcggtataaacggtcaagagtttattaaagtatgggaaaacgacatcagtgtccctactcaagtttatttaccggacatgaattttaaaaccgccgggggcctgggaaataaaattaatgaggcattcacacatcattacaaaatcaaaaaacaacgtggaaagagagaagccaaggctgaagataccaaagattcaaaaattgatgtcgcaaagagggccgcagaacgcgccgggagagacgtagaaagacattttaatcagatcaacaatatatcgaattccatccaaacccaactaaacacactacgagaaacaaatcctcaaattttagaagagcctgatataaaaatttggtttgacaaaatggttgagatgggaaccgaaattcaaacatcccgaaatgaacttaaatcttttcaagaagaagtagataaagccaaaaacataacattggagcatgtggaaaagaatgacttgaaaaaagcaaagaaatcagccgacgtcgcaaagggaatcgccagacaggcaaagaccaaatatacatcaactctcgaggaatataatgataaatcggaaaagggttttagcgggatggtggttaggcttaacgaggcgctcggtgagcattttaaacataaggaaattgaaaataaagaagtttcagaagctgaaaaagggccgcaaaaaagagagagattagccaatgaggatgttcaatttaactacgacagtattgatcaaaaatttattgtctatctttcctctgccgtcacccatatagatttgtcaaaacacctcgcatatgttctggggtttaagaatacaaggctatttcacgcggaagaggcgacttatatgccggatttgacgggaggtgtaaggcagctatacatttatgcaccaaatttaatcgaaaacacaattatcggcaaccagatggccccactcttaagaatagttaacgtcgtcgatgacccgggatcaattagtgaagttatatatagcaccgagtattttcatcgtctacaatcgaaacgaatttcagaaattacaattgaaattcacacaccgtttggtgaattcgttaaatttcactgggg

SEQ ID NO: 24321 - DNA, 1964 bp, Heterodera glycines
  unsure (1)..(1964): unsure at all n locations
tttcaatccattaataagcgggatcggggttttcccgggtacggcagaggtaataaaagccaaaaggcctaaaaaattagggattaaaaaataagattttgaaattagccgttcaaaacgtccggcgtttagggcaaaataagtgcggtttcataattggtaaaagcaggtaaaatccactccacaaaatcctgggtcggctcatgtccctccgcctcgctccaatccttgatcctctcctccccacaaattttgcaattcgtcctgtttttgtcatcacagcattccgtacacgtaactctcaccgaaatataattaataacatgctccttctggtcccccttgtaaatagaatcctgcgaagtctccgaatcctgaaagttaggtcttattttgtctttttctttattaaatctacccaaacgacaattcggtagacgtccttgtcttccttctcctcgatcggcataatataacatccccgcttggggtcatggctcacactacaaagttggcaataagtctctccacattcatggtcctttttcgggttaaatcgataagtcttgtcacagataacgcaacgcctccataatttacaagtctgatgtccctgatgataggtgtagcattcccaattataaaagtaacgtcgacacttcgggcattcaatcttcactccactctccttttgacacggcattcctccagctctattgcagtaataacatctcgcccggcaatccatcgtatgataaacatcctgatcgtaaaaacattcacattcaacgcagaacttcctcccacggttgaaaaagcaaacatatttctttaatccatcccagtgaccattctccaaaaatatcggtacgaccttctctcgtcccatagggcccttccacaaaacacggatcgatttccgcggatccgcagacttctcaaacgcaacaacccggtactttccggggtaaatctcatcctgaaaaatttattaattttgcattttttcatttaaaccccacccaataattctgaacccccgataagtgctccactccatagctatattcgttaatatcaattccacaatttcttaaaagtccgtatgctgcctcacgttgtctcacgatgttattcataaatcgattaaaaatattccggtgcacttccaaataaagctttgacgccaccaacgcataaaacaaacaaaatttatccacattcgaaatccttaataaataattataattttttcttttttctttttttctattttctattttatttttttttcaaaaaaaaaacttactttatccgttggtgttccttgaatccgaaatcaaatttatgtacattcctcggcccctctccactgggcatggtcacgcaagtaattttcatcataataggctccgacaacaaaagcgttttcttattttcatctccttccccgctctgccccaacttattaatctcctgcataataacatccgcattgttctgcgggtacgccctgtacggtacccaaaccggggaagcaagcccggcacccgttattgccactccaaacatccgcactttccgcttcatcctttcttccgtagtcttaaaagccgccttaatcattgtgtcgattgcgtccctcatcgtttcatccgggcgtctcacatccggattgatccgaaattccataatgttcttcgtgaatccaaatttttcgcaaatcgtcgaccgttcgtcaattaatttataattttccatttcctcagtaaaattgttcctgaaaaattattgattacacttgtctcttanatatattattaaaaattacttacccgattgatctnaaatcncattttttggtcgacggnccggcttggtccgtatttccatgtgcgttttgaagtcatttttaatttaatttatattttttaatgagagcgcacaatttttattttagcaaa

SEQ ID NO: 24322 - DNA, 1779 bp, Heterodera glycines
  unsure (1)..(1779): unsure at all n locations
tagatgagctcccagatctgcctgatcctcaagcgccttctacgaggggagaggaggngataaaaaaggagtaactcctgtgtctgacaggatgaaaatgctcatgggtcatcagaaacagcaaaggaaagcagtagaatttcttttcaatgagataactcaaagattttacattaacataggtagtggagtacaacatgttgatgcgagtagccatcttgcatatgtactcggatttgagaacactcgattgtactataatcatccggccaaatacttaccagatctgtcgggtggtgtagggcaattgtatgtttatgcaccaaagttggtggaagatacaattattggagaccgtatggctccattgttgcgcgttgtcaacgtgtcaggcacagttcctctggacgtgccagaggttatatataccaatgagttttttaaaccgatacagaacaaacgaatttccgaaatcaaaatcgaaattcaaacagcgtttggacgttacattaaatttaactggggtaattgcgttctaacacttcattttaaacgaaaactattttaaaatgactcatgtctttttcaaccctgactccattgaatggtcaacatttctagcctcgcagcaagaaggaagaggcgaacagcagtattttgttggtacacgttaccaacgcggaggcggtcttctgcaaaatgtagcccgatttttgatgccagtggcatcaaatctactctccagtgcttcgaaggaaggaattgctgcaggaacacgcgttcttggcgatttgtcccaaggtaaagcattgaaagaatctcttgaaacgcatgctaagcaaggtttcgaaaacctggcaggaaaattacaacaatgtgggaaaggtggaaattatggtgccgatggtagaagaggacaacgagtgtcaaaggttaaaaaaattagtggcatcagctccagtgattctattattggcagaattgggactgttaaaggccgacggaacaaaatcatgcatcagttaagctccccttgacaccttgaacgcgaaagtctataaataggtaaagaattttgcaaaatcatacatttaggaactcattatcatcatatagcagtactaaatattccttattgattaatcatgagtattatcaaaaaaattgacaaagatagtgttgaaggtcttgaaggtagtctatcattgtttaaccttccaccgacaaatgtggctattaataaaacgagcgttcaggagcttttaccattgtccgctctcaaccagacaggaccctatctttttcgtctgttttccgatagtcaatattgtgatcttagcaaaacgtacatgtatttgctcacttcgatagagcgtaagaatgccgccggagaatgggtgccgaccgacgatgcgattgaagaggacaaacatgtaggtgttattcaaaattttggaagcagttttgttcgatcattgaaagtcaacatttctggtgtcgaagtgtttgatagctcaatatactatcactatcgtgcgtacataatgcaggagcttggctattcacatgagattcgcaaagcatttcacgaggctggctgctattatccggatgaaaacagtcaggataactactcaaacaaaggttttaccagccgagcacagagattctcaaacggaaaacagtgcgaaacaatggtaaaaactcaactttgatttggctcgtcaaaaaccacacctattgctgaaccaatcaagatgatgtgatcgcaatccatcg

SEQ ID NO: 24323 - DNA, 1863 bp, Heterodera glycines
  unsure (1)..(1863): unsure at all n locations
tttaaataaatatgttattncatttaaatagggttgctgttattctgggtttttgatggtctaagtatancaaaatattattatagttatttaagagttatccacaataatanataatttttanaaattatattcaacaagtagatntaatactaatttttaaaatacactgattatacttaaaaaatattataaattaaatacaattaaatgtataaaaggaaaacattgtagtaaaatcaataaaatttttcataattatacttcctaacgaaaaaagcaatcttataaagaagaaaatttcaaacgcccaaatttaaatttgacgcaattatactaaatttatagtacatagtgcaaggagtcagaaaaacgcgagcctctcttatttttaattaaaataatgaattcaaatttattgtaaagaaaaagatttaattttggaacattaacaaaggaatattaacatttaaattttggagaagaaaggctatcaataatgcaaataggtcccaattttaaatcgattctaataataaataaataaattttgataaatattattttaaagtaggtgcaaaataagatgaaaattaaaggaaagaacatcgaattttactggagatgattaagataaattcataaaattcaagagctttttttaaagtcatggttgtgcagaaataaatttcaattgagtagaaaataattttaaaaagatgacttaaaaaaaaatttaagaacacgattactatgataaaataatcaaaaattaataaatatcttaaaatcaaaaagtaatttgaaatctcgataaaatttaaattaacaataaattatttctttacataaaaagttgttccgttcaatggttatgaagtaggagttgaaaatattttttttctaaaaaaatattccaaaagtttgaataatttcgatgaaaattaaaaattaatacacgaattaagataattaaatgcatttcgttagaaaaaaaaatgcattataaataattatttcaacttaattaatttaaaattaattaaataatacgcaaaaatccctgtaaataaaataattataataaagtaagacagtaactaattaatgcattattttattttattttttggaaaagccattagtagaagtcaacgatctccaaaagcacaaggaaagtacgaaaaaatgtaatgatgaataagaagctatttaattataataaagttttaattgttggtttattttgttattcttttttttgtatagttggtgaatgaaaataaaattttaaaaagtaatctttcagcattaaaatattttccattaagaaaattatttcggataaatggtttgaaattatcatttgctatataatttatttatcaaaaaaattaatgctattatataaaattatttcgcaaaattgctttttgaagtttggatatttaatcttaaggagtttgaatttgaatcttttttatgctaatactacaaacgatgatattttggtgattggttcataaatttttttaataccttcaaatttaaagaaaagaaaaaactaataaggttcaataactatttatattattttttcaattaattaattaattatgaaataaaatagttaattcaaatttaaaaagaatattttttgatttataattgcgaattttcgtttttagttcaatttaaacgcttttggattctttttttttaaattttattacaaagcatcgaattttataggtttttatcaactttatccagcaaatggaacatgactttatttttaaaatttttcccaatcgttatgctctattcacaaagtgagttgcctcagncgcacatttttcctcc

SEQ ID NO: 24324 - DNA, 805 bp, Heterodera glycines
gactcccgcgggattttacgggagttccgctcccgactcccgcttttttcggtgaacgggatttttaacgggagcgggatttttacgggaatcccgttcgggactcccgtcccggaaaatctgaactcccgggattttacccgagtcccgctcccggaaatttttacccaaaaacgggagtaaaaatgcactggtaagaattgatttttttggtaaaaataatgatttttcattgaaaatctgttaaatatatagccaaaatttcaaaaaaatttcccggcggcgcctatcggcaccgccggatccttaaaatccttaattttcttaaaaaacttgctcaatttgcaaaaattggtcatttttgaacagaatctaacaatgtattgtattaaaattttcaatttttttcccggcggcgctttttcaagaaatacaccgcaaaaaattttgtaaaattaataaagggagtcaaaaatataaagttaataaatgttttgttcgaattaattataaaaaataatttatttaagcaatttgaaaaaattttctgatttttgactcaaaaataagatttttttatttcaaatttctcctttataaatttttttatatatttttaatttaataaattgattgtcctttaaatttgtgcattaaaaatatatttgtgagtttttaattaaatttttaaaaatggacgggatttaatgggagcgggatttttacgggaatcccgttcgggactcccgtcccggaaatttttgaactcccgctcccggaaattttttttaccggactctaatat

SEQ ID NO: 24325 - DNA, 1486 bp, Heterodera glycines
agtgatcagaagaggtacaacagtgattagaagaggtacaacagtgattagaagaggtacaacagagattagagaggtttcaacagtgattagaagaggtacacaagagattagaagagtgattagaagaggttcaacagtgattagaagaggtacaacagagattagaagagtgattagaagaggttcaacagtgattagaagaggtacaacagagattagaagaggtacaacagagattagaagagtgattagaagaggttcaacagtgattagaagaggtacaacagtgattagaagaggtacaacagagattagaagaggttcaacagtgattagaagaggtacaacagagattagaagagtgattagaagaggttcaacagtgattagaagaggtacaacagagattagaagagtgattagaagaggttcaacagtgattagaagaggtacaacagagattagaagaggtacaacagagattagaagaggtacaagagtgattagaagaggtacaacagtgattagaaagtgggcattcaaatagagcatttatggtaattaaggaattgtttttaatcaaaatagataaaaaatcgatgtgttatatttttcattttttaaaatataatacactttttattaatgaaaaacaaattatgaaatgtataataattgaatagttatttaaattgaaatgaaaaaaattttacaattaaattttaaaataatagctgaaattctttaattaaatataataaataatttaatgaaaatcattattcatcaaaaaatttaattaaactaaaaaaatttattattaataaaaccaaacatttaaatttattaaaagtaatgaaaattaacccaaaaaatacaaagaaaaataatgtacaccgcccggcttcgaacttcgcccccccccaaaaaaatgatgcctcagaatccccaatcacacagggattctgaggtcttgacgatgtcaaaagtaaaatctgatcacgtattcgtgatcagcgtcataaaatacccctaatgacatgtttttgaaagatttttggtgaaaaaattttttcaatcaaaaatcatgtgctcacccctttggtcccgaatcccaaaatcacttttatttttgtatctttttttaaaaatgtgatagaaatgctaaataaaatttatataatagagcaaaaaattgcggatttttgtagtattttactcttccctaatgacttttcagaaccgagatataaatttttttctgaaaaatagaaaatttccagattttctggaataactttttttcttttagagatagaaatgccaaataaattccataaaattctcctgatttttctctattttagagcttaattcactaaattgaccaaacttcactgagaatgaatttcaattttaaccaaaattccaaggacaaaaaattaaaaaattttcgaatttttaaaaattccaaaaatctgaa

SEQ ID NO: 24326 - DNA, 1661 bp, Heterodera glycines
  unsure (1)..(1661): unsure at all n locations
attttgatcctttaaaaaattcattntaataaacaattctttttgattttcataagaaatgctaaaaaaaatcagttaaaaattatttttaataaacaatttttttgatttttcataagaaattctaagaaaatttcaaaaaactacgagaaataaaacatgttcaaaatttgcaatatattcaaacactttattttctaaaaatatatgtaaagaaattcccaataaaataattttttcaaatttattgtttaccactcactcactctattttgatgattttgctcgaagaatgaaatctgaggattaggattcactaatccaatgaccaactgattaggatcaatctccatacaatttgtgtgatcaaaataatcagtcattgtttgaatagtggtgatttgctgctgatccgaataaacagaaacattcattggccgccaaaaacacactttcttttcccattcaaaattcaaagttggggggttagaagttgaaaaacgtaattcatgtactgtagcggtaccaatcacctgagaatattttaaaattttggattttttttgtgtgaataacataatttaataaaaatagatttttgaatgttttattttaaatgcccattttcaaaaacatccttggaaataaggactcgttctaagaattaaaaaaaattttattttagtgtgtattttttgaaatccattattaactgttatttatccattttaatttgttattctttttatctattgcatttttattagggaaaataaattcaaaacaattgattttctattgaaaataagaaaatttgaaaaacagaattttggcaaaacataaaaaaaaaattttttttttttaatttttccatttttcgtcggatttttaaatattttaggagaaaatttttggatcgcttctaagagtgaattaaaaaattgtaattgatttatttattaaattacttgtccactatcatttctgaactcaacaaatgcattggtatccattctattccaaattgttgactgaacgctcaaacattgttgttgtccatttggcaatggatttgtatattgccaaaactcacaattgccattatagaatacttgaactctgaactggctaccgtatcgaaaacacacagtatttattcccacggtatacacaaattggggaaactgtaccaacagaaaaaggcagcaaaatacgatcagaaaattgtttgtattcatcatatctgtaaacaatttttgaggaatattttatagggttttgaaatcgaatactgttcacttttttgacttagtgaaaaacgcatgaataaaattcattcaagagtttttacatgtaaggaaatcaaaatttcctatcattaaatttataagcaaaaaaatcagaaattcttttttaaaatgactctctctctctgtgataggacaataatatattttattttttattaaatgcctatgaaaaatgaggtttggaaaatataagattacgagccaatttgggcaatcaatttgccaacaaaataaggcaattgagcaggcaaatgccccccccccccttaaatttgcaggaaatgccattctaaagcctacgcttgtttaaaggtataatgccaaaaaatggcatttctgagttttcagttt

SEQ ID NO: 24327 - DNA, 2276 bp, Heterodera glycines
ttatcgaaattttaagagatttttaattgaatttttttctttgcgagactttacatttaaaatttgtaaatgtactaccctcgcagcagcattgttaattttctgtttcccattttaaggaatttgccgacattatgcggctcaccggcgcccaggagggcatcattgtgcgctgcatccaacggctggacgaggtgtgcaaggatgtgcgcaaggcggcacgcattgtgggcgatccggcactgttcgagaagatgggcgagacgagtgccgcaattcgaagaggtgggaggggagaagggggattctttttatttggaatggcatttttagcatgccaaagtcacacaaaaattaataatgcgaaaatacgcagtcgggaaaaaaaatttttggatgcgattttatgtttgggttgtctatctccaatccaggacaggtctaagtttcctatgatttcgatgtcgccgaccacgaaaacagcatctatttcggccaatttcgaaccccggacccgaattcgaacaaaaagtcgaaagtccaaatttgcgaatttcgcatttttggtttaaaaacggctttaatgatcctttattgcagaattgatggtttcagtttgtttccgtgtaattaactctttttttgaaccaaaaatacgaaatttcgaaaacttggggattccgattttttgttcgaattctgttccggagttctgaattggccgaaatatttgccggattcctgatcagcgaccattttttttttgaaaaaggggggaacaaagcacagtatttatacccaaatctaaaaaatcggaacattgtagaaatttttgttgaagtatttttcaaattttattttcgaatattgcattattcaaagctattttaatttatttaaattaaagcaattaaattttcagacattgtgttcgccgcttcgctgtacacaaccgaggaggaatgaacgagctgtttttaatgggccttttttctcaatatcatttttctattcatttttgtttatttttctatcccaaagatttgtttttgtttttttttttgcttataaattattaaatgggaaaatttattggaaattttattgcaagagaaagtgaaacaatatcaaaattttcagtcccaaaaaaactttttaattaattttttgccaatattgctctattttatgaacctgttaacaaaatagagatttccgacatcgactgcttaaaacatttttaaaaaatcgcaaaattcgggctttttgacaatttattatgaaaaatttttcattaaaaaactggctcaaaagcgcaaatttgttgattttttactgttaacaaatcacaattaaattccctaaaaatctcctcgacgaaaaagttttttgaaaaacaaaataaattcgatatgcttatttcgtctccaagaatgttaaaattaaaaacgggagtctgaaaaaataatattttacatttttgattggataaataatacaattgcaaaaaattctgattttttacccaaaaatctgattttttttccgcccgaaattctgatttgcagtttttcgatgacacctcggattataccatccatatcaatgaaaatatttttcattaaccgaaggcttttcggctctagaaataaacacttcgaaaaggctctaataactcgaaaaatagcttaacaaccaccaaaaaagcagccactggaaactcagaaaaaacaggaaaaccctaaaaatatcatccctaataataaggctccaaaattactttacatttgtgaattttttgttttacactcattggcgcatttctttataattcattcattggcactttggttaaagggaaggatcacttacagtgagcagaaagtagaattgtgccgtagaaagtgatcacctagattggcaaatatacctatataattttttgagtagaattttcaccataaaagccgtcccttgacagtgggtgaagtaacagtccccccacatccctaacattaagaaattttatccactcccacccatttcctttaaattctcagcaaatctctcccaatgaaaaagcattttggcaatgccctgttctccgctggcatttcagctgggctagtgacaatgtttatgctgctgataatgccatcatccactgatggcatgaaaattaatgtggaatatggtgacataaagttccgcattgaggtgaagaaaataaacaaagtaaaagagttgaagtggaagattgagtcttatactaagaa

SEQ ID NO: 24328 - DNA, 2671 bp, Heterodera glycines
ttggcccatcggaccggcgccgcttgcggccgcaacaccttccaccatcgccgggtccaactcctcctcgttgtaaatgttgtccgccatctgccaaatctgtgaacgagacaaataaaattacaaaaaatttgttttgttccagacccacctgcattatgttgtcctccgacactgaacagatcacccacggctcgttggggttccacgaaaagtcgctgattttggccgtgtgcccgccatggatgaacaacagttctttaaaaagatccattttagtccgttttgcctccactcacccggtggtccgtcctccgcgtcctctggcgactgttcgtcgccaattttgctcagatcccaaatgtgcagacggcgatcggtgcccgagctggccaaaatggtctcattgtggggcgaccattggaccttggaaaaatgtttttttttgtttaaatttattgaaaaatgcacaaattcacttgaaatatttcatctctgtgcgattcaaatgaatgcagcttcaatttcaaattacgaaggtcccacaacgcaacagtcttaaacagatttgcttaaaaatgctagcagatgcgtccaaactttgtctgccgatccggtggccaaaatgaattccgagtacgggttgaaggagagacaattcacctgggaagtaacaaaaattaatgaataattcagagacaaacaaaaaacatcacacattggcatagaataaagaaaatttggtaccgatcgaaggaccgaatcaaaatgcgtttttgtctatttctcaagatttacaattttaattttttctaagtattttgggagggaaacccatacaaattttcattaacttatctttcaaaaaatttttttttaaaatttagtgagatggggagggggcagtttcatccttataccactggttaagtgcctgatttttagcacacacatttatggactgatttttgctgtcccaatttctagcattttcggctacgagtaagatataatttccttttttccaataaaaaaatgttctttctacccttttttaacatcaatctccccccccccccccggtctccgcttgcctcggccgagtgtgcctccacaacatgggttggctttgtggagctgttcgtgcgcgtgtcccacaccatcagtttgtgatcgtcgccgaccgaaccaaagactgtgtcatgtaaaacgtgccttaatttgaaaattattctcaaaattcagttcgtaattccatgtttactaccatgccacgtccctcacaaccgcagtgtgtgctgtgaaaatggattttgcgtccaaaaagttggcattcgcagtcgccgcttgaatgtcccacaggcacacggtcatgtcgtcggaggcactcaacaaatgaccaggcaaattgttgttccaggataagcctgatttgattaaatttgttattatggatgaaaaagaacgcattaactaaaaaattttagaaaaattaagaaaattgtggtaatttactatttttgaaatgatctatatttattaataataacagaaccgcccaaatttgtttttgcgagcttttactagtgggtgcaacgaacaaatagaatgtcatcacaagacagaaacatggaactgtcctcctcccccccccctttggtttgaatgccaaaaaaccggaccgtatccctccttggtgtggccacgcagtcgcaactgcggcttgcactccacgtcagccggcgtggacggatgctaaatggacaaagtgcattaattatgctgataattgtaccgttaattaatcaacagacagaccttcgtgtagtcaaagacgtacacctccgaggagggtgatttggtgccaatcagaaccggattctgtggcatgtatcgggcccggttcacctcgccctcgtggttcattttgatttccacctcaattttgccggtcactgtgccaaagccaccaaattcgccctggaatatgattggattttagggtaaaattaatatggttgggcactcggtcagtgtcgtagcgagacgcgtcaaactgtgcgtcgtcgttgggcagtaacagtttggcgatgaccaaatgattctaaaattactcatttgcgtgcaattgtcacatcaagccaccacctttacctgctcgtccgacgtgtgcgtgcccaaaatgaggcgatggattgtgtagtcggcgccctcctgtcgttgcacgtcgggcagccattggacggtcaaactgggccattccaacgcatgagtcatcacctgaaaacgacagaataaagcaacaagacgtaccaaaaacaggaaatttgatggcttgttttaaaccccaccatgtcgtaaaggaacgggcagtttttcttccagattttgtactcctcgttgatcagccgctcctcggcgtcctcaccctgttgcggaggttgagagccaggcacagacatttgctgcaattcgttgtttatttctgttcaaattatataacagtgaaaaggctgttacaaattaatctcaaaaaatagttgaatggatttttaaaaccatttgaagctaaattcaaagtgcaagtgatcgccatttgttcacacatacaaaaaatgaatgaaaaataataataatcggcacgctttttgctacacatcattcacaacag

SEQ ID NO: 24329 - DNA, 1643 bp, Heterodera glycines
attatcagagtgccgaaaatcgcatgtgatctaagcctagcaaaaaatggtgtaagtaaaaatcgtaattacgctcaaaaagctcctcaaacaattttagcgcttccaattccttctacaatcgcctttatacatcccattatgagcgctaaaattatcagagtgccgaaaatcgcatgtgatctaagcctagcaaaaaatggtataagtaaaaatcgtaattacgctcaaaaagcttctcaaacaattttagcgcttccaattccttctacaatcgcctttatacatcccattatgagcgctaaaattatcagagtgccgaaaatcgcatgtgatctaagcctagcaaaaaatggtaagtaaaaatcgtaattacgctcaaaaagcttctcaaacaattttagcgcatccaattccttctacaatcgcctttatacatcccattatgaacgctaaaattatcagagtgccgaaaatcgcatgtgatctaagcctagcaaaaaatggtgtaagtaaaaatcgtaattacgctcaaaaagctcctcaaacaattttagcgcttccaattccttctacaatcgcctttatacatcccattatgagcgctaaaattatcagagtgccgaaaatcgcatgtgatctaagcctagcaaaaaatggtataagtaaaaatcgtaattacgctcaaaaagcttctcaaacaattttagcgcttccaattccttctacaatcgcctttatacatcccattatgagcgctaaaattatcagagtgccgaaaatcgcatgtgatctaagcctagcaaaaaatggtttaagtaaaaatcgtaattacgctcaaaaagcttctcaaactgttggagtgttaaagaatttgaatttggcgcgcatcgattattgattaatgttgtgacgtgtcaatccctcccccttattcattttgtttatttaaacactccttccttccccactttgttccttctccattcatttgctattttacattttatattttgtactgcatttctcctccgacataaattgtgtttattattttattgtgtgtccaaagttgagacacaacaattggcgcagtcagcagccgtgcttcacccattcgaagacacaccgaactgcaacccaacctcaacaaaacttggatgaggaatccaaacacctttgtggaataaacacccaccgtggcctcttccaatgccagcgcctcccatttggcgtcaaatctgcgccgtctattttccaacatttgatggaccaaatcgtctcaggcatcccaggcgcatttgcctacctcgatgacggcataatcgcctccaaaacgcttgacgagcacatttcttcgctctacaagcttttcaaacgaattcaggaatttggcctcaaaatccaatgggaaaagtgcaaattcctccagcccgaattgctatttctcggccacgtcatctcagcgaaaggaattcgccccgaccccggacgatcagaagcaattcgccaaatgccgccaccacatgatttgagcacccttcgctcgttcctcggcgcattgaattattatggaaggtttataaagtccatgcgcgaaatccgcgaaccactggaccagcttctgcgaaaggacgtgaaat

SEQ ID NO: 24330 - DNA, 1166 bp, Heterodera glycines
tgttttgaggcgctgataacgaattcggcctccatttcgattaattccgaatccctaacccgaattcgaacatttttcgagaattaatttttaaatttttgatgtttctaagcaaataattaattttttttcaaacagttttggtttttatccaaatctatttattcaaaaataaaaataaccaaaagaaggacatgtgccacttacacttttggcggaaatgaggtgaaatggaaagcagtgataaaagaattgaaattttgaatggagaagcagaaattagaaaagtcagacctccaacaaagggaaaagtggttgtttgttttttagggttgtaggagaaaaaaaaaaaattttttttttttttggaatgtgaagtactggaaaaaatgtatttttttttttgaggaaatgtttggaggtctgacagaactatttattgaaaagacgagggtattgtttttcgagtgattgaatttggtgaacaattttgtcgtttggtggtaatgattttaatgcttcataacatacgaggattgtttgctcaaaaacttccggcggtttggaaatgtcgtcgctggcctccttctggcttggtccattttctttgacgggagtcggaacatttgtctggcgaggttgcattgctggtgccacgggagcagggttttgttgacgtttttggacgcgcgcttcatattcttccttgagttgttctttggtcagcgctgggcggacgaacaggcggttcaggttttgtagagaacggagtcgagcacgctcgcgcttccatcctccgagtgccatgtgttggtgtgtggttgttggcatgaccaccttgagcgggcgtggtgttgttcgctgcgggtcgtaatgtccgagtcgaaagacggcggttggttgggcctcaacttcaagatggtccaggatttttgtggcggcttccctgtcttcctgaacacgttccgatgggcgaatggcattgctttccgggaggccaatgaagaccagggtgcgttgtcgttcttgttccgcgagtgcgacagtgtttgggtccaggtccagtgggggtgccattgaacgttttgcgcgaggcggagtgatgtttgatgcgttggttcgcttcatatcgaaaattagcgagaaataattgttttttgcgatct

SEQ ID NO: 24331 - DNA, 1461 bp, Heterodera glycines
ttaattggacaattacttgtcaacgaccacagtcgccttttggcctcttatggaacagaaaaggggaattatcagatggggtgcgtcccttcctaaaaattactctcgtcttctaccctccctctctttttgtgcactgtttcgtttaaaaaattggttccgaaattttttgactctaagaaattaaattgtaaaaattcaaaacttaaattctcctctgaagttttgaacttggctctatcctgcttttaagtcccaccgtgaggcgggacagttccaaaatttgtaccacattttactgtggaaagtacaagtaccttaattggacaattacttgtcaacgaacacagtcgcctctggcctcttatggaacagaaaagggtgaatatcagatggggtgcgtcccttcctaaaaatttctcttttcgtctaaccatccctccctttttgtgcactatttcattttcaaaattgggaacatttttttgtttgtttttttgaaaataaaatgtaaaaaatttactaaaattatttttgattttaaataatacttatgttccgaaattttttgactcataagaaattaaatctgtacaaattctatgtttaaattctcttaggaagttttgatcttgttcctaccatggctttcagtcccccggttcactattacccaatttttgtagcccaataaatttttttaaattttgcagactaatagagagaaaacattaaggcttggtactttttttgccgaaaaactttacgaatccggcggggcagtacgaatttagctgtttcgttgatttatgtctgctgtttgtcatggcattgtgttgcttttcacatctcataaaatgaattttgtaaaatttgaattttcgactttttgttagggtttccgaaattagtcgaaatgaattttgtaattttcgtgatcaacgaacccgatgattttttaatagtctgtaaacgacataagtacccgatttatcctttttagcccagccgagcagcagcagaaagctgaacatgtgctttcacattcacacaatattttttttgccctccccccccccccctccaatgtgtggtggttgtgggcttttgggtggtgaaaattagcgagcagaaacaaacgcgtgatgattattattttattatgatgatatacatatgatgatgatgattattcacaccaccataaccacaccacatctcccacaaatggcagtcacacaattcctcggcggttttggttcgccaaaacacacacatagcggcgtatattgattttgggagctgcttttgctgctgctggcttcaggaattaaatatttattggagggggaggggatattagattggttggtggagcctttcaaaatgttttgtcactgctgctgcgaaaattcctccaatatacacaccagggatggcacggaattccgatttccgaca

SEQ ID NO: 24332 - DNA, 1798 bp, Heterodera glycines
gtggatgtgtgggcaacgaattcatgggcgaaaaaagtcgtccacaaatgtcagtgtgccgtgccatcattcgcctcagtttcgggtcactccccccccccccccccccaacaaataaagggtccaattgtgcgttggcggacggcaaaaatttggtggaaggcgacttcacggtccaagaagtgcccagaaagtcggcgcgatcgcaactccaaaagtccgaaattgttgcttgtctgcacgaggaagggaacgtccgtttaaaatgcaccggtaaaaaaagcatttcgaaataagaaaagtgccggtaaacgctgcccccccccctcccgaaggatgcgtggcgaccaatggccaagaaatgacagtgagtcgcttcgccaatgtggcaggccaatggacccaatgccgccggttcagagagggctgtcgcatgatcaacgtgaccaacgactgtccgtccgatcactcgccgcccctcggcattctctgatccttttctgttcagacatcgattgccaattggacggcaccgaccacaagcacggggccaccttcgaaagtgcctccaaaaaatcactgttcatttgcagccatggacagatcatcaaacaaggccagcaggacggacccttttgttgcagtactttcccttggccattaaacatttaatcgtgtcattcattctccattaaaccatttaatagcgccattccttttcctttttattgtcgatcatttgccatttaatggctcattatgccttatttaggctgtttcatccaaaatcgtgagctcactttggtcggagatgtgaagtacatcgacggagtgaccccggcactttgcggggacagcgacaatttcactttatttgggggaatcggtcactcatttgcattgtgtgattgactaattttgcagttttttgcttcagttggctgcgatttgccggacggacgcttcaaaaggtttatggatgtgtggagggacggggacacgatgaaaaggtgggccatggcaggacaaagctcaaaagaggcgccgcttggcctttgaggtgttcgtgggcatttaattcggacggaagcattgcacgcgcggacattagcacttacggtcaaaagacaaaatgccaaacatttttaatacaaaaaatgtcaacatttgtttagcttgcctcgacggttccgacgtttttccactgaacaaaataattcaacgggagggcggacaatatatgaaatgtgtgcaaatggacgcaccaatggcggacgatgggagtgccaaaggggcgacaaatggggaaacattggggtggcgcaatttgacggacagcgaactgatcgaaatgagcacaaaaaaggcaagcgaaggacgggagaaaagcgactgatttaaaaatgaaatggcattccaatacggcacagttagcaaaacaaaatttggtggaatatttcggagtcgggcggagggcggcgccgcttttggcacgcggcacaaaaacagtcgacggaaaggaaaaagggaaaggtgggtttttgccaccttccagtttattgaaaacccctccagaaatgcccttccaaagacaacctgcggactgtgccgactttctgcccttttgcccgcgtctctccggctattgccattttatgagcggccctttggagcgcggactcgtgttggatgcgttttcggagttgcgcgagttgcaaaagcgatttgatcagtttgggggcagtgaggacgagctgaatggccgatgggatgcgaaagtaaaagtgatcggaattgt

SEQ ID NO: 24333 - DNA, 1179 bp, Heterodera glycines
  unsure (1)..(1179): unsure at all n locations
ttttaatgctttacaaattaagttaataatttatntaggacactcctcgaatgaaacttttctaaactaatataataaatctaatacaattcataatataaaaagttaatgaaattaatttattaattatttaatagaactaacattataaaactacagatttaatttaaaatattcaaaaaataaatgataaatttaaatgcattttaaaaataaagattattatcgctactttttcaagattaagcttgactgggcggttgaaacgcggaaagcagggcataaaagaaagggcggatttgacccggtagcttgtaaagtttaaagcaatattaaaatttctgttggttttttttatataatagtgaaagtttatttcgccaatttttacttatttctacaaaaagataaaaaaaccaaaatatattcctaatcaattaacaaaagaaacgaaacaaagaaagaagatatcaacatttacttaaatattaaattttcaacagacatttttttttattaagaatgttctttatagttttttgggttttttatttttataattttattcattaattatcaatattaacctcaaaattttgcatttaaaataattaataaaaattattttaaaatatttaaaataattataacataagtatcaagagagtatgagaatataattgtacaaatttccaaaaataccttaagttgtcttaaatcttttaactaaagacattttgtcaaaaatttattaatttttttcaaattcggggtaatttcatggtgaaatttagtttagttttcgggcccaaatggccgggacctggaccgggatttgcaaattatgtaagtactatttttctaatattttattagcaaaaaatgactttttaaatcaaaaatttttcaagaattcgggggattatataattcaaaaccctaacagctatcaattagccttagttttttgttgaaaaaattccatttgatggtttttagtgatattacaattttatttctatccaaacagtttctggaaaaagcagcgccaaatttgacttatcgtgttgcaatactcatccccatcaaacggaagaaaaaacactgttggaggatgagcatttcttggatgaaacatctacggaatcggctaaaacaaacgcgctttacaacatcgag

SEQ ID NO: 24334 - DNA, 1974 bp, Heterodera glycines
  unsure (1)..(1974): unsure at all n locations
caataaaattcattttatagcttttaatatattcttttttgttctatgggtaaaagaaatttaccacgcaagcttaattgcaaaaaggcgttgaaagagcgtgagaacaagcgggaggagagaaaagcgcagacggccaaggcgatgaaagcccggtgggctaagaaaagtgagttttttcagcaatttttatttcaaaaatcatttttttaaatttcagccgctccaccgccgaatcccaatgccgaaacgccacagcaggacgaagcagggccgtcaacatctgctgcaccgacagaagaagcgatggagccgcctccaccaactccagggctagtgccaacgccggacatggacgaggaaattttggaatatggcgttttgctgtcgtcgacaccggccacaccaatcggcgatttggtgccgttcccgtcaacaccaactgcgccaatggacaccggagagatgacaccgccaccactggccatcgacgagcgatcaccgcgcatcgaacagctggaaaagcaactgaaggaccgggatgacaccattcaatttctgcgcgagcaggtccgaaaccgagaagcgctgatcagtgatctgcgtcgtcagctggagcaatgtgcggcaccaccaacggcgacaccaaccaccagcaaaagtgagtgaaatttcgatgccttctcttttcacaattaattttctcaaaaattgatcattcattttttgtcaattttagcaacgccaaacagaggaagaccaaggaaggccatcgacgaactccaacgcagctcgcgaaaacggttgacggagcagattttggacgccattgatcgggaccgatcgagatcggcaagtcggtgttcactggagcgcatccaccgagaagtccggcacaaatacggccattatacaccaaaaaaaacaccagcgaagaagggcaaagatgaaatggaggccaatgacggcttgcttttgatgacccaacttggaacacagaaagcttatcagcggatgaaagcaacccttcgtctgatccacaaaaaattcgacattttaccgccattaaaaaaggtacatttgggttgatcagaaagtgcaatttggtgttttggttggtcaccctcaaacgccggatttgcgcgccattgcgctacgagcaaattgaaaccaatggaggtgttggctttgtgtgtgctgatgtcagatctgcgcttgagtcccgattttgtgcggccaaagacaatttgatcaattttggcaacaatatttttgtgaaaattagcggcgactacggtcaaagcttcaccaaaattactgtctcctttttccaagctgtgcggtcaaattcgccgtcaaacaattttattgttgctgtttttccggccaaagacagcagagaaaatttggagcggtatggagaggcactttgggggcaaattggtcaaattgaggcgttggcggggaaaacagtgaaatggtagagacgacaaagctaaaccacccacatttcaatttaaaggttcattggtggcgacatcagctttatttggtcattgatcggtcactgcggttcagccgttacaacttttccttccccaatttgcacgtgccgagctgatcagatgcttcatgagcaatgctgccaacacaggacaattgatcaaacagtggaactcgcggaacaataccgcgcagcattgcaaaatggcgacaaggcgactgcagcggttcgatcggcatcaatgggcatcacgaaaccgcctcttctccgttcaattaactttgatcggatcatccctgccccttttcacgtctttcaaggcattggaaatgccattgttcgagaacttgagaggcaggagggatgtgcgccgattgtttcacagttcttcagaaggatcgggggcccgagggaacatttcgaaaaangggattgaccgnncactcatagaaaaaattntggtcgcgcta

SEQ ID NO: 24335 - DNA, 1244 bp, Heterodera glycines
aataaaaatgactctaaataaatgcgggattatattcaaaatacatttatacagtaaatttgtttcattttgtattaacaaaataaatattaataataattaatatatttaaattcttaattttccttatttttatcaaaaacataaacttacattatataaatatatataataatcatatccttgtagaaaataaatatttgaagagaaaaagtaaatttcgagttctaaaaaaatactattaaactacaatttctgtaaataattcaaagagaaaaatttcattatatcattagaaaatgaatgctccaaaaaatggttttattttttaaaaacagaaaataatagggaaaatatacgtaagaatttttaatgaattttgttaagaaaatggccaactgatttttgataaaagtcggtttgtccataaaatttttcaaaaaaaaatcaataaaatcccgcagaatctcgcaaaaaatcaaatttgcggatcccgctgtgtgatttgaactcaaaattctttgcgggacgggatcccgcgggattaatcccgcaaaacccacattttccaaaaaatgcgggattgtggactgggatcccgcaaaactaattaattgttatttctattgaaatgaatttaagtttatattatcttttattattagaataaagcatttttcattgcataaattatttggcaaaatttattttccttatttattctagtcagccatgtgtcaaaatttttttttttaataaataattttaaaattaataaacttttgtatatttttaatgcaaaaaagttctgatttagtctaatttgatttagacttttcttaatattttaaacaaatttacttgtttatgcaactattattatttttgtattacgtattaaacatttatttctagggaaggagtagtaattttttatttatttaaattttataaactattagtgagcatgcataattaaagcaattcatctccaaattttggatcttggacatattaaatttgaatatatttacgtgttatgtatgtgatactaagtaatatgtaaacgtgctgagacgatcctaaaatagtatcaatgtgggcgttcctaaaatagtatcaatgataataattaattaaaataattattattcaattaaaattattaaatttaaattatttttaaataatgtcaaattacagtaaagaattttaacattttgttaaattttttgcataaattt

SEQ ID NO: 24336 - DNA, 1453 bp, Heterodera glycines
  unsure (1)..(1453): unsure at all n locations
tggctggcgtgatctccgcccttctgatgtcttcgccacgatcatcgcctgcggcgttgccggcgttntaagcaaattgacaatgtgaaaataatcggacgacctcaaaaattactgaccagcggagatattttttattttctatcatttatataaaatttattaatattattattttttaattctcattatccatccgtccaaataaatgtcattaatttgcgccaatgccggcggaattcctcgcaacgattgtttccatcgcttttgggtccaacagtgcgtttcgcaatgcgttagtctccttgaaattgtggacaacgaattaaataacatgaaactcatccggattatctatgtgtcagcaaaatggaggcctatgaactaattgtcacagaaaatattcccttaaatatgcctctccccagttgagtgtactgctccaactccttgtgcatggagttggagccgtacagccaccaggagtaaattgaaaatgtataatatagtactagtaaaacacaaaaagattattcgaaaaggagccctaagaatgggtttgaaaaacaaattaaaataatgggcaaaaaagtaaaaaaaataccaaaaggacgtccgccatcatttcgtactgcgcccgctggtgggcggcgtccaacgcgcgcagggcgatgtccgcgtgtccgttgagcagtgcgaaattgactccgttgatggactcgacgagaaatggggacaccacacggatgcgagcctttctacagcaattgagaaggggtacataggaccgctccgtagaatttttaaaaatttaagccaaaaatccccaaaaaagcaattaattggaaaggcaaatcaatgatttttcgaaaaaacaactagtaaatccctactaacttgctgaagtcggcgaacacttcgacggacgctctctcgcgcattacgcgatggcgcagatcgctttcctgaaaggagaagccgctgcggcaaatgtacagcagagaacggcacaacgacggacaaatgacctcgggggccatgtgcgaaatgaaatgggtgacctggttgaggagggaaaacaatttgattgacatttaatttttgtcaatttgcaagaacaaccactcgcatcagccgggtgagcaccgtgaagcgattctcggcgatcatcgagtcaattgccgggtaaggacccaagcggacggtgctggcccttttgctcttaaaatgggggcaaacattggatgcaaatactttcaagactggtgataactatcaagatggcatgatttttgtgcccagtacaggaccataaatgaaaagaaccgggaaaagggagtttatttgccaaattttgaaattcttgaaaattcggactcggaaaattagtaaaattttatacaatacatccaagagaaattttgattaaaaaatggtcatgaattctgctcgc

SEQ ID NO: 24337 - DNA, 1721 bp, Heterodera glycines
ttttcttaattgatcaatccaaacagtcttggtatcaatcgaacaattaaagtttaggaaatttagaaatacaagaaaagagcaaatatttgcatgaacaaaaaaattgcagagaaaacccgaaatcaatcatttttcgagtatatttacgaataattttttgtctgttgtctttatcccagaattttgatatacaaaaacttttgtagtcttcaggctttcgattgataccaagaatgttaggattgatcaattacgaaaaaagttatgacttcttaaagttgtctcagactcagttggccggtcccgaaaaataaagcgtaattaaagctttttaaaaaaggtcgttaaaacatgaaagcatctttttgcatctaaacaccgttataaattcataaaggacttcttcacgttcaacatttacatataacaacacttttccgtgtcgttttgtcgttcacaacaatttacctcataagaaatagaacgccaaaaactgagtatataagcaagcaacttttctcctattttcattttcctcctgccatttcatctctttttcccctgcgtttttaacttccgtaccatgcttcagatgcacacttaatttgtattatatgttttagtttttgtaaacattaacgataatacgcaattattttggctgtatccgaaattctaaaacgtaaaacgtgaatctaaagcagagtttttgccttacaattaagtagtgtgcatctgttatgtccattttcgttaactcatttcattgctccgattccattaaactttaattcattttaattaaacttttaaacttttcaaaaataaaatatagataaactttatcattgttgaacatcggccatcggctaccccacccccagtccgtggacctcccgtggactcatcgatggatcgaccgacgtccggcccgcccttttcaacatttgccataacctttttcttacttgttaatgccacattcctggtatcaaatgaaagcctgattaacaatacaagaaaagaacaaaactgacattaaaagaaaaaaacttcaagctttcagttggtaccaagaatgtagtcattaacaaagtaagaaaaaagttataaccaaagaaactgaagatgtgatcactcctattttacctgttttcaatctttcgtcatcatttttccttcattctgatggaccccaaatttttttcgccacaaaaacggcgatatgtcagaaaaagtgatctgggtttggaaaaggtgtccagggttttagagttttggacatggtcaaccctggttttaggcaatcatggagtttactggttccattttttttgtttttaaaatattagaaacagtgtttgtatggctattttaaggtgctgagcacgaatacggccttatttttgaccaattctgaaccccgaacccggattcgaacatttggtaatagtgtacatggtagcccccccttttaaaaaaagaaaattaaaaatttttttcataaataaagttgtttataggttttcagggtcggaaaacccgattctgacttctaattcgataaaattcgaacccctgacccggattcgaacaaaaattctaaaattctattttcgaaaaaattccaaacatgaaaaataatgcaatgaaataaaacggaaaatctattcataaggaaagatataaatattccgagtatttgaactgtttttttt

SEQ ID NO: 24338 - DNA, 1820 bp, Heterodera glycines
ttttaattagggttcagccccgacatgtttcggggaattacgaaagtcgtaaattgtacttgaaataagatggaattatctttaaatgagtttttaagacttttttattctggactttttctttttgtgtttttttaggctttttatgaaaatttactccccgacgaaggtgttgttccccgacaatttgctccccgagggtcggggctgaaccctatttttaatcaccgatttggtttgttcaatttttgacgtcaaggtccacttcggcataccatgtgggtggaacgagaacagcaattagtgcacagcttggccatccgatgtattggcattgtcattggacggaagttcgacaaaagcaccgccggtacaacggaaaaggcggacacttcgagaacggaaagagcaaattggcgcataggcgaaaagcgaaggtggtcaaaaatggcaacggatcactgagcataggcaaatgtcgtgcaaataaaacccaaaattcgattagaaaatgcaaattaaaggatcaaaagtaaaaaaagaagttaaaatggcaaagtccaatatttcagtcatcaaatcaattaggtaattcattcatttctgttgctgaccatcggatcgggagaagcattgagatgatgaaaacaatattataagtattgtaattgtgatcaaattctcacccatcgtccaaacagatcagcagctgaaaacatttgaatggcattatgacagtttcaaatattccccagtcaattcaatgatcagatcaaatggcaaaacgagtcaatcgatcggagagtacggcggaaaacaaactgaaaagagaaaccaaaagttccactgataaatttaagcattaaaaattttcggcacattatccggacgaggcatatccaaccatttgacaatccgacacattggcattcatcaggctgaaattcggggaaagtgctcattgtgaagagagtaatttggaaagatggacaatcgttgagagtggacggggccaattggcgcataaatgcatcgagattgtgaaagttgccaaattcagttgaagaatggagcgcgaagcattgaccgaatgttgagcacaacgaattcccggaaatttgccatttccttgatgccatacaaccactttttccattaaaaataagacggaagggggaggggtggaaaagagttgaagacgaaaatttcgagagaatgaatggaagaggaggaaaaagtaatgttttatagaaaaaaaaatcataatttaatttttaccatttcattccaaatgatctttgtggttagttaaagcaccactttccattaaaaaattatttagctgctaaaaacgcctctgaggcgcgcaaaacttaaaaagaattagccttcgaattttttctttgttggtaattgtatataagttttttttctttaaagctttaacaataaaatgttagcattttatctgtacataatatgttaatgaaaaatgcacaaaacatttcacaaagtcgattgcaattttgtggcttttagggcattagagctacttcagtcctggtcctgattccataatttttccacaaacttcgagtagtgcattccagaccgagaaacgtcgaatatatatatatatatatatataactttattataggtgtttggttaattttaaaaattggaaatttatgccaaaaatggtcagaaaatataaaattctcccttccgtaattttaagcgctgaacacgaatgagtttaatttttatttatttattgaaaaattaaaaaattaatatttcatacactgacgttgact

SEQ ID NO: 24339 - DNA, 1522 bp, Heterodera glycines
atttcttcccggcattttcgtcccggtcccggtagggctaccgggacccggaaaaacaagcactggtaagaacgggggtctgatgagtgaaaattagaagctttttctaagatattgcttcacgattagacaattaccaaaaaagttttaccgaaaattgcaaaaagttcaaaaaagttgaaattttttcttaaaattttttatatgcaagtaatttttttttgcaatgctaatagaacagttaagagcttccgaatgataccaagattgttggctttggatgacaaattaaaaagttatagcggaaaaacatagggcgggtcgggaccggggcgggaattcccgctcctccgaggtcccgggttttgaaaatctcaggtcccggtcccggtagggcaaccgggaaccggaaaaacaagcactggtaagaatgggggggggggggggggtctgagtgaaaaattagtgatgaaaattggagtcaaaggaaaaaatttaaaaaaaaaaatattctttaaaagtaacattgccaattgtgcaaatggcctactgtttttttaattaacacatttttatcattttttgaagaaaattcgaacaaattgagcatagtaatcccaaaaactacccttttttgttgaaaatctgttaataaattaccctcaaattttcaaaatttcctccggcggcgcctatcggcaccgccggaccccttctttcccaaaaattttttttagaaaaagcgcgccgaaaaaaatgatgtgaaaagcaaatctggatttttaataatattcgatcatttaagtcaaaaagtgattaattgtttgaaataattgaagtaaattcgatttgaaaatttttattaatttagctttaacttttggttttattaaaaaaaacaaaattaaaatttaattttgtattattttcaattgaaataaaataaaattaaattttttttaattttttgaatttttaaaatttcccggttggtccccccggttcccggtcccgaagaaaaatcgaggtcccggtcccggctttgcctaaaattcccggtcccgcttcactctactaataatgatcaatatggattttgttttttataatttacctataattagatatattttttaaatcgttccaattcaaacatcccaaaaatcactgagagatatttaagtaaatccccaaaattgaatgttcagaggatatcgaaacaaactttctcgctctctcctcttcttaaatcattccggatttaaaaaaaaaatctttattaaataaacaattcatttacaacgcctagagaaatacgggcgttacttgcaaatttggctcctttgaattttatttaaatcgttgtcagcaactcagaaaattatcgaaaaaagaatttggtactttcccgtttttggtcgcacacaccaaacaaagtgtataaaaaggcgcacaaattcacacaactcactcatattctctagctaatccatttgactcattttgttcaacaattgttgca

SEQ ID NO: 24340 - DNA, 957 bp, Heterodera glycines
ttgagtaccccaaacggacacttgaaaaaatcgatttttttgttttcggggcagtccccccgaaccgatgcgcccagatttatggggagaccgaatccttccggaatagcttcactatagcctgtactttaattctgcgttggatttttgctccccataattgtttgagtaccccaaacggacacttgaaaaaatcgatttatttttgttttcggggcagtccccccgaaccgatgcgcccagatttatggggagaccgaatccttcgggaatagcttccctatagcctgtactttaattctgcgttggatttttgctccccataattgtttgagtaccccaaacggacacttgaaaaaatcgatttttttgttttcggggcagtccccccgaaccgatgcgcccagatttatggggagaccgaatccttcgggaatagcttccctatagcctgtactttaattctgcgttggatttttgctccccataattgtttgagtaccccaaacggacacttgaaaaaatcgatttttttgttttcggggcagtccccccgagccgatgcgcccagatttatggggagaccgaatccttccggaatagcttccctatagcctgtactttaattctgcgttggatttttgctccccataattgtttgagtaccccaaacggacacttgaaaaaatcgattttttttgttttcggggcagtccccccgaaccgatgcgcccagatttatggggagaccgaatccttccggagtagcttccctatagcctgtactttaattctgcgttggatttttgctccccataattgtttgagtaccccaaacggacacttgaaaaaatcgatttttttgttttcggggcagtccccccgaaccgatgcgcccagaatttatggggaaaacgaatccttcgggatacctttcccatagtctggaatttaatt

SEQ ID NO: 24341 - DNA, 1412 bp, Heterodera glycines
tttcagagcagtttctgtaaaatacttatgaattaattttgtaaaaaaataaataaataatgaaccctcctccttaataattttcctgcgcccaaggtactcactcggccgcttcgcggcctcgtgggggaactaaagatttttataaagttattcttctccctgtttgatataataagcaacaaagtgcctaaactagcatgtaaatgaaatttggtgggaatcagagcattttctgagggaaatatgaatgaattaattatgcaaaaataaataaaaatttcgaaaaatttgatcgtccataaataatttgtaattgatcaggggctcaccaaattttgcagggatacgtatctggaacactacaaatgcttactaattttcctagattttttaaacccggtgaaaattttttgcagacaccaccacttttgcacttaaaaaaatttcaaaaaactttaaaaattcatagaaaatttaaattcataggtactactgctaaatcaacgcagagacgcctttccttgacctttttaggcccctgcaaaatctggttcgcttctgatcactactcgaaaaatgagtgattgaattttcactaaaaagttaagcctaaactttttggcctgtttaaaaaggaattaaaaatttttaaaaattttattcatctccctttttgatagaaaaagcataagagtgcctaaactaacatgtaaataaaatttggtgcgtttcagaaccctttctgaaaaaaatatttatgaattaattatgcaaaaaataaataaataatgaactctcttccttaataattttcctgcaccgaaggtactcactcggccgcttcgcgggctctcgtgctgatatattcttatatttcaacgaacacaaaaaatatttcgtctaattttttaaagtccaagtatatatatatatatcaggggtgggacaactctcgcctctcgtctctcgcctctcgccaactctcgccatttttggtactctcgcctctcgtctctcgcctctcgttttttgggacgagaggcgagagttgaaaatacacccctaaagattgaacttttgagcagccagaaaaattttcaaatttacgcgaaaaaaaaatcttaaatctctttctttccttccttaatgttttctctatttttggatagctccaattcaaatatggtctgctggctaaaccttctgcctttcattatttttctcttgggttcaattccccaacggtacagaatttttttaataatttctttaaattattttcaattgaaattttaattaataaaaaatatttcaatttaaaaattattattttttctttttttaaacagcctaaaactgcaaatttaaagaaaactttgatcattttttgacaagttctgttaatatat

SEQ ID NO: 24342 - DNA, 1081 bp, Heterodera glycines
tctgcagcccttccagtataggtagaggcctggaattttttttgaaaattagaaaacacttcaacttaaaatcctaccagcaagaattttccgctccctgtcctttaaaaaaagttacgggccttcaaacgcaagcaaaagtgagaaattagccgccgggactcagttggccaccggagcaaaaaacctatagttttcccagatgcgcctcaaaaagttgtaagacccttccactactttcagggcgctcccggccttcggccgggagccttaatttttttaatgagtccccctttttctctatatatatataaactagggtagccagttggctttaaagtagaaaaaatacttctggaaccacaatataatcggtattgacataagcgcttcgcgcaaaggacttcgttgctagttcttgcgcggacatgaggccagtttattaaccgtcattagcggttggacaattatttctcctaaatataaattgtccaacccccagggtccaccacgcggaggagcacggtggaaaactggcaaaaaccatggaccccactcgccgggggtgtgttattttttactgtaatttgttaatttatttttaatttttagtgcccccggcgaggagctaagctctgaagatttggcggcacttcccgcgttaccagggctcctcgcattttaagggtggcggcacttcctgcattaccggggctcctcgcactttaagggtggcggtacctcccgcgttaccggggctcctcgcactttaagggtggcggtacctcccgcgttaccggggctcctcgcactttaagggtggcggtacctcccgcattaccggggctcctcgcactttaaagggtggcggtacctcccgcattaccggggctcctcgcactttaagggtggcggtacctcccgcattaccggggctcctcgcactttaagggtggcggtacctcccgcattaccggggatcctcgcactttaagggtggcgttacctcccgcattaccggggctcctcgcacttttaggggggcggtacctcccgcgttaccggggctcctcgcacttta

SEQ ID NO: 24343 - DNA, 1900 bp, Heterodera glycines
ggctcggcatagggattgactttcgctggtgcccgtgatgatgttgtttggcctcatctattcaacaatcatcgtcacttccattcttggcaatttgcttgtgattatcagcgtgttccgttaccgatcactgcaatcagtgcgaaatatgtaagaattttaaaatttaattattttttaaaattattttttttcaattttaggtttatcgtgtctttgtctgtgtcggacattgttgtttccatagtgtccggcacaattactgtaagttgactaaaaattcatttatgtataaaatatgcaaaatatataagtaattaataaaataattaaaaaaataatatgatagcatctttaagccaattaatgccttctcaaaaatttggttgtttggcgaattgttatgcaaattagtgcccgtcattcaggtatttttttttttcttaaaagtataaattgctcatctcaaattagaatatgattttatttatgagatgcaaagaaattaaaaattattcataattatttatagaaaatcatttgaaaaaaaaacaaataaaaataggggtttttggaaaaaatattaatattcataaatttctttttttgagaaaaaattcatcccacaaataaaatttatttatatgtccaattttttttcttaatttaaaaattaattccaaataaactcttaagaatttaaatattttaaaagttaagccaaataaattcaacggcatgaattttaatgaatttaaattattttaaatttaatccaaattttagggtgtaagcctttgcttctccacgctgactctaagcgcaatctcaattgaccgttttcggcttattgtgacgccacttcgacaatcaattcagaagcgttgtgcatgccgtattgtggcacttaacactgccatttcactgatcatatcgtatgataattaaaaaaaaagtacggtatttttaattaatttattttttcttagacttccgatgctgttcacacaaaaattggacacctatcatcgtttttgtggccaattttgcagcgaatattggggcagcgaactcggcgcaatggcccgaagtgcatacggtaatatattcggcggatttttgtacttaccgtaactcagcagacaaaacattaaaatttttactattaattttcaaatgacgctaaaataaatggaaaattaagcatttgttttttgcatagaaataagacttatgataattatggaacccttgaatactgtaagaaaataccgtataacttttaaaccttttatcgtatttttgacataaatttcccaaatagcgaaatctaaataaaattatattcaaaattattgaaattaattcttaaggaacgtttgtgttttttgctcaatttgtgatcccgtttctgatcatttccacttgctacgtgatgatttcaattaaaataaacacggtaattttttttaataaattaattattttataattttaaatttataaataaattatttccataattaagggtgttctgacaaagcgcacatcaaccgacataacaaaattcaatgacatgagcacaagcggcagcaaaatgacaaatttaagtgaaatgaggtggtaaagaaaattattgcatcaaaaatattataaaaaaataaaaaaaatttttgttttaattaggcatttgaaatttattttttaaaaaaaaatcaattttaattaaaaaacaattaagaaccggtgcacggctttcatcagttggcaatgaggaatgcacaatgctgttgactattaatggcacaaatagtgccaatgacgcactacaaatagccatggagcagaagaaagccatactgaacagacggcttaggaccaaccgaatgctaataggtag

SEQ ID NO: 24344 - DNA, 1768 bp, Heterodera glycines
ttgataaggtaaaaagaatttaaataaaatggcaccgctcagattcggcaccaaatcttttaagccgagtatgcaaatgccgtgccgttgaataccactttggcacaattcactgacgagtctttgccaaagagtcattctccaatagggaatagaagattattaaattgaaaaatgtaattatttcttccaattaatcacctcgtgaatccaggggccaatgccttgtcaaaacatttcccagtaaaccctcccggcgctcccataaattcatttgcggccaaagtttgaataaaatattcatcacttgcgtaatcaaaactaaatgccgcagatatttataaaaatatttttttaaatttttacaaatttaatttgtcgagcataatcgaaacttccaaatcattcaaaagccattcgacaaattctcttgacaaactcatctcaaattgacctttgttctttttcagctttttgttggctttgtttttcgtctctaaagaaaataaatacaattaaattataaaaaacaaaacaattaaatattttaatgcggtgactcaccatttttgaacagtttcaaagtgctcaatgaccattcgtccccctcctcaaaacgaatgtgtgttgaaccaatgcgcgtgtactgaatgtcactgacgccgttcatccatttgaatatttggaccatttcgtcgtttgtcttcatttgtacgtcatcattctgagggggagggaatggcaaaagccaattttaaattgtaaaaataaaaaacgaataaaaagcggagtttgcgcctgtaaaaggatggcatatttccatttttccatttctttggccaccaaaagtttcatacattccatcgacgatttcatctcaaatggatgaatccatgagaacatcagcagcaaatgcgagcagtacaaatggacgaaactcacaagattatgccctttgctgtccatggcatattccttttcacttggaacgacaaaaacatttgggaaacaaattgccaatgcgtgaatttgccgatggaatgtttccgacgactttttgtcgatggcatagcaatagtaattttggggcgcatagcttgaagcgaattccatttcaatgaacaaatagtcctaaaggagagcaaacactgagaatataaaaaaatattctaacttcttaagtccaaatgccgatcgaataacttttttactaagagggaggggagaaacgggaatagtgcggggggggactaatagtttagcggagaactgatctgggaaagaaagccggtccgaatggaggggggggggcaaatgccaatgccgttgtgtctgttctgtccgtcggtccgttcaccttgtacactaatcggatgaatgccaatggaaagtccgtcttattccctttctcgtttttgtacttttgctccgcgaagtcaaagtaagggtaacgggaacggatggtcgcgcagtcgatcgccaaggtacttcccgcgttagcaaaggtcagcggctcggactgagtgcgctcctcaatgtaagcgctgtcattggccaacacgcggccacaatcgatgtccgacagtttgagccacttggattggccacgatcggggggctaatagacaaaaaaaccattatgccatcaaatcttccgactaatcaccactccccaaatttgcgtcattcgcaaacttcggtccgttttgctcaaatccaacggcgtttcaaaaatatattccaacgcgcggttttcgtagtcctccgt

SEQ ID NO: 24345 - DNA, 1925 bp, Heterodera glycines
tccttcaatcgactttcgtgaatttttcgccaccattcaagatactgaacagctcctcggggcgtgggagagggtattggtgtacatccaaccaaggatttaccgtgactttatagtcaaagcacaaccgcagcttgccatttgcctttggtaccatgaccagcgaagtggcccattcactggttgccactggctctatgattttctccgcctgccattggtccaaaactttttcaacttcattccgaagtgaaaatggcaccagtcttggcttgcatcgcttcggttggcatccctccttgaatttcaatgacgcaatctttttgcatcgtccgactccgtcctggaaaacctccggatattgggccaaacatgcttccaattcctttttgttttcaacggcacgaattgtcggaattccgaaagctcggttcagatcgattttcagtcccatgatcaaattgcggccgcacaaatttttgtgcttaccacttatgacatgaatattggactcaatccgctgtcatactcaaactccaactttccattgtgaatgttgagttgaatgaaaccaggatcggcagaaattcccttgatttcgtgaatgacgttgacatttgaacattcaatgttcttgatttgtcgtccgttggtctttgacatttgcaaaatgtcccggttttccgcaccaaaagcaacttctcgtgcttttcgtcggcgttcttggtcctctttgctgattgccaactttcgcgacctccggcattgcatttgagccaattgcttgggcatccaaattggactgctccaacaaaacggctgattcgactgcgtccttgaattttaggtccttgtcgccctttttgattaattcaacccgaattgcatcatttgagatgtcattgatgaacaactcggatcaaattcaagatgctgctgatcaactgtaatccgacttggatttacagtgatgtcaattgttatccgaaccggattaacaatgaaaattggtgctggtcaactgttattcaactcgaattaacagtgccactcagctttcagccttgtctaccaatcaaatttatcctcttgctctgttcggcctcgatcaaaattacaattgttatccgtctcggattaacaattcaattcctccaaattcggcgattcgtcgctggctgttatccgtcccggattaacaccagtaattgagaatgccaccacctgggtgaacagctattcaaactcggaattagcttactctccttcgacgatttttggaaaattgctattccgtcccggaattagtaatccaaatttggtgcttttttagcccgttcgccgctcagcttctcttcagtttgcctttgctctgccggctgcgccaaaatctgttgtgtccgagaacaacagatatgaataaaacaaatatttatttgaagcacaaatataataataaaatggtcaaggcgaagggaattgcaatgggaggaataaatgacagaatgaacgagggagggaaggaaagcatcgcttatatgtggggaggaacagtgcctaagggaaaggagtgaacaaagttcactccacttattgattggtctctcaacaccacaaaaaggtattgcaaatcttgcaggatccctcacaaaaataatacaattcaagtttttgaaaaacaaattttttatctggaaaaacatttaattaattttttttatttttttcgggatgggatttagggaaaacggtggagatgggtcaaatggacacccttttttcgtgtctttcgaaagctaaaggaataaaataaattctaagttttttagggaatttaccaacctattcgaacccgaaatgatgccaaatgagtcgaacttttagtaagaacttcgattgctccatgccaatgccaattcgactga

SEQ ID NO: 24346 - DNA, 1043 bp, Heterodera glycines
ctcgtttttcctcttaagcttttttctttgacttccaaatccaacaatcttggtatcattcgaaagctcttaacatgctctattagccttatcaaaaacgaaaagtttttcaagcctgtaaaaattttattaagaaaaaacttcaaaaattttgacttttcgcaattttcatgcataactgttttgataattgtctaatcgcaaagcaatagcttagaaaaagcttctaaatagattaagctttcgaacgacaccaacaatgttgaatttggtttacaaagaaaaaagttatagccaaaaagatgctggcgccgaaacgggagcgccgaaacgcagtggacccttaattacatcaacataacattatgccatcaacgtaatatcaacgctatttttaaaattggtatcattttttgaaaattaaaacaatttttaaaaaatgacttttggcggaaaaaatggggagagagataacgcaaaagtgagagggtgttaaattcagccccagccatacaaaaatattctagctgcagaacaaagacaccagcaataatttcgggttttttctttaaaaatgtcaaattttcttgacttatttaggtattcttgcaccgttttctgttcgtgattttctttccgagttgtcagaccatcctttctctgttgctggatatcatgagtcattttaaagtgaaaatcaaggaccgaatggagaaacaattttttggaattattactggtcaattgttgcgccgtctcccagaacaaaaagaacacatgttgaaaaatgctttcacggtagattgagcagaaatctttttaaatatacaaattttcagtcattctacaaaacaactttggattatgtcgccaaatggtttcgcaccgaacgttatccggatcatattcaatggcttttgcttacagatcggcaattagtccatgagaatctcattgaattggcatcgactttttgtcctgatttgtccgatactttattcgatgaaattagtcaagtcaaccacattttgaacaacaccgat

SEQ ID NO: 24347 - DNA, 1389 bp, Heterodera glycines
tcatcatcttttatacttaaaatgccaatttcaaatgaaaaacagagaaaggaaaccaaaggcatgccaaatgttcaactctttgtttctcaattattaacctaaaacgctttaatactctttttttgggctcatccttgtgctaagtttggttactttttctgccttttgtctcccaatttctctctttttctctttcattcgcttttttgcgcccaaatatttgcggggggggggaaatgaaaggcgcagccgacgaaactttgtgttggccaacagcagcagcaaatcgtaccgatttttgtgctccttttatcccatcctttcccaaaccgagtaaaagtgaaagttggccgaggaagggataaaatgaataaaaagcggagaattagaaaagaaagattcataggggggaaagggggaaaaaggggggagggaagggtgatcgatcggtgatcatccaattgagttggagggcgctgaaatttgaatttggtggaacgtttacagccaaaggaatgcttcgtgccttttcccttttccattcattgccatttttcattcggttcattaaggaaaaacaaatttcattcttcccacaatttgtcatcactttgagcagaaaagacggggatttttaatgacttaagcatttcattaattagacaaatacaataaaatgtattttggaaaacgaaaaaaagacctacatacattaaaaaaatatatatatatatataataaataatcatttttaggacctttccgatgtctcgggtttgcctcgtgcacaaaaacgaatcctttggattggaaatgagcaaatttcggccgggcattctttgccggtttccaaaagtctgaaaaaactgtttaaaaattatatttaattaaaaataatttatatattttttaatttatttttacagtcacctaacaatgcctgttgggccatgaggaatgactaaggtgaccgaaaccgcatcatgtgccttttcggcattcattgcagcaacaatgccaagcatttcacctgtgagttaaatggggtgaacagaggaggggggacatatttttctaattgattattttggggatattttggcatctctgaatcagtgacggtttcagtacgggatatcggcttggagaggcttaggagtacccgaatatgaccattttttttcttttgctcttcagaacgccaaattttcctctctatttttaaacttttttggggagtgaggtcagtgcattttgtacctcatcgcccatttttgaatttttcacaaatctggaaatcaggtttccgacagtttacgggatcactgaacatgaagttaacatcacacatttcgaccaattccggaccccgaaaagaatcaaaag

SEQ ID NO: 24348 - DNA, 1964 bp, Heterodera glycines
tttggctcgaatggcacttgtgctgcatggatctttgctgagggagagcgcgctttcctttaggatttggtatttgcggcactcttctcctagctcttgcagtgaggttaaccgtccgctcgttcgaatgtcttccaaacgctgaaggcatttttgcctcagatcggtgaattcgtcgtgcaatgcaatgatgagaatcatgcatttaagctcctctttgctcagcgaaagatctgcgttttcgcaggacgagttgatttgtgcaatcaaacttggaacgtcctgttgcgcttcttgacgaatttggaagcaatcaaaacgacggagaaacaatgatcgggtttctccaaaaaattgtttcaattttgcggtcgtctcatcccaattgaagtcgttctgcgtctttggtgcgatgctgtcgcagtaccgcttgtactccgcttcgcccaattttccaatcaatagttggacttttgactggtcgctgagtgcttgtccatcctgggcgatggtctgcccatagcgcttgagccaaacgtcgtatgtatgccctaactcagggtcatactcaaatgtcgaaaggcgcgcatcgattgatgtcgccaatgccgcagaattgttgacttgtccaaccgatgccttcaaaacagcctccaaaatcagtttaagctgattggggtccatcaaatttgtttagccaaccggcttttgaagaacttgtcgagccgacccggcttttgttgaattttgatgagccgacccggctttagaagaataagcagttcttttgcctgttttttttgacgaaattgacgagccaacccggcttttgtcgaatttttgctgagccgacccggcttttgacgaattttgatgagccgactcggctttaaacgctagcagtttcttttactgctttttgaaaaatggccgactcggctttaacaaaactcagagccaatcccggctttttgatgagttgttttgccgtatcggcttttggtccttaaacaaaatttgatgcctttttctcacccgaagatgtagagcaggtcctttgtttctgactgcgccaaattgttgtgtatttgctacaacaataaaaatgtttggtttttaaccaaagcaaatgttgtccaataaataaataaataatttattaaacaaataaatattgaggacagcagggaataaataaataaaataatgaaatggtggaatgaatgggagaatgccctgagtgagggaaaaggagacatatttatggggctggtcaaggggcggggcgagagacaataagagagggagtgaaagggaaaatataatcaatagggttgttcccttatccaacaggtcggtacttttagtgacggaaaatctcgaaatagttaactaaaatagtgagtaaaaatcccaaaaatagtgccaaaaagtccgaaatagtgacgaatagtgacataattttcagccaaaaataatttttattcactgattgcagttgcaaatgagtaggactggaatttttaagatcaaaaaacccaaaatagttacctaaaaaaattttttaaattaaaaatttttgccaagaaagtaaatttttgagaaaaattttttttcatttcataggagtatattttgaaaaattttagcttgattcttaggggtgtatttttttgaaaattttttagaccgattcttaggggtatattttttggttttattgcatttttgttaaggaattttccaaaaaatgtcgaaatagtgaaaaaaatagtgacaaaacgccaaaataatgatttttaactattttagtgacaaaaccccaaaatagtgatttctagtgactgataatgacatcagaatcgaaaaattttaatgcagaaatgcgttttttgagctcctttcttcaaatcaattgagcaaaaaatttagttaaaacctaaaattcccatccctactgatca

SEQ ID NO: 24349 - DNA, 2420 bp, Heterodera glycines
  unsure (1)..(2420): unsure at all n locations
tattaattcattactaatntgagaataattagtaattgaaaattaaaaaataattagtaattgaaaatttaaaatattttaacttaaaattttttaaacatttaattaaaataaaaacttattacttaaaaactttcaaatttatttttaaaaacttttagtagcaattagcaacggcactaatggaatcactgcaacgccgcggggatcacgcgacgaaagtgcgacaacaaaacgcagacgaatagccgccagggatgactccgcggcacggaaagaggaacaactgcagcaacaatcacaacagcatacggtagcaacaagcgcagcgattgttacggctggtggcgacgctggcggcacggcgactacggtagcggcgttgcagcagcagacgaccattgtgtacggtagtgccatggaggccaagacgtcgctgaacgccacgcaacaacagcagcagcatacacagcaaaagccacaacaacaacaacaaatggtggtggacggtaagtcaagtttgcttactgtatcccagccgagactcttgagcattatttactattaaaagaactactgtttttgtatttttcggaataccgcagggttaaaaattgtatattacagtatgcctcgaacaaaaactattcaaaagcatttactgtacttgtagggctaccgtacaagcgaaagtactttaaattatctgtacagtgcgacagtatacctagacagacgtctcacaattagcattatttttcggggttacagtatacgaccataaaccaagttttgctcgtgttcagatctgcccactttgcgccgtgagctggaacgaccgccggcgattgtaaatgccgccgcagccgcaatggccgtcgccggcacggcgtcagtgccgtcctcctcctcctcgtcgtcgtcgtcgccatgcgttggccaagcagcgactgtgccatccacggcgaccacggcacaacagcagcacaatcatcaccaacaatcgctgccactgtcatcgctgcactcgcagcagcaacaacagcagcgagtgtcgtcctcgtcgacgtcgtcgctgtcgtcgctccgtgaactgctcgcccggccgcccattctgcacgtggtggtacaacagcaacaccaccaccaacaaacgcatgttgcctcaactggtgcagcagatgttgctgcttttgttgaagaacaaccgctgaatttgtgcgtgcgtgaccaatgaatgatgtggcaccgtaatgccaagaaaaaaaatgggtcacgccaaatttaaaaatgcctaacaaagtgccacaaattggcgatgactacaatgtgtcgattatggtagcaattggccccttcaaattgtggaatttgttttgtttatttaaattgtattgttttttggcatttcgtttgtttttttgtgtcttttcgaccttttcttttaatatttaggtgcattttttgtatatattatattaatattattatatttaacatatacataaatagcatatgttgtgatttattttttatttctatctttgtttactaaaaaagacaaataaaatttgaattggaattggagctggtggtgatcataacaaaatcatagaaaatgccgaaatttccctgtaaattcaattaaaaatttatccaaaaataccaaaaaagcgtaaaaatccaaaatagaaaaaaaaatatattgaaaaaatttcaaaagatacattttgtatggcaaaataacatcaaaatttgaaaacaaaaatgccaaaattatccttttagtaaatatttttaatgcaaatcaattgcattaaaaaatgtttttaatctaaagaaattgaaaaaaacattttatgaaaatgccaaaaaataaatttgatcaaactcggacccaatcggcagagtttaacaaattcattcatccacaaagtcggacggacaaagcccgcaaaaattctttgctgacaaccgaaaacaactgttcattgtttgccttaaaaaaggcacggaagttgtcgatattcaaattcaaaaaataattctaaaagtgggaatttaattaaaatttattttttaaatttaaagcttaagtggaaaaaagagctggcgccgaaacgggagcgccgaaacgcgtgggtccccaataataattaccccttctgaaaataaataattttaaccaaaaagaggaaaaacaaaacaattctctcataaaaaataggaaatgccaaaatcaatttgatcaaagccggaaccaatcagcagaatttaacaaattcatccacaaagtcggacggacaaaacacacaaaaattctttactgatcttaggaaaaaactgttcattgttcgcaacgaaaaaggcacggaattcgtcaacatcaaaatgcaaaaaataattctannagtggaaaa

SEQ ID NO: 24350 - DNA, 1458 bp, Heterodera glycines
agaggttcaatagtgatcagaagaggtacaactgtgataaaaagggtacaaaagtgatttgaagaggtacatcagtgattagtaaaggtacaacagtgatcagaagaggtacaactgtgataaaaagggtacaaaagtgatttgaagaggtacatcagtgattcgtaaaggtacatcagtgattcgtaaaggtacaacagtgattagaagaggtacaacagtgattagaagaggtacaaaagtgattaaaagaggtacaacagtgattaaaagaggtacaaaagtgattagaagaggtacaacagtgattagaagaggtacaaaagtgattaaaagaggtacaacagtgattaaaagaggtacaaaagtgattagaaaggtacaacagtgattagaagaggtacaaaagtctaacttgttatgagatgtacaaaaataatttcataattttaaatataattttatagaattaggtttatttaaaaattttaaaaaaacaaaataataaaaaatgtaaaagtttattttttaattaataaacggaataatttattttactttattttgaaatgaattattatgcatccaaatttttaaatctaattttgcttaaaaataaatctatttttcaaaagaaaaattaaatttaattaaaataattttgttaataataataaaacaaaaaataatttctttaattaaaaaaaaaaataaatttaaataatttaaaacaaatcttcaaattaattataaacagtgaaaataacccaaaaatgcatagaaaaataatgtacaccgtccgggtccgaacctgccgcccccccccctcctcataagggtgcctcagaatccccaatcacacagggattctgaggtcttgacgatgtcaaaagtaaaatctgatcacgtattcgtgatcagcggcccaaataacccctaaagacatattttttgaagatttttggtgaaaaaatttttcaactcaaaaatcctatgctcacccctttggtccataatcccaaaatcggttttatttttgtaacaattcgtaagaaagtgataaaaatgtaaaataaaatttatattataaagaaaaaaattgcggatttttgtagtattttaattttcaaaaatttcttttcagaagggggttatgaatttttttctgaaaaatcgaaaattttcagaaattctggaataacttgttttctttttaagatagaaatcccaaataaatcccataaaattctcctgatttttctctatttttataatataattgcacgaaaattgatccacccttcgatttgttatgaattttcaaatattaggccaaaatcccgagggccaaaaaattgccaaaaaataaagaatttttaaaaagttccaaaaattatgaaacttaaaatagacatcatataggagatcagcaccttattttaccccagaaaaatattt

SEQ ID NO: 24351 - DNA, 2071 bp, Heterodera glycines
attggcaatgaatgattggcaatttctgctgctgatgaagtgatcggacgttgtgtctttgggcaaaggaaaatgggcggacggatgacatttcaacggccactgctgttcaatcggatgatcagcagaggagggatcatcttcacccaactgcagcagaaggggcgataaatacgggtgcgatgggatggatttggcaacgaaaggggcgagcggcggaggaggcctatcaccccggggcatccatccatcgatgggttggccaattccgtctgccgatgatctcccatcaaaaatcatttaaattcctatggatggattgtcccatccctctcaaatgcccccccccctcccaaaataccataactttaatctctgtcctccttttccgacctccgttcccccttaggttcatccaatctctccccaatggcacttccgccggcgatttgacccttcttcgtttcgcttctcactttttgttttccgttcgttttctgtccgacttgaagccaaacacaaaatgaagcgaatgcttttcaccgccgccgccatcttcgccttcctcacgacgttcgcactgatcgctctgatcttctaccaattgttccgtccgatcagtcgtcggtcgtcccaatcggacgcagcggtcattggggtcagttggcttatgattgtcgagaatgggcttgctttttgggtgatcagtcggttcattcgcttttaaaccctgctgctgaccttccaactttgcagcattcggccggtctttcgtctttttccgattccccaccgcccacaaccgatgcatttccctccactttattgccctccgtcccttttccgtccccccatttgtcgcctcaacggaatttgtcaaatcttcgtaaggcgcgggacgacaaagaaagggcgcttcttttggtgcgaagtgtgaatttgaacccgaactcaacttggagcgcacagctaaacaaattcgccattgggtgggcatttctctaattgtgcccgaggcgaattgctggggatgaaaagcgcaatttggaattttgcaaatttctcagattgaaacccctcagcgaaatgctcaacttttcccataattttgacccactgaacaccacttttatgatggcacccaatcgtttgaatgcaattgaagagctcgtgttgaaggtgtccatttggctctcatttcgctgaccttcgtcctttccccaggagttccaaccattgtatgatcagcatctgatcggtttgaccaatcaattgaaagaccctttgccggtccgattcaattcggcacagcgttggccaaactgtgcccagtccattctgcgggttcgggaccaaggcggctgtggctcgtgttgggttagtaaagtgatggtgatcaaatgctaagtgcttgacttttttgcctctgaaggccgtagcagcggtgtcggtgatgtccgatcggatttgcattgcctccggcggccatttggtcgaaagtctgtcggcacagcaactgatcgaatgctgtgactattgtggagggtaatttagctattcaattatgtattatcgtcattcagccgatcgatcaatatgaaactctgatcagctgatcatctctttccttctcagctgcaccggtgcccccaactccttcttccccttcctctattggcaacagtacggcattttgtccgatcgctgctttccctacacaattgcgcgcgactgtggctacccgtgccctccgacagagtttgagcatccgcgcggagttggcaattgttcatgcggggcaaaacaatgtgtggacagacaaatgaagccgatcagacacaaaggtgggtggacgaagagaaagggagaaaaagggggagagagagagaaacagaaaaacagaggtaagagaaagggagagaaagggggagagagagagaaacagaggtaagagaaagggagagaaagttcagaaatgggtcggagaactgacccaaaatcatttaacttttgttaatgctttccaagtccatccatcaaaataatcctaatttatgctaataagattttt

SEQ ID NO: 24352 - DNA, 1669 bp, Heterodera glycines
  unsure (1)..(1669): unsure at all n locations
cgtccaaccgtatgataaagctaagcgaactcaagtgcataaaatatacgtaaatgggttcataaattgagtttcatttttcgactcgctaaattttccctttggtgttggaatacgccgtagttctttgacatcagcaaaaaaggatgagttgaacattattaaagttaaaagcttagatatttgaaatggaaattttaaagcagaaaaaatgtacatggcttaaaccaagttttttcatgacacatttcaacaaaaaatttatttcattaataaggcggtgggtattctggaaaatcatcaaattcttctggttcttcttcttttgtccaataataccatgctgcacaaagagatattgaagataaaatagccaattgaaaagaattaaaaaaatatattttaaattcaccaaaaaaatttcaattttcgtcaatcaccgaaatcccggacaaccctaataaatacggtttaaatgctatacccaccagctggcgcaattgctccaggcgttgcacattttgttgctgctgatgctgctgctccaacgagcggcacgactcatggaggatttcagaaagctgctgcggcggttgctgctgcggcggtttctgctgctgcggtggttgctgctgcggcggttgctgctgctgcggtggttgctgctgctgcggtggttgctgctgctgcggtggttgctgctgctgcggttgctgctgctgctgcggttgctgctgctgctgcggttgctgctgctgctgcggttgctgctgctgcggtggttgctgctgcagttgctgctgctgccggaagcgcttctgccgcaagcgctcttgttgttccataaacagtagagtaagttcacattgtgtcagacactctcctttagcaaacttctgtcgcgcttcttcgagtctatgctgatgatgcggttgcagtccaatttcttttaactctttacacatgcgggcctcatagttaagtttcttctcaattttgtcaagcacatttgcttcactcatcaggtgatgctgctgctgctccaacgggaggcccgactcccggaggagttcaggtcctgaaggccgctgctgctgctgctgcgtctttcgcaattgaagatttattggttttctactatatactttgacaacgcagtgttcagcatgcaatttctaaatgcagacaaaaataataggcttaaattcacattttttcgccgcgcgggcttaatttttaaggaaaaattaggcggtgccgagatgcggctcctggaaatatttttgaaaaatttttgagaaaaaaatgaacaaattcatggtttttcaaatctcaaatacagcacaaatctgaagaatccgcctacttggaagcacttgatttcatcaaaaatagcaaaattttaccatttggggcgctttgtttggcccaatttctcaaaaattagaaaaagatggatcagcgactccgaaaaataggatttttgagtgaaaacagattgtaccaaaaagcattttccacttagtctgagattgtgtaaataagtctcgaacagtatcgaacaccgtgaccaaaagcccaagaccgacataaaaaataagaaacttttccccgagagtctcgagcatacaattgaccctcctcccacttgcgaaggngtctccccatt

SEQ ID NO: 24353 - DNA, 1125 bp, Heterodera glycines
tttttttttatagcagtctttacaggaaattaatcggattatgggaggcgccattcgacaaaagcgaatcgcacaaatataaggcatgaaaaaatttttcaaattcgtaatagttttttttaggattttccgaaaaaatcgcaaagggttgcattgatcgtttggcttatcggagcgaggaagtatttttacagggaattcgcatcatcattacgattaattaattcaacgcacagagacaaaattgtgggggtgaaaaataaaatttgaaaataattatttaaatttattagtttttatttattaagaatactttgttaattgactctgatcgaattgagcaatggaaggaagaaatgaatttggtgttttttgcagtcgaaatgacttttgccccgctaattggcggcaatgttttggatcgatcggaattgttgaagcaaacagcgcagcagcagaacatcgtgtgcctgatcaaggagaaggcggaaagactggacttgaagcaaattgtgtggctgaccaatgcaacaattgcgtcacggcaagtttaaagcttcaaagctaatctcacacatgcattttccaaatcgatcatcagattcggccaatcatttcaaatcagtgattttgtgaactctatggttttttagagaccgagccatgtcgattttcggggcccggcaaaccggttcgggaattttggaaaaatccagtttgaccaattttagaaagggatccgggatcagatttttttttgaaaatgtccgacccgaaaaattaaaaatcgccgaatcggttttgccgggcccggcttttccgggtccgactaggtctctaatttttttccaattttggcataacttttcgtaactttaattaagtaagctaaaattaaatttcgatggaacatttcgtcgaatatatcaaatatttgttttttgattagaaatttgctttttatttaatataaaaataatgaacaactaaattgctttattgtttttttcaccttgaagagtgagttatgccataacatttaaacaaataatgtccactgcactcgaagaattcagggcaagtattcggatcaaatatgtccgatttcatatttcatgccatatt

SEQ ID NO: 24354 - DNA, 994 bp, Heterodera glycines
tgtccgtttcccaaaatatccgatccctcctaggattttaagttggagggtgcctaagatagaaagaaatctagacttctatcaaacagacttaaatttcgccagtgaaactgcctcaaatttgaaaatataataattattttgcgaaatgcctttaatccaaagtttgcggttcgagatgttgcacaagcgtcagattgaaaaagaaaagcttcacaacaaatataccaaaatttaattttactttcacatataaatttgctatcgaaatttataaagttaacaaaaaatttatacagtttagaattttttccattcctttttcaccttgtaagttgaaaacataccgttattagattttcagggtcgctgatctcgaatccggcatccatttcaaacaatttgcgaccctggaccgatctcgaataaaaaccagaaattcacttttcactataattcagagcaacgactggtgaactcgattataggcatttggcggacgcttgttatattacacaaattttgaaaagtccggttccggcgggtgcccggcaaaattttgaaccgggacgcccggcaaatgggcgttttttgaacgggcggcccggctccggtcaattgtctgatcgcggttccggttccgctacttcggtctctgcttactatataagtatttatgaaaattaggttttcaaccaaatatttattcaaatatatagtttcaaaatctaaatcacgttagcaattatttaattgaaccgttaaaaaataccgaatccctaaaactcgaaccaagggttgaaactcctttgttgaattttacattcgaggttcatataaaattagggatgatatttttaaggtgcgaaaaactgccaaaattagttagtttttggttataaaaaacccccaaaataggtgctaaaaatgggaaaacaggtgtcataaagtccaaatttagtagagtgtaaaatcgtaaaatttatccaaaaag

SEQ ID NO: 24355 - DNA, 1066 bp, Heterodera glycines
attttagcactatgatgctttagtatcaaaaaggaagatggagaaaaaattttttaaaaaaatttttccttatattttggttatatcgttttgcttttggtggggtgcttggaacagtggaatcatgcgcacccgtccgatctggcaagttaagcaacgattgctgactagccaaaaggttcggtgccgtgatgaaacgaaccagcactgcttaccccgcggcacccggcacggtcccccgaaggaatggatttaattaaattctctccttcggggatttttttccattaggtcgtccgttagcgttcgattgctctagtcaatttttcaaaatttttgttgaaatatttgtcgtgctctgaagggcgtgggaggggggggggggcgaaggcccaccacgaggccgcgaagaggccgagtgagtaccttcggtgcaggaaaattattaaattttaaaaattttttaattgctttttaaatatgccaaaaaatgtaggcttaacttttttagtgaaaattcgatcactcatattttttgctaattgagcagaagcgtaccaaactttgcagggatactccccggtaaaggactaacttacactgaaatgagcgccgagctagctggctcaaaaaaattttcgaaaatctgagtctttcgtttttaggccgcgaagcggccgagtgagtaccttcggtgcaggaaaattattaaggaagagagttcattatttatttgttttttgcataattaattcataaatatttttttcagaaagggttctgaaacgcaccaaattttatttacatgttagtttaggcactctgatgctttttctatcaaaaagggagatgaataaaatttttaaaaatttttaattcctttttaaacaggccaaaaagtttagacttaactttttagtgaaattcaatcattcatttttcgagtagtgatcagaagcgcaccagattttgcaggggcctaaaaaggtcaaggaaaggcgtctctgcgttgatttagcagtagtacctatgaatttaaattttctatgaatttttaaagtttttt

SEQ ID NO: 24356 - DNA, 1803 bp, Heterodera glycines
  unsure (1)..(1803): unsure at all n locations
tcctctctctgagtgccaatgtcccctccgcccctctccttaccaagacctncnccgtgccgaagtcgcgtggcagcacatacccctaaggaattagcctaaaatggaagaatttatgtgattttagaaatgttttttctacttttgagtggatggatcgcggcaaactcgcggaggaatagggctgacgcaataaaacgcccatttccgccgattgacgcaattcgtccaattcggccgccaactgacgagccaatggagaagtggcggcacggccgctgaatcaacaaacaaacgatcattcaatttggcaaaggagtggttgacctgcttgaagttgagggttgttctgcctgtggggggtgctcctgggggagtttttctgtggacaattgatggggcggaatggaaggcggaggtggcgaagaaacgcgccacagaggcggaggagggaccaacgcggacaacgaggaggagaaggaggtggacacgggaaagcactgctgtcgggcggaagttggcccggacgacggatggaaaggctgcggagtccgacgaggcgacgcggaacggaaggactgggcacaaagaccgggcggaaaggaggacgaatgagccatcatcgaatggtcggagccatccaaggacaggtcgtcctgctgcggcaaattaggaaagcaagttaattaattaattagcgaattaattagccaatggcgcaactgtaagcaaaatgcgtcggatttgttcattgatgtccaattggtggacggacacttcattttgctgctgcaaaaggctggcactgagcagacggcgctgctgctcctccagggcattgtggagggttttgatcagcgaattctgaatcaatcttctgatcattggtggacgatctttcgctttttttgaaaaaaaagtcgtccatccattggtcactcactaattaccattgatcactccccccgcccactcactttttgctcattgtccaccattagcctctgaacagccatttgcagttgttccaactcaccaactaattaaaaaatgattaatattaatcaaattcgccttcgcttccacaatttcctcaattccccgcctcccaaatttttatcgttcctttttctctttttttcatttactcactttttgcgtccctttgttccgtttcgttgtgctgaatggatgttcattttgttctttctcgttgatttttcacctgcaaatttcgttccccttctgtcttttccctttccaatgccaaaaatttgtgccgtaattcgtccaattgttctccaatttgctgctgtcgctgttggccctgtgctgctccccctcctcctccttctgctgtcccctggtgctggtactgcttgccattcgtcccattgcccaatgattcctccaaatcacggattttctccctttggagtgcgacttggcgagagagagccgccacttggagagacaaactgcgaaattatggaagataaatttgagagatggcatttgaataggcaaacaaaaaataatgggaattatgacaatggaacctgtcacgagtcgtttgacgactttgaaggcgttcatgggactccaggaaatcggagcatgaagcggacatggactgagaaggactctggggagagggaggggatgattctcttgtgagtcgtgagtggacaatcggacagtgggcgaaccgacagtgaggacaatccgtcagaggtggacgatcggacagtggacaatctgacagtaaaatacacaaaaaataagaaaatgccgtcgccgaag

SEQ ID NO: 24357 - DNA, 1787 bp, Heterodera glycines
  unsure (1)..(1787): unsure at all n locations
ttcatccaattttaatttgctttttgacaggcgattatcgtttaagatgagccttctctgaacactttgcagcaattttccgttgttattggaacagaaaaatggttgacagaaaatgaaattccgacagaaaattatttgatggagactttgcacgcagagcgacaatcgggaaatattttgacactttgtgcggttaatggtgaaaattattataatggcagtaattccaattgcaacactttggattttcaggcaaagttgcggctgttatttcgattgtcgaccaggcaaagcgagaggcgcctttggcggtttgggcattgtatcaaatgggcatgaaagtggtgctgctgactggtgacaatgcaaagactgcggaggcgacggcgaaaagagtcggaattcgggaagtgtacgcggaagtgttgccgaaccaaaagaaggacaaaatcaaacagcttcaggttgttggcagtgaattggtagagagaaaacaatttgcatggcaattagcccaaaaaaagaaggttaatgaagaaggaaatgccaaagggttaaattcaaaatggatgtaagaaatttgatgatgggaataagaagcaatgaatgaatggcatggaaaatggagcagaaacacaattcgattgattgcttaaattcttttgttgaatgttccccaatcgacgcgacattttcatttgctgcgaatttgcaagccttgctcttctttattgcactgtcccttttatactgctccattcgtttttagttccaaaaccaagtagttgccatggtgggcgatggagtgaatgacagtccggctttggctgctgccaatgttggcattgcaattgctcgtgggtccgacgttgccattgagagtgccggaattgtgctggtcaaagttcgtcaattttctgtcttccgcccctcacccactttctttcagaataatcttgtcgacgtggtcagtgccatcaaattatctcgcaaagttgtccgccgtattcggctaaatctatttttcgccttcgtttacaatgccatcggtgttccgttggccgccggagttttttccccttggggggtgcacattcagccgtggatggccgccgccgcaatggcattgtcctccgtgtccgtcgtgagcagttcgttgctgttgcgaagattcaagtaatgtccactgccttttttgtttcatttcttaattcccggaaatcaaacacttaaggaaaccgacagaacattctctgtccagcacagagtttaagcgttaccggaggaatttgaatgaccaaaacggaattgaagttaatgtgtacaaagggctggacaaaagagaggggaaaaggaacactgagcaaacggatttgtcggcaatggaacgcttcgcttctggcactgaaatggacgacaaggcaaaacggacaattggtgctgtccgatggattaccaaaggcgtaaagaagagtcgttcaccgccccacttgtcggacgatgtgggaatgaagagttttgcggacaaatcggcctctgaacggtcgtatttcctcatttcttttttaatttattatttaaaatttagtttcctttcgtccggtagtgatttaagcgacgatgacggaccaaatttaagtgacagagcaaacgcccgtgcaaaactatttgaaaatgtctaataacggacagaagaacttgcccaaaaaacttacacacaacgtgtatctttctatgtttttcactataacgcatacctttctattttttacttcanttaattg

SEQ ID NO: 24358 - DNA, 1639 bp, Heterodera glycines
  unsure (1)..(1639): unsure at all n locations
aatcgactgagtggcgcccataaaaaatcccaccaaattaggcgagtcgctatttattttcggttgtccagaatcagaccctcgacgtgatggattcgttaccatttttactgtgtcaagcaataacacttcattttgagctcgttcatttgtcgagaaaatgttaggattgtttttgaaacgagggtcaacgagagtggccatgcgcaaaaagcttaaactattataattagcaaatatgacaaataagaatccaaaatttacattttagattggtgttctcgcatacgggattctaatccatcttttatgacattttttaaactcagaatggactcattttcttcgccattaacacggagataattttgaaggcatttgtagaccgaaataactgatgaaagcgattcgtcacgttgtgataattgatttgtaaatataagaaagggttttaaaacctaaaaattagataaatcaataagactaattattataaaggacctggcaaatgttttttacaagctcaaaatcaggtaaagaaagatcattgtattcttcgttaataagcataagcgggcggctctgttcatacaaacgttcaagcataatgtatgatgaattccaacgcgtgcagacatccttgttataaaaaatggattaaataaaaatagttgacacctgcaacaaaacgtttgaagccatgccaagggctttttgttgttcacaaaaagactttcggaaattggcactccggttaaattcttattgttttgcagttaaaatcattaaattatttagaataactcaatactatcttcgttcatctattttttgattgaaattaattggatattcaaatttttaatattattattgaaatcgagtttaaaaatataaaaatgatataatagaaactaaatttactcaactggaatatagaaaaattaataaaatttcttaattgacatgtaaaaatgctaataattacaataaaaaattaattgtagttcatcatcagaatgttaaactatttatttaggggtttgtcgttaagaaaaaaataaagaatttttaaaaatttaaaacaaataatatatgcaattaaaattaaatagaaaaatatatacagaaataatataattatattataaaataatattggctaaacgaaattaaacaatatgaaaaaagcaattttattttggcggcgtcacgctttgcgtataaattattattattattattaaaaaattaatcttttaaagggtaccagcatcttcatgtgactgtcaagatagcatgaagatttaaggggttaatcagttattaagtgtttaatctattatactttggtttttcaataaaagataaaaatcaaaatgtcgtctacttgaccatcaacataaaaaatcaattgaatattttaaaatttaaaattacaaacaaaacaaaattttattagttataagcaataaaattctgaaaatgtgctgcattctgaaaagctaaaaattgaagcagtgttttaacattgaaaaagtttggatctctttggaccatgaatttaatgagtttaaaagtaaagcatctctttaaattnttannnatatattttcgtcagacataaattctgttacca

SEQ ID NO: 24359 - DNA, 1919 bp, Heterodera glycines
tctcattattttaacctaataaaactttcctaatcagtccttcctaggattccgttttttgattatttgtaattttccagccttattataattcaaaacaaacggcgcagcattggtttccaaaattgttcgcgagaaaatgccttttcaggtagcatttattgctttgtttgctcttttcgctgttgttcctttttgcttcccctttttctttttaggttttcctcgtctacacgggtctcgtcctcttcgtttatttggccaccgacagtttccaaaacaatgctccgtttgtgttcaccattcccgtggtcgtcctcggttggttcactctttggacgcgaatgccacggaggacacgcattctcaccgctgtttctttcttcacgttggcattggcactgtacagctggtcaatgttcccaaaaaagtgagaaaaatgggaagagacagagagggagaacgtaaagagaggggggagagaaagagagagagttgggaagaaaatgagagacattcaaatggggagagagagagagttggtgatgatcaatgcttatcagtcagtcttttgtcgatcattaagtctgataatgccttgtgtccctctgttttgtgtcctcagattggagctgtccgccctgctcatttgtttcagccaattcgcctatttgctctccttctacaaatcccttcgcaaatggtggatcgctcttgcaatttcgagtaagttttggccaacttcattcttttttgtaccctctctttttccaattccccccccccccctttagcttgtcttgtgatgggactgtttctgtacggcattttcgctgaccttttccgctccatcccggcactcgtcctcgcttgtgccaccattatttctctttcatcgacttcgttcatcgtcgcggggttcgtaatcattcgtctcatttcttttattgcatttctttagctctgtgtggaaaaatggttcaacgatggcttatgaggaaagggtaagcgaatggtcttttatttattcctttcacttttatgcccttttcagtccgctttggtccgcttcttcggcactttctttcttttggtttgcaattcggcccttttggtatttatttccatttttatttcccctaatttccgtccatttctttttccttaaggtaaatcatttcgcgcgacacaccggcaccatcgtttggtatctcaacttcacctattacatgtcccagtttctcctttactttgccaacgaaagggcattttgaacatttcgtttggtcaccccaaatgactcaaaaggcgcctttcccatttttctcttttccgttcgaatttaaatgtttaaattttgtattcggtcatatgggtttcttcttattgtctttgtcttccttttttatgatcctaagtaaaatgtctctttttttagtttattttctttttcaattaattttcacggtgtaaataatgtgttccttttattttgtgcgttcgctattttatttcatgcccaatttgaattgtacgctaattaaatacgggaatttgtgaggatggtggtcttttcatagtcaacacagctcttccccctccatttgatatgccattagtctctcgccgttccctccgattcattctttgttatcccaactgttccgcgtggtggtactgcttgcgttgtgcatagtccgggttctgttcgttcagtcgtgttgattgaatgtcgcccggttggattagccccgggggcggcgccggtggaacgaccgccgactgttcgcgggcgttggacggtccgaagggcgtgaaagaatccatgccggccatggccactcggagcatatggacgagggagaagtgggaagctagaaggaaccaattgcataattaaatgctaattatcagcttaa

SEQ ID NO: 24360 - DNA, 1671 bp, Heterodera glycines
cggcgttgaggaccgtcggctggccccccttggggggtcggctgcgggggcgatgctctctgagcgggttaaaaagcgtttaaaagcttggtgacaatttaatttggcaaaggaccaatgataaaatgtcaaaatttgagtggaaaatgttaataaaaaaacattgaaaagcatgaaggaaaaaatgccattatcatgttcgaaatgccatttccgcatttttaagtatgcaaataatttatcaaaattgacaaattttgacacaatctattatttaaaaattagtattttttattcgagctcagacagttggggtcgagaaaaatcccggtgaaaaccccaattgattctgatgaattaaaaaaggcttgtggcggatcccgagatcgaacctcgagaaaatccaacgggatcccgagaaaatgtaacaggatcacgctcccgtccgattgctattttctatgtccaacgaggattttgtgccatttttagtgccaaatttggtttttcccacatgtttggaactgtcttccaattacaattttgttcagcggatttggacgcgcgcctttcctacaccgttgaaaaggcgggcagcgcttgccgcgaccactttggcgcgctcatgaacgcggaacgctgcctgcgtgcgttcagtgtgtcgcaacgcgacagcagcggcgacgacgacgacgcgtcatcatccgcgtcgtcagcactcgttgtgcatgttgatcaggctgcagcacagccaatgtccgaggcggtgctgaacatttctgtgcacgacgcagcgcacgcggcagagccgaaggattacagtaagcccatcaccgttttttactggaaaagttgattactgtaattgttcattgattcattaattagcaattctgttggtcaaatttgtggccgaaaatgcttcatcggcaccggaaagcgctgctgctgaaccgttcagcttaaagaaggcaatcgctaacgcaaattttccagctgagattacggtaaaaacaatcatctggttacggtacattaaaatatatttttttatttttttaaatcggtgccgtttttagctcaacgattctttgcccgccaatgcattggtccacagctttgggttggcacttccgcgccctccggcgttgagctttgcgcttttcaccaatttgcggcagtttgccatcggcaaagactccggcaaaatttaaattatctaattcgattatttatgaaaaattcatcaaaattcaataaatttaaaaaatattcgaaattcttattcaataagattttatttatttataaagaaaagaaaaagtccacaaaagggataaatccacttactttgtgctaaaaaccttatgcaaatttgtttcgccagccttttaccgaggcttcccaataaatttttgaaaattttggaatttttcgcaaaattttcaggccttttggtgagtacgcgtccgttgcgcggtttggccggcaaattccaaatgcgtgtcgacatcaaatatgggcatgaagtggaacggattggcatcaaattggaagtgttacggaacggcggcaaaaattcgggcgaaattttgaaatttaccaaaaaatttgaccctaacggacacatcaatttggaggatgaaaatgtgagaatttaaggcgtgaaaa

SEQ ID NO: 24361 - DNA, 2650 bp, Heterodera glycines
cacgttcggccatgctgctttcttctcagaatgggtcctttcatatttctcgacttcctcttcatcaaaaagctttttcatctgctgatttctgaattctgtacccttgtcggagaaaattctgtgtggtttcattggcatagttgaaaagactcgcttaaatccttcgaccatgtcatcggatttcttggtacgaagaggtgtcacaaaaattcgcttcgaaagtacatcgattaccaccattaaataacgattgccgctgttgtgccgagaaagtgcttgaaagtcagccaaatccacctgacaatcggtcataaaaccggcggcagttgttttagcgcgcggaaaattgatgcgtcttggacgcatcagagtgtaggtgcgatgtccctccaggtagtgctttacatcgcgtttgggaattttatttccaagttcttttttggcttccagccacaatcggtcgacaccggcgaacgcagccggggattttgggtcattgtagagtctttccaacacattttctattgatttttccatttttgtggtctgagacgttggcttttggtggggatttccgtttctattgctgacagtgccgtcgacttccgcttgacgcccctcattggaaacggaagtgtcattccttcttgtaccctgcctctcgcctgcctcattcctctgagcttttgggatttttggtttaattctgtcgtttgctctgcttgtgacaatctccgtttgggtccccttggtggtactggtggagccgtccatgttcgcaaaataaggtcactgttaatgcgatcgcggatcaattttgttcctggaggctgtctaaattgtggaattcgtcccgctctgcgttctataatatagtcgagagcttgggcgacactactgtccgttattgggtttcctgcattatttaaaacggtgtcaccgtgaacaccgtacttgacggggttacgattaaacacgaactgaagccgtcttctcttttgctcattggtaagttgcgaatttggaatggtgaaaaggtgctgatcctccgcaaactgatgacgctgctcttcggaaagtacttcgccgaccgggttcttttgtctttttggctgatttttggtaacatttggtgaagacaatctttttcgagtgccaattcttgttctttttctttcgttgtcttcttcaactttgttgcttttccgctttttcgttttactaggcaacggaggtcccggtggatggacctgagccgaggtccccgattgttgtgagagttcaaagtcatcatcaaccggtaatggggcagctgctgccactgctagtaagtccctctttcgggagccaattttgattctttttctttcgttgtcttcttcagctttgttgcttttccgctttttcgttttactaggcatcggaggatcaggtgcgagaggctggaaatattctccatcaaagattttttgtcactaatattaatggccattttttggagctttgatcatgaatgttaccaaatttaaaatcgaatcgttttatataccctttttcattctcttctgttccatagtttatttaaaaaatgtttcctcatcctttccgtttatcgaccaaaatattgctacgggtcaaaagattgggtaaacaaatgcaatcgccgatgttcgagactctcgttccttatttttcattcatttttatcccttttccccaaatggcacgccatccatctctccttccgatttacaaacgaaatattcgtcgccaaaaccacgtacacattaagcatgtacgcgtaaatttttcatgttgacataattaaattataattattcaggtgtttgttactggaggacaaccgccaagttattgtatttggtgtttagcacttgggattattcttttattcgcttggttgatttggtaagaaaacacagaattttattcattaatttaaaaagttcgtaaatttcaagatgtcccgcgagaatcggatgacctcgaggatgcaatggatggggaacggatgtaagacaaacatttcaattgattaattctgaccttaattatttttcagtaaattttaaacctttctctaattcctaccgtatcattttattaaatgttttataaaattttaaaaattgatttggaattttaaatccattatccaaaatttattcattcgttccgtgacctctttcatttaaaatgtaagatttgatcaaaaattatttgcttctttccttttatcataatcttcattcaatcagtgacagtcagcgtccgatcattccatctagtcaatctaaaaattcaaaaaaattttgtaaaattaattgatttttgcatgtgttggctcaccacttcagtcgcctcctcgatggtttccaattgacgcgatgttgaagcgtcggtggccgagacctgctaagcaaagaaaaaaaattcattcaccatttccaccccctcattttttactccttcaaatccaacgcggcgcacaagacgattaagcggtgccggtataggggaacgctacaaaaacaatgtataaaatgtaaatgagaggctaattaggggggggggtggtagtacctgacggaacggacagcgaacagcaagcgggtgaccaattccc

SEQ ID NO: 24362 - DNA, 1907 bp, Heterodera glycines
  unsure (1)..(1907): unsure at all n locations
ataaaaatgagggatttttggtggtccttcgtcaaaatccaatttttgcgcggtctgccattgggttgacagttgctgcgaacgaaagtgcgtcattgtccgcgcacttaagctgaaaacactcgaaacgcctgacaaaaagggattttgattcgggaaaaattgcttttagcttgtggattgtttcaccaaaacctatcttttccggtgcagtgggctgaatgctctccgtgtagcggcgatactcctcagcgcccaatttgttgatgatcagtcgcactcggcttgcttcgggcaaattctttccttcatctgcgatgaaagtgccgaatctttcaaaccactgctcgaatgtgtgattgtcgtccggtgtgtagacgaattcggcgatctgtgcgctgagtttgcaaaacaagtccatttctgaattctgggatggaacatttggttgtgtgcttttttgtaaaagcgaatggatcgcctgcagaatgtctttgagctccgttgattgttcggcaggcatttgatcgtgatgaaaaatttctcagattttaagtgaaatgaatgagaggagagagtgatttgatttggaaatgtttttgtttgagtcaaaataagtattttgcttagcttcggtcagaaaccacaacggattggcttgataagtgagtgattgatgatgtgatgtgatcagataattgccttttgctgttggaagtcgcacaagtgcgttgcaaccagcggtcaccgccgtgacttggctgtccacacaagtgactttcagaacgaaagtgcactcagaggctttttacggcgtgagtgttaaaaaaataaaaaaattttcgatacatttgtgacagaaaataataaaaatagatggccaaattttatgtttttaaaaaataaaatgtaattttcgaaaaaagctcaagccatccagtggctaaacttgtagtttatcttcacttttttgactaagaaatttaaaacctttttacgtcttagaaaaacttaaaaaaccacgaaattattcatttttggtgtcaatttgcaattcataaatttttgaaaattgataactttttattttaaaattagggattgctgaaattgcgcggcttttgaggtccgcaattatgggttgcactcaatcgaaaaattcgattgtgaccacactggtccgatccctagggtcggggggggggagctcaattgtcaggggaccccgatcgggtagtgattaacaaaattttttcaagaaaaactcaatttttattttaaatgctcgtaaatcttcttttttttcactttaatcatctgatttcgttagcgccaacaagagtgcgttatttataagaatgttctgattttggggtagcgacgaaaattgttcagatttcttaaatatatttatagttttaattttttatgcaaaaaatgctaccgaaaactcccaattttcaatttttttttcccggcggcacctgtcggcacctccagtccgcaaaattgttcttaaaaattttctcaaaatcgcgcaaaagttggtcatttttggtgaaaatctgtgagcaaaatgaactcaaattttcaaaaattnctccaggcggcgcctatcggcactgccggccactgtgtccaaaaatttttttcgggaaaagcgcgtcacaaaaaagcatgtttttttcattttgactaaaatttccaaagtgctgattttgaccccaaatgatgattcttgttggctaaatgctggttttgaaaattttaagttagcagcccagtttttacaatgtaaaaagccgttttttaatcttatttttgagtccaaaatcttcgttttaacctcgttttgtccttagtttataatgggagactaaaaatataaaatttgatagcattttgat

SEQ ID NO: 24363 - DNA, 924 bp, Heterodera glycines
  unsure (1)..(924): unsure at all n locations
cagagtgacgtcgtcgctccatggactgcggaggggagactgcccagtggcaactccatttggcacggtggtgccaaatggagttttagagttgtggcaccggtggactgaaaaaaaattcaaattntaaaaattcattttttttttgtttcgcacagatttgaagtccccaaattataggcttatttataaaaaatttagcttttaaaattaaaaaatatatataaatgtatagaataatacatggttttaaaatggaaactattaatatttggtggagaatgaaatgcttgggccgttggtcattcttctcgaattatgctgggcttaagggtgcccattggcctaaaagaggcgaggaaagagggaaatcgatgagtgaaaaggccgacgacagctgcccagcagctgccgaatggccttagcaaatgcgaaatgacaatttattcaaaaattacagtaaattacaaaatttagcattttagaaaaccattcggaaaaagattatttttaaagtaacacattaattaaggttcaaattgggacaaatttttgatgtcaattatctgaaatgacaacattttgatcatataattttttccaatattttttggaaatatgtaaacaaataaattctcgtaatatatcaacaataatattcgtcaagcgattgattggcttctgatcactgctgatcattgcggccgcgtgatttgaacaatttgttggaggccaacgcgcgtctgagttggtcctacgtctctgttctgcttcatgatagatgcttcctcgcttacatagtcttaccggccgattagggaaacaacgaaagaaaattatttttctaaatgtncaaaattatcaactaatatggtattaaagatttatttttaaggccagtaaagtaggcannatgactctaga

SEQ ID NO: 24364 - DNA, 2332 bp, Heterodera glycines
  unsure (1)..(2332): unsure at all n locations
cttttgaattttcttctaattttagtcgattcccaccgctttgttcaactacggccattccaaccatcactaccaacaccaacataagcagcttaatcaacagcgtcatcaccgaatcgccacaccatcagcttcgtcctgttcggacaatgccaatgccaccgccgtcgtcggggtgccatcacaaaaccatccgccccatcaaaggagcaattcagcgcttacaccgtcgccggttaacaggtaggggcatacggtatggaaagacaagcactacagtatcagggcatagtaccgtgggaaatgcctattttggaattaaatgtaattattgaacaagttttacccctggggggctttggaccatctctgacaatgacccgtgccaaatcccacacgagatgtgaatagacttttggcatttatcgggtaggggattggcattccctctatcccaacaagtttggcgttaaaatggcattttgtccctacgtacagttcgtacagtccgacgggcagtgtggagagcagcagtggagtgagcagtggcagcggagtgagcagtttgaacggtgccgccgccgccaacatgatgacgtcactgccgatgcatcatcaccaccagagccagcagcatgtgacagtgaagacggaacccggcatggcacctgcttcaactgctgacatttctgccaacattgtggccaccccgtcaacatcggaaagcagtgatggtagtggcagtggcacaacaccgaggacaacaacggcaccgccagcaccgctcattggtggagaagtcgcgcgggngggagccgaaagcgcaaaagcccaatggacggcaacactacggtaaatggtggtgggcacggtaatgagcagctgcttcatcatcatcaccatcatcatcggatgatggtagacgaaatgcgtgatcagcaccatctccaacatcaacagcagcagcagcggcatgaccaatttgacgggtcatcagccgccaaaatgtcgaacatgggtaagcggagggtggcggacactcacttagggggaaggaattgtgacgcataaaaatggcataaatacccttcgggattgggttttcagggtcagctaggtcggggtttggatttttcggagtcagctaggtcggggtcggggtaaaccctgaaattgcctaaattttcggggtcggagggccggccgtaaattgacatcaatcaatgaattttaatcaaagcctcgtgaacaaaaggatagttttagtctgagaatgggacaaaaaaatggctccaggcttagatttttaaaaacccgacaaatttttctcggttcggtgccaacaatctctacaattaatgcattcgttatccacaggcccgtcattgtcgcgccgggcacggcctcagcccttggacctgacttcgtgcgttaatcccgccgtcaaccaactgaccggacaaatgagccaaatggttgcttcttcaccgcttctgcttgcgctccaacagcaacaccaccaccaccaacaacagcagcaacaacagcagcaaagtccgttcctttccgccgcgctcaatgccatgagcagttttgccgcttcaccggccgcgatggttgccgcttcgtcaccgttggcacacgcggctgtgtggcaccacttggccagcaacatgttcaacaacgcgttcagcccaagctgtcagtggggtataggaaaagtgggcgggcgacgcgacaaaccgatcatttagtgatcactaaaaaaaagttaaatcgttacaaaaattttgatcgatagattgatcattttggaccagtaaattgactgcaaattcattttccttttctaaatttttggagccttaacctaagaattgccaagcaaaaatttaaaaacacattaaaattttataaaaaatatttaaaaacgaattgtaaaaaattatttacaaatatttatatattaaattgaatttcaaatgccattacagtgaattcgttgtccaataacaacaacaacaacaacaacagcacaaacaatatcagccaactgttgtcatcggcgggcggtggtggtgacaattcgccgtcatcggtggcgaacagtgtcagcaacacaaccaccaacggaaacaatgacacaaccgcagcaacgcaacaactgcaagcaaacaagacaaataacaacaacagcctgtacagtcagctgcaaaatgcgttgacaacgccgaccattgtccacaaccatcaccagcaacaacaacaacagcaagcagttcggacaccacaactgtccaactcggccatgctgtccgcggtgatcaaccat

SEQ ID NO: 24365 - DNA, 1538 bp, Heterodera glycines
tgattttcattttcttaatttggcatttcttttctggcactttttcttttttccaaattggttaataccaaaaagaaattacgtaatttttcaaaaaaaaatttttttttgtcaatttatcattcatttctaatgaaataattaaatttttgcattttgaattttgtcgcaatgagagaaaagagagagaggggaaagcagagaagcaaagactcgagagagagggacaatcgagagaggagagagttcgagactgacgagagtgagtgagtcactcttccggatacaaagtgccgcgtcacgtgctgcgctttccttcgcttggccattcgttgcctttgcgtttatttgcactgcgggggcggataatttacaaaagggcaacacattgtgcgcttacaaattaatgtggcgtttaagcgacacttttgccctttgtcccctcaattaaaattcgccattcgtttggcctttgattaattaatgcgtttggcactgcgcaaatgttaattaattttgtccatggcaaataaccttttcaaatgtttggcttttcttttttatttaattatttctttgtatttttcattttaaaaaatgttttaataatttttcccattttcgcataattaattaaacattaaatttattttgttttggtaattgccccccccccccctcaatttgctttaaattccccgatttttgttttcaaattttggtttggttttacaccctctcaaattataaatgacccctcgaaaaaattgacgacccctttctcccccccccccccccgccgtttctccttctaattggcctaatttggccgtgacgtaattatgcgatcgcgcgacgtctcccaaaggtttcccaaaaacaaaaaatttgcccggcgaggacaaagtttctcaggccgaaccaattattttatttgacagtttctgcgaattcatttaaattccaatttaagtttttatattttttaaattatttaataaaattaattcctaaattaattcaaaatcattttccgtttcaattctccccccccccgtttattttctgttctctgattggcccctttttctccttttttggcgtgacccgaatttaaatgagtttttctccctttttttcctttttgagggggtcaaaaattatctctcctttataaaaattgcataatttgacttgaaaatgacgtgacttttttgcgccagaataaaaaggtgacaaatataagttgaaagctcacaaaaaaccattcattacaaaagcaaaggtaaatttaaaatttatattttttaattttaaaaattaaaaagaattaattttcaaaatttatgggtttaattcaattcaatttccattggtctgttggataatcctcggcagaaagacggtcaatccattcacttcacttactctttttgtcactttgccccccccccgcggcattcattgcttttgtcgccaaattcattaaaatgcggcgacgttcgccattttcgctttttggcacagtttttcgtttt

SEQ ID NO: 24366 - DNA, 1247 bp, Heterodera glycines
gacgagttataggcccgggactcaaacgtcccgctcaggccaaaaaatttttctatttccgggaaaaaatcgaaatttttccgaaaaaaataccagtcgatagagctcgaaaaactacgtttcggaagtggtctccgtttttctcgggaaaattcgttaaaaaatcataaaattaaaaaacccgaaaaccgttttttaggcctaactcgaaaaattttgaaaattttcgaaattttaaaatctggaaaaatcgagcttatttaactctacaataagtctgctggccacactcgcgctcaggtcaaaccctaatgagttattcgcctggtactgaagtgggaaaaaaaaattaactgagtctccgtgtctgtacaggtccgggatttggtctgatcaaaaaataaaaaatactggattatagaggacacttctgcggagtgccctcacagcgggaattttttgatccgagttttaggaaaaaagttaggggccttcaaacgcaagaaaaagtgagaaatcggtccccgggactcagtcgtccgcgctgatttttttcctatagttttcccggatactcctcaaaaagttgtaagacccttccaccactttcagggcgctcccggccttcggccgggagaaaatggttttagcaacgaaactccttgtcaatataacgtatatattaactagcgggtgtgtgcttacatgtttctttagtgcttaaagcgcttcgcgctttgggagcttcgctacctaggccttgtgttagggtctttgcgtcagccgacatgcacttggtttcactcacgtgatgagctgacacattgcatttatcagtgcaatggaaaccggaagtgccctaactcgcacgtcatccctcctccctcccttagtccaggtggcagcactttttgtatgtgtatccgtttaaagtgcagatgagaacggggcgacatcagtaaagtgccacacactctggactataactcgtttgccttattgtaatttgagcatgtttttggccacaatgttcaacactttggtttgaccttggccatcggtctcccttctgggagcgtacactcggacgttgttcccgtctgttgcccttgaaaaggcagtgtacaattgaccatgggaaaacacatccctttcgaggtcaattccgaccgtgctgattgtttggccttgacctttgagaatggtcatggcaaaggcaggtttgatgggaaactgcaaacgctcat

SEQ ID NO: 24367 - DNA, 2022 bp, Heterodera glycines
  unsure (1)..(2022): unsure at all n locations
gatcaaccagtacttgaccatttcgtttccctttttctcttctccccagccaataatttttaccgaatggccatttttctcttttcggctgtttggtgagcgctaaaatacactgcttttttcaaattgtatttatatcatacaacataaatttgatttatatcagctgccattgtaatttgaaaatcgtcgtaaacggcatatgatgcagtgatagagccattgaccatgatttcacgcatcattttttgctcatttccaaaatgccacccaatccaacactcatgtccaatgacagtcggtgtatcagccatttctgaaagtcgtagtaattatcttcataacttgaatgaagaaaacattaaatgtgctctttataaaattaaccatttgaaagtaaacatgaattaccgttttcgacagtctgatgccaaccgattctgcattcttttttgcagtttggtctttttgttttccacgaagcctcgggaccgacaaaaagatattccatagttaaaattggtaaacgttcaaaaaaagttccagcaaaaattggatcaattgtccaaggcctacatccatcgtacatttcataatttgacccagatactgtttctttatgaaaaaatttccaagccatgctgggccaaccacctttacacctgcaaaattaaatactcttaatttcaatattttctacattgtatcgtattacccgtcacttcctggagtgaattcgcaagtgaattgtgctgagatgtatgaccctccataatgggaggttttttgtccctttttaaggcgagcaatacaaatgcgatcggttaatgttgaagctgaagccactgcccagcagcaaccgcaaagtcctatttaacataggaataatttgaacttccaagtgaattaatttttttgagaaatcaaattaccttggtctgtaattgtgctgattatatccgcgcaatcaggccatttttcccgcgcgtcaaattgacgcggtaaatcattgtcgttgctgtattgagtttcaatatttagcgtttccaatgtcttcagctgttgattctgtggaccatatatgggcggaaacacgccatcaagttttttcaattccgcatctgtcagcaaagcgaaaggttcgtagataacagcctggtaaatttattgaaaaaaacaatttcttattaaactaattattaatttttatttttattattacgagtattttgcaaaagaataagaatattataattttattttaaccttccaatatttttggcttttattaattgtgtccacttttttctgcgctgcagctaactgcttcgaccgatactcagactaaaacaaaactgttaatttttaaattttgtagaaaatttatataagaataagattttctgattaccgcttcgttcgggaatttgcgtggttcaatttcgaagtctttttgttcacagtttgatccatcaattcccaaatttaattttccaccataagtcactaatatgtcaagcaatacaccgagagtcgtgccaacattaatctggcaaaaaggaaaataaaaacaatccttatatacaaattattcaattttcattcacttgcgcattgtattcaccgcctctgcctggtaagccttcatttgctgtgattttctcccatactttcgttccacaatttttactgttgaataatttgaagttggcggacacccaattctgtgccaattccttcgctttgtccttcattcttaattaagtacaaaacaatacacagaattttttttacgaaaaccgtttggtgcccgatttacgcagtccttcgatgagcatgagttgtgtggactaaattttctatttttttggccatgaattaatagggattgaattgtttttcttcttaaaaatcaaactacaacactatttcaagcgttcaaaaaatttaatttaatttaaatttaattaagaataaggtcatttatgacacgcctattcattanaattntcggtttttatc

SEQ ID NO: 24368 - DNA, 1042 bp, Heterodera glycines
ctggcatagagaataaatttaaaaattccctgtagatattatggccattgctctccgcgcccctctgcccatgctggtctcatttgtatggtacaaaatttctcgcaaaaaagagatagccatttttctggcatagagaataaatttaaaaattccctgtagaatagaatggccattgctctccgcgcccctctgcccatgctgggaacatttgtatggtacaaaatttctcgcaaaaaagagatagccatttttctggcatagagaataaatttaaaaattccctgtagaatagaatggccattgctctccgcgcccctctgcccatgctgggaacatttgtatggtacaaaatttctcgcaaaaaagagatagccatttttctggcatagagaataaatttaaaaattccctgtagaatagaatggccattgctctccgcgcccctctgcccatgctgggaacatttgtatggtacaaaatttctcgcaaaaaagagatagccatttttctggcatagagaataaatttaaaaattccctgtagaatagaatggccattgctctccgcgcccctctgcccatgctgggaacatttgtatggtacaaaatttctcgcaaaaaagagatagccatttttctggcatagagaataaatttaaaaattccctgtagaatagaatagccattgctctccgcgcccctctgcccatgctgggaacatttgtatggtacaaaatttctcgcaaaaaagagatagccatttttctggcatagagaataaatttaaaaattccctgtagaatagaatagccattgctctccgcgcccctctgcccatgctgggaacatttgtatggtacaaaatttctcgcaaaaaagagatagcctttttctggcatagagaataaatttaaaaatccctgtagaataaaatggccattgctctccgcgcccctctgccatgctgggaacatttgtagggaaaaaatttctcccaaaaaaaaaagcatttttctggcttaaaaaataaatttaaaaat

SEQ ID NO: 24369 - DNA, 1770 bp, Heterodera glycines
  unsure (1)..(1770): unsure at all n locations
ttcattggcgaaagaaactcaaaaaattgaaagccaatctttttttaagcatttcttgtgaaaaaaatattgaatccaaaaaacgaagtccctttcttgtttggcattttcacggaatatgggcgcatcccctcattcattcattcatcaatgcccacccactcctcaagaggaaggaatggtggaagattcttagatttgggcaacgcgcacttctcttcccccccccccccccctccctctctttcttcctctctcttcccatcatctattcttcccctctcacccttattccctcacttcgcagacttcaagccctgcaaaaacctgggcgacaccgaagaattcctcctgcaactcgaacgactcacacgcgaactcaacaatacaggagaagacatcgaaggcccaccgaccttcctcatgattgaaaagaagctcactcccggattcctgcgcacaatcctcaccaaaaagggagaagacccggcacgctggaacacgacaaagttccgagacgtactcaacgaagctgttcgaaaagaaacccaaattcaagaagtcatgggcgagtacggacactcgcagcagcatccgcaacaacggccacaagctcaaaggcccaatttctcggcatcgaaattccgagaccgcgcaccaatcccacagcaacgggaacgcacattcatcacctcagcagtggatgacaatcacaaaaggctgatcaatcgacagcctcaacacaggccacagcaacaaaggcctcgcgcaccacaaccgcaacaaagaaacttgcgcactttcaacaatcaaaggcaatttccaactcaacgtaccaatgcgaccaacaatcaacgacaatttccaactcaacgtaccaatgcgatcaacaatcaagggcaatttccaactcaacatgccaatgcgacattcaatcaacgcaagcctccaagtccatgcatcttctgtgacaacgatcactggaatgaagaatgccggaaatacagcacaattcaacagcgaagagaagtgctgcgcacaaaggcattatgcttcaaatgcctcaaaagcaatcatcaagcaagcaattgcccacaaccgaaaagatgcttcaaatgcaaacaacctcatccaacggcattatgttatgcagacgaaaaaccaccgaaccaaatcacagcagcaatgttggggcaaacacaacaaaatgtgtcaatcacaactcaagacggaagtaacgaaccaacggcatcgacatcgcaaatgtgcaatgccgtaaacggaagcgacacacgcgcactactcatgaccgcaacttcaacggtcttcaatccagcacaaccgcatctcagcatgactgcggcaattttcatcgatccaggcagccacacatcattcatttcagcaaaggcagcacagctactggatcttccggtggtccacactgaagaatgccacttgaccagtttcggagaacgcgaaccaaaaagatacatcagcgacctggtcaagctcggatttctctgcacgagcggggaaaaactcatcttcaacctcaacgccatgaaattcttggtcaacgacatgccaatgattcaactgtcagagctggacaagtcagagttgaggcaacaaaagctcaatcctccgcatgaacaacgacaacctgacatcatgctncgaattgatgtctggcacgaactgcnaggtcaccnaatcgaaaagttgccaagcggcttcacactgtgccgatccaaaatcggcaaaatc

SEQ ID NO: 24370 - DNA, 967 bp, Heterodera glycines
ttaaaatagacatcatattcgtactcagcaccttaaacattcccagaaaaaaatttttcactttcattttcaacccaaaaaaaattttcgaaaatttctaggggcctagctcgaaaatttttgaaaatttccggccatataatacactattcgatagcattttaaaagctctacaattttgccctaaggcgttttttcgataaaatcaacccctaacgagttatgagcccggtactcaaatgtcccgctcaagccaaaatttttttctatttccgggaaaaaatcgaaatttttcagaaaaaaataccagtcgatagagcatcaaaaacggttgcttgaaagtgctccccgtttctctgggaaaaatcgttaaaaaatcataaaattcaaaaacccgaaaaccgttttttaggcctagctcgaaaaattttgaaaattttcgaaattttaaaatctgaaaaaatcgagcttattgaactctacaataagtctgctggccaccctgcgctcaggtctaaccctaatgagttattcgcctggtactgaagtgggaaaaaaaaattaactgagtctccgtgtctgtacaggtccgggatttggtctgatcaaaaaataaaaaatactgacttatagaggacacttctgcggagtgccctcacagcgggcactttttgattcgggttttagaaaaaaagttacgggccctttactgcaagaaaaagtgagaaatcggtccccgggactttttagcaacgaaactcaaaacctatataacatatatattaataaaactgataacttattaactgaaaattataggtgaatcacaagaaaattcaacatttgggcttaaaatctggagaaaagtcaattggtgcaatgttttcgggatttacttatagaattaaagaaataaactgacaacttattaactgaaatataggtgaaatcacagaaattcaacatt

SEQ ID NO: 24371 - DNA, 999 bp, Heterodera glycines
aattataggtgatcacaagaaattcaacattgggctaaaatctggagaaaactcaattggtgcaatgtttcgggattacttatagaattaaagaataaaactgacaacttattaactgaaaattataggtgaatcacaagaaaattcaacatttgggcttaaaatctggagaaaagtcaattgatgcaatgttttcgggatttacttatagaattaaagaataaaactgacaacttattaactgaaaattataggtgaatcacaataaaattcaacatttgggcttaaaatctagagaaaagtcaattggtgcaatgttttcgggatttacctatagaattaaagaataaaactgataacttattaactgaaaattataggtgaatcacaagaaaattcaacatttgggcttaaaatctggagaaaagtcaattggtgcaatgttttcgggatttacttatagaattaaagaataaaactgacaacttattaactgaaaattataggtgaatcacaagaaaattcaacatttgggcttaaaatctggagaaaagtcaattggtgcaatgttttcgggatttacctatagaattaaagaataaaactgacaacttattaactgaaaattataggtgaatacaagaaaattcaacatttgggcttaaaatctggagaaaagtcaattggtgcaatgttttcgggatttacttatagaattaaagaataaaactgacaacttattaactgaaaattataggtgaatcacaagaaaattcaacatttgggcttaaaacccagagaaaagtcaattggtgcaatgttttcgggatttactatagaattaaagaataaaactgacaacttattaactgaaaattataagtgaatcacaagaaaattcaacattttggcttaaaagtcaattggtgcaatgttttcgggatttacttatagaattaaagaataaaactgacaacttattaactaaaaattataggt

SEQ ID NO: 24372 - DNA, 865 bp, Heterodera glycines
ggttaagataaagaaaatacaatagaacacacatacccaaaagcaagaagcattgtccatccctttttatcagttaagcaaaagattttatatcaatgattaatgattaataatcaataattctaaaatgataaaagtcaattattgtcacagcatttatcacaagataatgacaagaataatactcacgacagtcagcagagacaacttcataatcagtgtgagtaaccgcttattcatttgcagaagcaccgaaaggcgccgccgggaaaaattttgtaatttttaatgcgatttgctaacagttttttgtcaaaaaataaccaaattttgcgcaaaccttatattttcttgataaaatagtgacattctgccataaaatttcaaaattttgaatatatttaagaaataagaacaaaataagaacaatagccggaaataaggacaaatcttacaaataaggacatttttattttgtaagatttggaccctccaaataaggacaaatcttataaataaggacagaccacacccctgctttaagggcaggctgaagcagggctccacgaaatttcatttcgtcctacatttctggcactttctgagtttcgttttcgtccgtcaaaaaaattttcgtttttggatttaaaacttaaattttcgtttcgttttcttccgtacgagaatttgcacgaaaagggacgaaaatcggcgccgccggacccatccatcccccgttccccgagtttttgaaaaaaatgcgctgcaaaaataattgttaaaagtgtcttctttttttctcccattggattgaaacccctgttatggtaattcactatgggtcaactccacatgtgcagagaaa

SEQ ID NO: 24373 - DNA, 1711 bp, Heterodera glycines
acagcccatgggaatggtggaaccgggcgcaattgccggaattcgaagggaacggccggagaattggagacgggacaaaaagaggaggggggaaaggcgggacaaccggacaataacgaagatggcacatatcagagtcagaaaagttttgaagcctcaatttttggggaatcggaatccaactcttaaaatgtcggaaaacgaaatttattatagaaaatgtcgaaacacggaaattacaacaccgaaaatgtcgaaaaccggaattccgactccaaaaaagtatgtttttgtacgcgtgggattgctgagatcggatttacgaaattaattgaagaatcgcgtaatacaatgtccatgtttttgtttttcttaaataattttaacttttcggtgggcggttgattgggcgtcaagaatcacaatcaagacgccccacgccttagtccgaaatcaattaaaaccgcgcccggaatcaattaagacatcaaatttcatagattcgacatcaacagcagaactgggtgtgtgtgtttgttgttcgacgcggttgcccctcccgccgcccgacgaccaaagaaaaggcaattaatcttaaattaattgcttgcactataattgttatttttggaacattttgggcaataaaaattaatggataaaatgaggaatgaataccccaagcattctcctctctctctcgccaattgattcggccactcctccgtccctatccgccgttgttttggttttcccatcccaatcggcaacaaaacaaacaaacaaaaattgacaaataaaaactaattatcttatcttccatataattagtaaagattcattgaaatttagttgttttttccaccgtttaattccttcaaattgggtggttaaaaagggtcaacagaaaaacaacccatccatcagcagaagcagaagtgagggaaaagcgccctcaaaaacatcgcattttttgccattttttcaaataattcttttatagcaaacacgtaaagtcaacaacagagcggtgcatcaatccctcatgaaaaaggaaaaaatggagcaacaacaaaaattgatgaaatcagtcaaatgattgtatacagataaaaaaatgggggggggaggaaaagacaaaacaatttgttgataaaaaatttaaaaaaatgatgagatggatttgcaggaatgggccgggttcgcaaatgataaatggacgaaatttaaataaatatgaataaaaaagctctttgcttctctctaatctatgtagagagttgccagagcggtcagctgaggaaaacctaataattttgaatttgcataaattttcacagacggcacatacagcgatggtggcaccgtcgatgtacacatggcaaaaatgagggattttacaataattctccgtaattttggtctggcaactccgtttacacgtgtttctgcacacaaaaggtcacaaacacacactctctcctctcctcttccactctctttgtcaatatgtccctgattttgttggccaatgtttggcgccgattcaatgcccggcggcggtcggtttcttcttcgcctgattggccgtagcagcagcaattgttccaccggcactgctcccagcggtgcatttgctatccaacagagccaccagctttgtcacgtaacaaagcatcaccaaaatgccttaatgaggggacagcaaaga

SEQ ID NO: 24374 - DNA, 1669 bp, Heterodera glycines
gcctttttgtgagctttgaagggtctcttccatttaataatttcaaatggagaaaccgtattacaaagagaactgtccggaccaacttggtccaggaatggtgcctctttgcattaaataattgctgttttggctctgcacatgtatgagccaaaaatattttttcatcttctttcggtggatcatgtaactcttcctcttttatctcgaagaagagttcatgaggccaatgattttggtcctttgtgagccaattaggcccaccccaccacgaagaatgggttgagagctcttctggtgtagctcctcttgttgccagatcagccggattttcagctgttcgaacaaagtgaaacgaacactttgttatggtgcgaatttctttgattcgccgttcaatgaattttggttgggcttcttttgaagccacccaatttaaagcaatttgagaatcactccacaaataggagtgttcaattgctcggcgcaattgagtttgtatgaattttaagcctcgaattccaataagaatggccatcagctccattcttggaatagtgagtaccttataataaatatttttatgacttttgaaattttttaaaaaaatttcaaaaaaggtgtgataccatcggtactattaccaaaattagccaaaaacctaataataatcaaaaaataaaataaaaaatgtttttttatagatgaactagttttgcttcgttcttggtgtatctgaatgcctaatccgagcactttctttttcaagggttcgaatgaagacgggcaatcgaattcgttacaacgcaaaacgtcgtcattggcgcagaaccaaactgaagctgtaagcgcaaatgaacaggcggaagacggcgggcgatgatttgacttgttgctgttgattcatacatttttatggactgttgataaaggaaattgtcatcggaaaagccgtccaaagcattttgcccacattcattcaaaaatgatgaaaagcgcattctttatgcaaatttagttaaaaaggggggcggggcggcgacatagggcaattgtcagtctaaattgaatagagggaactcaatcagacgaatggcttttcccctggggtgtcgccgcttttcctttgtacttccgccgttccctttgattggccatttccggtggtttatttacgcacttttattttgctttgtctttttcagtgttcatctttaagatgtgttgaaaatgccacttttattcccgtgccccacaattcacacaagtcacaagcaaaaattcgaagcgaaatttggggaaaaagcgtttaaggaagagtagacattaattaaacgcaattactttttttcttcgttatttccgtttttcatttcttttttattgtctccgatattaaaggacaattgaacacgcaaaataaaattcaaaattttgcattgctttgaatttgacaataaaccgacaaaaggacacttcgccccttaagggcactccaaaaagaatggcaaaacgaatgcatattttgtcgtttaaatattcgtttggttgttcagtccttgtcctttcctttttcaccctttcgataacccattaatgtccatcgtgtggaagtcattttttgttggttagggaggaaatagctgagatgatgaaaaaaaagcaaaaa

SEQ ID NO: 24375 - DNA, 1683 bp, Heterodera glycines
aaactgagctaattctccagtttttgggatataatcctccacagaattggtttggagagtcgagattttgaagattgaccccccccccccccatagtcgagactgagacccaaaagtttctcgcttttcgagaccaaagactctcgaggagcccaataattgagagattaatagcctattcagtcaggagtaacaactacttgaaacactgtgaaagcattccggcgaacactgaacacattgaatcgtttagtgcaaaacgatcggaatggccggacaatgaaaggagcgtaaattccaaggtaattaacaaggcccaccaagcacagacctgttcaaaattttttttttacaaaatgccaaaatatgcgggaaaaaaatgaaaaaatcggaaattttaaaataattccaatttttaaaattttatatgaaaatagtggacctgaatgttgtaatttggcacctgctccaatttgtggaaagcagtttcatagggtgaaatcagataaagtgcatgcctggaacaaatttgattcattggcaacacatcaaataaatcttttttaaatttcaaaaaaaaaaaaattgtcggcattttccaatcattttaattatttttttaaatttcaaacagttttctggcagagaaagccctccaattattttcaaaaaattaatccattttcactaggaattttaaaagatttgtgccgtttaaatattttcttaaatttttcgatatggcaaaattgacaaattttcctgcctaagattggtcagactaagtcgtgagcacagtaattccatcgacggatccgttaaaatgtacgatagccatgccggcatcgtgatggaaccgttcaccaccgcgggcagaagcattggggatgaagcagcagcagaaaacatttttgggaatgtgtaattgaagaatttaatggctcaatgaactatttggctgatcagcgatcagaagtgatcgggcagcttttctaagtaaaaaattcacaaaaattaattcgtcaaataataattgaaatcaaaagttggcagaggtaaatttagcattcaaaaatttgtccaagtttgaaaaaataaagttagcacaaaaagtgcgaaaaaatattaaggatattcgagtacatcttaatgttcgatgggcaattaaaaaaaaaattaaaaattatttttaataattaaaaccggcaaaaattgaaatttatttgtttttatgtgtgttttattttttattcaattttaaatttatgttttgtcaattcataaaaaagaagaattgtcaaagtttattaaatataaattaaataattttccaataaaatttaattaaattttttttttatataaaaatcaaatgataaagaatcgctataaatttggagaattactcgaagaaatattttttattcggcttttcgtgaaataacaaaaaaaaaaatccggtctcgaatggataacattagctgctgctgctggtggagaaatgggatgaacgcaaaataatgtgcgcggcgcacttataacgggggataattagtggttaattggttgagaggaaatccgaatttgcccgagggcatttaacggatgtgcgtgcgcattgggtgggcaaaaaaagagggaccttttgttgtcgccaagtgggggatgatagaatttttagga

SEQ ID NO: 24376 - DNA, 1609 bp, Heterodera glycines
atatttttttcagaaaaatgcttaggaaccgcccccaaattttatttacatgctagtttaggcactctgatgcttttttctatcgaaaggggagatgaataaatttttaaaaatttttattcccttttaaaacaggccaaaaagtttaggctttaacttttttttcagaaacttatcagaagcgccccaaactttgcagggatactgaaaggaaaagaattaacctgttttatcacattagcttgtcatcagtttttataaaaaattttcaaaattctgagtctcctattattttatttttttttcaaaattttgaagggcggggggggggggggcggggcgaaggcccaccacgaggccgcgaagaggccgagtgagtaccttcggtgcaggaaaattattaaattttaaaaattttttaattgctttttaaatatgccaaaaaatgtaggcttaacttttttagtgtaaattcgatcactcatattttttgctaattgagcagaagcgtaccaaactttgcagggatactccccggtaaaggactaacttacactgaaatgagcgccgagctagctggctcaaaaaaattttcgaaaatctgagtctttcgtttttatttattttttgcaaaattaattcttaaatattttttcagaaagggttctgaaacgcaccaaattttatttacatgttagtttaggcactctgatgctttttctatcaaaaagggagatgaataaaatttttaaaaatttttaattcctttttaaacaggccaaaaagtttaggcttaacttttttttcagaaactgatcagaagcgcaccaaactttgcagggatactgaaaggaagagaaataacctattttaaatattatctagtcagttcatttaaataatttttatccaaaaaatttttttttgggttttcggggcagtccccctgaaccgatgcgcccagatttatggggagaccgaatccttccggaatagcttcactatagcctgtactttaattctgcgttggatttttgctccccataattgtttgagtaccccaaacggacacttgaaaaaatcgatttatttttgttttcggggcagtccccccgaaccgatgcgcccagatttatggggagaccgaatccttcgggaatagcttccctatagcctgtactttaattctgcgttggatttttgctccccataattgtttgagtaccccaaacggacacttgaaaaaatcgatttttttgttttcggggcagtccccccgaaccgatgcgcccagatttatggggagaccgaatccttcgggaatagcttccctatagcctgtactttaattctgcgttggatttttgctccccataaatgtttgagtaccccaaacggacacttgaaaaaatcgatttttttgtttcataaatatttttttcagaaagtcatgcgcacccgtccgatctggcaagttaagcaacgattgctgactagccaaaaggttcggtgccgtgatgaaacgaaccagcactgcttaccccgcggcacccggcacggtcccccgaaggaatggatttaattaaattctctccttcggggatttttt

SEQ ID NO: 24377 - DNA, 1099 bp, Heterodera glycines
gtcaactcaacaattcgcacatggtttaaggttgagtaaagagcaaaagtgttttataaatttttcaattgaaaattatattaaatcaatttatttattgtgaaaaataaaattcgatgccgggaaatggggggggggggacgctccaacgaagggagaggagagaaaaggaaggaaaatttttaaatttttatcaatttaaaatttatataaacccaattttactccaattagtagcgccagctcgctactccccccagaaactgtttaaaaatgcgctgaaatgctccttttttataatatttaatgaaaatttaaaaaaatataaattactcaaaatatgtacctttttagctgtgtggagcttttgaacatgtgccaaaacattattttttcccgtctgttcatgatgccgttttatgtgctcaacaaatgggcggtttcattgcgccaagcattcacatgaggtaaatatatccatatttaatatttttaatattcgagagtctcggtttgaatcggttttttctctttcaccactttcaaatctgttttttgttatatttttctgtcaattgcaatcaaatgaatagataattttttagtgtttcgttgaatggttgccgtgatctgatcactctgtccaacgctgcgtccaaccacgacattactttgaacacagaaacaagcggacaatcatcagcaaacataccggtaattacattaaactgtttgtccagaagttttttctatataaaaaatggctgccaaaatggtgaccatctttctccgccagtgaaaatatatcgaaaaaatgttttaatgtgcaattggaatagatataattcgaaacattttttgtgcctttaagtgtaagcggtactctatttgatgtcatatttatttttagaaatggaaaacaattaaaatatttaaaattttgcaaatatttacgaaaatgttcacaaattcagatgctaattagtccaaattaagcatccagaagttgccagccttggcccatccgcggccgccggctcctcctcccaattttgctcccgtccgacctcatccccgacaataattggcggttcggctg

SEQ ID NO: 24378 - DNA, 2088 bp, Heterodera glycines
ttaaaaattaattctaaaaaatgttagagttctggttaaggattcggaattggctgaaatggaggccggattcgtgctcagcgcctcaaaacacccctagaaaagtgtttaaaaaattttcagaaaaaaaaaattaaaaaatttcgctaccattgatcttttactttcgactacatcctgttctcacacgcattttgtatttagaagggacaaaaagacaaaaaaaaaaagcggacaaaataaattgaaaattcattcgttaaagaaaaaccatcactaagagaaaattgacgaaatcatggaaaacatggagcaaatagcagaagcattgacaagtcactatagactttgttactatttacccatcaaaatgcatttggtacactccatttttcaattaaaaaatgaacagacggagagagagagggttacggtatttaactgattactgtagttagttttctttcgtctgtcgctttccaattttattcgggatttgtccaatgttcacatgtcttctgttaacattctttcagcgaaaaggtaacaagacatttaagaaaatttggcatttttattaagtttttttaaattggttaaattaaaaatgataattccgaatcacttctcttcaataaaaatgagtgacaaaatcatggacatgagaacagtgacttttgtaaaaagtgccaattgcaactttgacgggcgcaaagaaaaattgtgatttcttaattgggctttgattttaggcaacagcaaatatttgagttcatatttagtcgaaataatcaaaaaatggcattttagatcaatttaattatgtcctattttttctatttcgcatttttggtacttttttttgatattttaacaaattcatttcttaaagaagtaataaaaagaaaaccggccgtcggaaaatttttagaagaacaaatccataaaatgtgaaatctcttcaaaaacttttaatgtaaaaagcgttaatttaaaaaaaaattttttgcctttttgtgtatatttcgggttttgcagcttatgaatttactgcttaaaatcgaagcccaatttaattctgtgcggtcccaacgaataataaacataaaaatttattttgtttttcctgcggtgaaaaatgtgctgattacgaatctgagcttagaaaatgtctatttttgagtcggtttaaaatggttcgattaaaaagatacatattatgatttataaaaatagttcaattattatcaattattattctaattcacaatcagcatatacagtggtggaaagaagtcttgactcaaagtgataaaattagtaaaaattaaaattttcctcgtttaagttggcctattatctttctttttgtataattattagtgatgctcgagaccaaaaatttcccgagactcgagaccgagaccgagaccagaccgaggctcttatgcaattttggccttattgtactacaatgcttaaaatgctacaaaccttattttagaaatgctgtattattgacgcttttttccactgacgaatttttcatcaaaaggcaaccctatatatcccctattaattttaagtgatcgaattattaatttagaaaaattaaataaaaaattaatatttaaaaaatggtccaatacaaattgtattattttgatttgcgtggtttgggtgaacccattcgccttttgcttcactatgttggccaacagtttgaagacatccgctttaaagactttgaagaatgggagaaaatgtacaaaccgtgtgagtaaaaaaatatgtggcataacgccagagaaatgccaaattaaaaaaaaaaacatgtttgtacaggcattaaaattttttagaatttttctacggaaaggccccagttttggaggttgacgggaagccgttggcccaaagctcggcaatattgcgctacttagccgaaaaatttggtaaactaattataatattaatttattttaatttatttaattttataatttaagacttggccggcaaagatgaatgggaaaaggcgaaggctaacgaaatcatggacatgcagaaagatgccaacaccgattt

SEQ ID NO: 24379 - DNA, 1660 bp, Heterodera glycines
gttgttgggggcctccgaaattttttttttgtcacaagtcgtgaaaatttgtttgttcactggggttgctgtttaatcacgaatctgccttctatgtcaacaaattccaactccctccaaaagggtacccctcttagaagaaattttttagagggccccaaaatatgtttagtttacggagtttgcactaataaggtgcatatgcattttggaatttagaaaatcaagaatggccagcaaaaacaacaacaaaaaataaataaataggtaaatatttttttggcgaaattaatgatcaacaactatgcctatagaaaaggatcaaaattctgttttgaatgaccgtacgtactttaaaactgttaatgatcttactattaccaaggggcatttgtttacttacaaaggtgtgaccaagccgaggacatgggtgcttcggttgtccttccaaaatttgtatgttcaatttgcgccactcccaacggtttatttgaagctcgtatagatcatttgagtacctaaattaggcattttttgcggctgtcctcaaataaaattacagaactcgatcgggatccaggccaggatttccctggtttttaactaggcctagatttttctacaggaaatgcaggtccaggctttttctaaaggtcaagctcttatattatttaaaacccaaagaattcgtaccggccatattcgatcattccaccaaagatgaaaaccttcgactgatttgtgaccattcctttcagtaattgggttcaatataacaaaatgttgtgcaaatagtgttcaaaaaattaccataagccgcaaaaccaggtggtctgtggccacgcaaatctggcacacaccactaaacggtaaattgcaattagttgactctatttttttattaattcaagtccagcatttgattacctaatttgagaatgtgggacttgacaagtaaagaaaaaaaagttatggccaaagaaactgaggatgatcatcaattggacgtcttattaaaaatataagtagtggaaaaatataggttactcaaaatggcctacaattaattgtccaaaagatgaaaggaaaaaatcatccaggactcaaattcaggcggaatctttaaacaaataattaatttcaattagcctcactgtgttggtgcttgtgtcgtaaacatgcaattcgttgacaattccttcatttccacctccaaacaccagcataagcccttttatggtaacagcgcggtgcccatggcgtggcggaggcgttggcctgcccaaatcgtccactttacaccattttggcataaatcgatgatgctttgcataactgttattattgttgttgttgttgctctctaatgacgtacaaacactgtcaagcaacattgttttttactgaaagagaaatttgtacaaaaaaacagagtgccaaaaaatgaattgtttgacatgtgaagtgtttaaataaacaagcttgacgcgatggatatttcggcttttgcaaaaatgtgatttgccaatattacaaacaatatttaaaattattaaatgatttagtcacaaaatgagaaaattttatttgaacttaagagtttttgattataaataaattagctacgaaatatgtatgaaacaaataatgcacaaagaga

SEQ ID NO: 24380 - DNA, 1790 bp, Heterodera glycines
  unsure (1)..(1790): unsure at all n locations
ttttgatttttttctattttctcttggggagagtgatattaaagtttgttttttttgagaattgctttggaaaaacggatcccccccccctccgatttggccaatatttaccatttgtcgcatcgctccgccactttggccattggaaggtccgtccagccgatgtccgccaaataattgtgcatttcgcgccgtttgagcgtcggcagcagccaattcaaaggccacaagtaaacgctgccgtaccttaaggaaaggaattgttggcaaattttgtgatgcacttcactccaccccccttcgtttccatcagaaaattttttttaattttttgaaacctagaaattcaaaaaaaaaaatttaggaatcataagaaaacaacaagaaatctttttttagaaaaatcgctaaaaaaagttttcaggggggggaatttttgagtgccgaaacctggagaacttttgaccggcgtaatttaagcggtgaaattttggggtgcaccagtggactcatttccatgtttatttgacatggaaatatattttttttacctttttttggtcaccaattcgtaggattcgtcgtcaagccatgacaaatatttctataaggtaaaagcaattttgaaaattaatgattggtctcaaaacggtgccaacttcggcgtttcgaagcgtttcctcaatcagtgagcaaaatgcctgaatgtccgcctgttcagcagcgcttagcgtatttgacggacgaattccctgaaaatttcttaaacaaatcagacaatttttggttcattttttttgcatttggcccagtttcaggtgctattccagcttttgaaatggttttgtgtgaaagttgtctgcacgggtatgccgacggttactaattgtaagccggtagaaatgtttaggacctttacaaccccagaacacaaaaaagtaaattcaaaatttttttcaattctgtgtccgatttgaatcggagggaaggaaaggggccatagcctaggcagcctttacgacctgtggctataccactgttgaaatttctttgatttaagccaaaaatgcgggaattttatcaatttgcgaccaactattttcgagcgaagaaaaaaattacttttttgccgaccaaatcaacaatagggaagaattcagcgaccagagtgttctgaagacgcagaaagggcacttctcctgaaaagcaaggcaaaaataatgaaaattaaagaaaacattcaaattgagacgcatagggtggaagagcaaaaaaaaaaatctctttgggtgcctcccctgaattttttttccggttacgagcctgcacaaggaaattttttgtgaaaataaaatttgggaagtaataccaaaaatggtctttcaaaaacattttttttttgcatttttacccgtcggggacataaattccgcgtttggcctctgctccaaaacgaaggacagatcggccatcataagaaaggcacggacagccaactgaaagcggacaaaaacaaaaatgttgacgatcaattgaaaaatggacacgaaaagcagaccgtgtcggcatattggtccatcagcgcttgctcctctaaagggttaagaaaaggcgtaaattgcgcatttaaatgaaaaaaccgattaaaatacggaattgcaaattacggatgccttggggtgggggggatgggnatgatagcaaaaaatttgaataaaaaaagaaagggctaatacaaaattcttcgtaataatgaaatttttccaaattttgtacccaaatctaagcga

SEQ ID NO: 24381 - DNA, 1256 bp, Heterodera glycines
  unsure (1)..(1256): unsure at all n locations
gtaatttattctttttttggtatcttttgccttcatggggttttaactgtcacactttttctatatgtnnaaatttcttatttcgatccatattcgttgaaattatacaattntatttcaatttttgcggataaaacttttttattaattcaatttgtgcaaaattttagaaatatttgtacagcagaaaatggaaacttttgataaaatgccttaattacattctttttcaataatatcttttaattggatgcgaaagtataagcaaattaaatatttgaggcaaaaaataagaaataaatttaaaaaaaagaattttcaggaactttaataatttgtaaaaagaaatatgataatgtgatgaaattttttaatttaatttttttttttggtataaaattagcaaatttccaaaaagttccccaatcccgagtgccagtcttttccattctcgagtttttcaaggaataatcactcaaaatttgtcaatttatttaaatatgataaactcaaaggccaccaaaaaacaaattataaaaaagattttttaataataacaaatttcacaaattaattctgttaaatcactgaatgtgcaaataaggcatcacatggcacgtgaattcgtgtgcaccaacagttaaggcagggactttatcagaacttggaggatttttgagatcagacggaagcacctaaaattatttattaattttaaatgtaattttaattataaatattttggcactttatatgcgagaaagaagttggcggtgaacaaaaataaggtcattcgggtcaatgcttcaccagggcattgtctaagaagcaaaattatttttaaaataaattaaaattatttttaataaaaaaggaagttaattcacctcttcccaactccaaatggaattaatttgtcacattttttcaattttccctcatcgtccaaaaagcgctctggccaaaattggtggggttcggcaaagtactaaaaacaaaatgattgaaaaattaaattttttttaaaattttttacacaatttttttggcaaactaccttttcactgaagaggacactgctgatctgaaaaataaaactaaaaaatatttcgccggctttttgtccacctgtggcacaattggtgtgccactttccaccgtaaaattgccaacttttatttcatcaagagtcagatgaggattgttgaacacaaccaaatttgtcaaacgcaatgtttcctaaaaaataacaaatt

SEQ ID NO: 24382 - DNA, 2220 bp, Heterodera glycines
  unsure (1)..(2220): unsure at all n locations
ttttaggggggtttacattcgccttcaatgaaaggtctaggtgctttnagacattatgtcaaaatttnaattttttttttttgctttacgggatgccaatgtttgtcggtgggtgggcggcactggcacaaaacggaaggattttccgccggattttccgggcaccaaagcgagggaggagccggatggactgattggcatggtccccccgaaaaaaatccccagaggggttttggctccccaaaattttgtagcaaaaagcatcgaatttatgttgaccaaatgacaaggcccagcagaggacacaaattggataagcaaacattgtgacagatgggcgaaacggaaattttagttattattattactatgaaattaaatacaataaataatatattaggcaataaagaatttaataaaaaaaattattgaaaaaacattatttacttattttaaaattttaaaaaccaaaagttaaacagcattctttccaaaaaaaaagttatgaatagcaaaaaaaaaaattaaataaaaaaataagtaaatataatgcaggtataaaaataaaaacaaaattaatttttaaaatcattataaaaaattaatatttgtaatttgtaaattattttaaaatatagaaattgaaaaaaagaaaaaatttaaattaaatatttttttataaataaaaaaaatgaaataaaaataatatttttattaaaaaaatacattaaacatacaaacaaaaaaccacaactgtcattaaaagcacttgaattttttggcccaaggggtataaacgccgcagagcgctgaaggaggaggagcatgaggaggagaggagggcattttatgccgatgatgaggaggagcaaatgccctccggggatgccaaagtcttccaaaagcgccccgaggggatttcttgggatgtgtgccgactcaaataaagaatacacaatttcagtgaaaaagcgccaaaaattaacataaatcttcttccagtaacaaagcactcaaacccattacattggtcatttttggatgaaaattaaattgtctattttttttaatttaccaactttttcaatttttgggattttcctttttggataaagataattgaaaaataaagcgtaattaaattcaatccaatattatgtaggaaattaaaaatggaatgaaaaattaatgaaaattagaaaggaagaattttgaaaatataatttttgaaattatttttaaactacatttttgtccacaatattttatcatccctaattataccatagcaacgtataacgattaatattttttaaataaaaattgttttaaaaaattagtgaaattcacatgaataaaataaaaaaaatacaataaatttttgtaaaatcaatatacttaataagaaaaacgaagaaaaatgcaaaataatgcatattatgattgcgaaaataagcagaaaaaaataatattgtaaacaatattattatatatatattttattatctattaaatattattaaaagttaataaaatgcttgtgcgcttattaatggtactaattttaatggtgtcattaagcacatcgactaccaaaagtttccaaattggtgaataataatattaaaaaaataaataaacgtattatatttttagcaatgactgacgaagaaatcagcgatcattatttaaaatttttgaatttaaaaaataatttaaacgataaaacaatgaacagatcaaatcaatttaaacagaagttgacaacagcaagtttttacagacaaattgttgaattctttaagcaacacagaacgccaaatggaaaaaatgaaattttgaatgccaaatttaaacaattcgatggattaatttcggaattcagccaattttcacttttcaacaattgcaaactttgggttttctggcgagagcttgtccaactgttaaagccagattcaagcacaaataatgacctcgaaaacaaagttaaaaactgtgaaaaaattgtgaattgttttggccaagggtggtatactgtaaaatctgatgaatactgtaacctttatttacaacattttcaacagtcccattttgaaatgctttcgcatttgttgcccaatgaatccgaaaggttacctgcatataaaattaaattanatattttatctagctaattaatttactctaatggaaataaaaactaaaattttttatatt

SEQ ID NO: 24383 - DNA, 1471 bp, Heterodera glycines
attgaccggattaccggattgactggattatgagagaccggatccggaatccggtcatttttgaaaatgccaatccggtccggttcggcgaatttttgaccggatccgatccgactcggtctctaccaaaaaccataactttttttcattttcctttgaaaaatatctctttggcataatgtttttaactttaaatggtcaaaatttcaaatttttcccccggcggcgactgtcggcaccgccgggcccctttcccaaaaagtttttcttttagaaaaagagcgccacaaaaaaacattataatttttttcagttggaataagaaaatttttcaaaatgctgatttttgaccacaaatgatgatttttgttagcaaaatgattcgggggtcggggaataggtcccataaacgtctcgggtcgggtcggggggctcggggcttaaccctactccaggattcccaaaaaacataggttttcaaaaataaaaaaactttaaaattgtttttttttttaaaattttttcttgaaaatttgaaaaattatatttttttggcgaaattgtcttttcaacggcgacattttctggtgcaccgaatttctacatataattgatgaaattttgcgggttttttcccaatttaagatgcgaaattttaaatttttaccaatccggaatccggatccggcaatatgaaaatccggattgaccggattatgagagaccggatccgggatccggtcattttttaaaataccagtccggtccggtccggagaatttgaaaatctcggtctctaatttaaagaattgtcgtattaatgccgatgtcaatcctagtttatcatatcaaacacacataatacaattaatgtaactcaaatatatctcctactcaatccatcactgaggaagaacattgaacggcatcgcatcttaaaaacgttaaaattattgtcatttttaaagaataatggggagaatccgacagtgccgacaaggcactctcgtaaaattttgataagttttgttaagattttttcggaaattattaagaccatggtcaatcgaacctgacaaaagaccttcattaaaatgcccaaaagttactttggttgccttgttcaatagttttggccttctcttcttttggcaattcgcgctgaattgcgtccaattcttcgtcccacgccttttcaattttgtgccagtgagccttaaaatcaagtgaattttaactttaatggcaccgcccaccataagttcttttttgcgttgctcgcgacgattaaaataatagggaaattgctcccctttcagcctaaaattaaagaaaaacagcaatgaaaaaaacatagattattggtcccaccaaaaagaataaaaatataaaaaaaaaacattttaggggttttttgatgcgctgagcataaaatgagatcttcctttgactttgttcctaaccccggcac

SEQ ID NO: 24384 - DNA, 2648 bp, Heterodera glycines
  unsure (1)..(2648): unsure at all n locations
cctttgatgggggttgaataatagagcccctngggggctattatcgaagaagtacggtaattagaattttaaattttctcctttaagttgtcctggttgcttaatggtccgctcagtttgctgcttgtgctgtctggcattgtgctgaacgcactttgtaattaaattaattaataaaaaatgacttttttaattgcacaatttttgcttgttttaataaaaaggtgtgattgtgttcgtgcgatttcgtcgaaatgttagcggtggcacaactcctataattcactattacttggtaaagagcaacccaaaactcataattttcatttctattttaaaaatatgttgaattttttcagatttctttggcgggatggcactcggcacttttgttcaacgcctttttgctttactgtctaccgacaatggtgcgaaactatagataaaggccatttcatttaaaaaaatgaaatttaacttttttattacatcttatatgttttaattattcaacaattaattattttaaattgtttatatattttatttttaaaatttaaaattcacatctcttaactttgtcaaataaatattattttccttttcataaatttctttgtttttctacaaatttgcattgcttaaatggttaaaagaatttagctttggggctccgtcgtctcatcgggtccctatgtgcatttgtacccgccaacctacgcattggcaaatgcgacacacaccggcactgtttggattgtacggttttttgacgaagaaattaacttttgtcataaaggctttattttcatactttctaaaaataggtccccgacggcagcaacgtcgcaaaattttgaacaatttattaactgaaatttcgcaattgcagattttggcactcactttggaccgctatttggcgttgtgtatgccattcaagcatcgaatttttagcaaaagaaggttaataatacaatttttgattatttgattttatttaaaaataaataaattgtttttagccgtgtgaagcgtctcgttgtcggcctttcaattggcgcgctgttcttctgtttgccacgctttttcgaggtgcaaaccgcggtggagtgctacgcgttggacggtggagcagcagcgcttttgtccagcgcgcacgctaccgtagccgaaacagaggtgctcatagtagcaaatgctaccgtaaccaatgaacagcagcaacaacaacaaatggacactatgtacggtagtgcaattacaaagtgcgacacgtttgtgcagcggacagggctaccggaggttgtgggaaggaaaatggaacttgtttttactatctattatttaaattttattgtattcgtttattgtattaaatcgctttttaacttttagaaccaactctaccgtaccatctaccatatccttctgggcagtgcctttgtgacaattttgccaggtaaattttttttattaacataaacaaaaaaatgataaacaattttaaatgaatatgatttatttttcagcaattttatttcataatattgattcaatcttataaacttttttttggcattttttgcttaattttaggctttttgtattattataattaattttatttttttaaatatttaaaatattttataattttggttctaggggttctcacttttgtgcttaccttgcgtatttcaattgctttgggcgaggcgcgccaccggcgaaaacggctaagccactgctgcgcccatttgcacagcgtcgatggcaccggcgccgggtcgaccaccgcacggacaacaacgacgacgatcagctgcaacacagaaagtaatgggactaaaatgaataatgagaattttaaattgaactgtaacgtactgtaacagttgtattcaaaatggtgctatgacattactcaaaaaaccaccaaaacaaaacaaaaaaattgaagcttgcaaaatttaaaaaaaacttttcgaagcattttctgtttttttctgatacttttcaatatttcgcaataaatcggtgaaatattttgtttaaaatagtaaaatcaaggagaatcgttggccgataattctgtgggcgaaaagcagcactaccgtataatgttaatgtccggggcgatgaccaacggcggcaaaaagccaagcctaaaacggtgaataaacattaaaaaagttattgttaagtaaaataaatttcttacctatttttgagccgtgtatttatattttaaatcatttttcaataataaaaattaaatttttatttaaatttaaaaaatcattttttcaggaaggaacaccgtgccaatgttatgctggtggtgataattgtcaaatttttgatctctgatattcttcccactgtattggacgtctttgaaacagtaaatttaaatataaaatatgtttatgtgaaaattttaaaacactttaatattttcgaagaaatatttaaaacattttaatataatttcattccaaaaattagctataaattaatcaaaaattatctctaattttgaaagaattaaaaataaataagacttaagttgagtaaaaaccaaaaataaactttttttttgttatttaaaaaatcagttttccctctttttgtaaacaacaaaa

SEQ ID NO: 24385 - DNA, 1921 bp, Heterodera glycines
ttatttcaatttgcatcacagaaaaaggccgctctgttttggaaattttccgttttggggatcatttcaacaaatatttggtcacggatgacggtaaaatgcgcaatccggggtgcaaaatccttaaagcttggattttttcccaatcgtcattccccggagacattgagctgagtgtgcgcacgctcaagtcagcggtaggagtcccttcgagagatcaggccgatcctcgttcggacacgaccacagctgttccgagagaccgggtcggtcctcgtcgagaccaaaatccgtcgttccgaattctccatggacgccgtggatcggtgcgctatcagccgtaccaaggacatttgcacggacctgcgcgagtgcgtgactccgatcgccgaaatgatggccgcccccatcgtcgttgatctgctcagaggaccaccccttttggttttcaaggaactcaaggctaaaggcagggacgccttttttgattgtttgggggtgttggactttttgacctttattttattttttatatttgtttggcattatgtttaattatttgtgaccattttttcccaccttttcttgtattcgaatttaattgcattagttttatgttttgtcttctccaaagaaaattgattgtttcttttttttaatttggaataaataaactctctgagaagccttgacaccttccttgaatcccgaaccaaaagtcgaagaaaaatctcatttggcgctcctgaggaagcaggtaaaaacgattgggggaggtcggaaaaataggactaagcagacttcgccgtgtgagttatcgatccaggacggacgataattaacgaagtgtgcaacaaaaagcttgacccaggaaagggcgagtcgcgtcttacttgaaaaaaaaaaaaaaaacaacaaaagttcgggtcgaatctcgcctatttcttccgttgttgacaccgggtcggtgctacagcataaagttggaaactgcagaaaagtgaattgtataaacatatccgggtcggagtgttgtaaaagataaattggaaatgataacacgctcgccacctcttactcgccaaagagcgcttaacctgcgtatgttcggaaatgtcgaaaatcggccggccgctgctgcaacgcaacaaaatcaagaagaaaacagagacaatacgaattttactaataacccgatctccccaaacataactcataatttggaggaacataaccaaaatcaaagtcattttagtgaagtcgaaattatgggcgccgacgaaattcgaaccacattactgagtgtgtcaatcgagacaagctcatacacgccaccataatgcgcttgttacataacagccagcaacaaggcaaggtctcaggtattgcggaattttgaaatactgggatagtcatcatcagaaattttgtgagaggatgagattccggctctcatgggcaccgataggaatttaaaaaagaaacaagaaaattattagaaataatttttattaaaattttcgtttcaaaaaaaaatattacaaacagtcgttgcctaaattgcaaatttttaataaactagcccaaatgcgcgccttcggcgcgcatttgggctagttataaaaacaaaattgtctcattgtctcgataaaactattacaaaaaattaaaaaattttcttaaatttttgattttggttaaaataaagtcacggtttaaaattttttaaaataaaataaatttaaaatcaatatcctcaaaatttattacctgtaagcaattaattaagaattcattcttatgaactgacatcgatttattaaaagtacgactgattgattttatgatattaaaaaaaatttctatctcaatttattgcttgttattgccttgccataaaaattaaaattattttctattt

SEQ ID NO: 24386 - DNA, 1616 bp, Heterodera glycines
  unsure (1)..(1616): unsure at all n locations
ttttgaagatggcattgaaattttgtctttaaaactttttgtaaagacacaaaacaaaacganaaaancaaaagaccacagctgaaaaacacagctaaaaatccgcaaaaanggncaacccatggagaaaacaacgcataaaaacatncnnaaanaccgncacaaaanccaggcccaaaanccggannnngaggnaggnatnaaannggggatggatgagggccgattgaagttatcctaacgcccaaacaaatcccaaattgcggcgggccgtcaatttttgaggtaattgccccctcccccctccctcgccggcggattttgggatttgccggataatcggtgaataaaatatttgaaattttcggcatgaaaacccaattttgtacgctttgaaaggaaggaactgagtgtgatcaatgcgatcagagaagcctctgatcactgcctgatcgcaggatgtttgttgatcgccttgtgattgtttggaaatatataaatgcaaagaatcaaaatttttgtcccaattcatttatcagagattgattttgaatttgtgataagataaagtttgatcacaactgctgactgatcagggcgaactctgatcaatggaaaagtttgttccataaaaagtttaaaaaggctgctggactttatctagttaaaaactaaaatgtgctaaaagtataaaaaagtgccagtggaaaaataatgttcaaaactgacaatgagacaaaaatgccaaaaatggtgccattttgacgttaaatttttcatttttatgttttaaatgtttctcgtaatttttttttttttgaaatttatggtcaaatatattcgtaaaatatctgaattcaaaataaatgttcttcgtttatgaaaaaaagagaaaaaaaatttcaatttattagtttttctttggaataaattcgtcataagccaaaaaattcagatagaaatatcgtaatgattaattgagttgaattctagcaaattaaatttcaatgcccacggggcaattgtgttgttggccaagacattttgccgcccaccgtcacgcttaagggcacaaaaattgagtgccgccgtcagtgatgccaacaaacaaacgatgccgtccgtgtttgcgtccataaatcgcgcaataaaatggaaggcattggccaaattgagtgttggaatttaatagcattaattgcgttagccccacttaatttgatgggccaatgaaatgccaaaaaatgataaacaatttaatgtttaagaggtgattttctttacaaaaataaattccaaactgctcgagagggggattatgtcggctggttttgtttgccccattaatttaaatcttaaatctctccatccatcgggactgagttggccgccaatgcgctttcgtatgacataatcagggaacggattttatatttaaattttaaaaaatttcaaacttagattttttttaaaaaacttcgaaaatttttcaatgagaatttcaaaaaaaagattaatataattttaagcgattctaagtttgaaattttttttttaattttggcggggaagcccgaactgctcccaaaccctggacataataatgccctggggca

SEQ ID NO: 24387 - DNA, 1719 bp, Heterodera glycines
  unsure (1)..(1719): unsure at all n locations
tgtgcatactgtaattttcgtgtgaggtgctgtagtacactttatcagtttaaccccccccccccttagggcacaaaatgagaaggaaaagcattgtcccatcggcgcacctcaacaaattcaacggcatcagttggcccattctcatcgttctgctgattgtcctaattgtaagaaaaaaagaaacaaaattttaaaaatgccaaatttagtgccaaactttggcggatggcactagcaaattcagtcagggcgcgggagagaacgaagttgcgcagatgagaacatttgggggaggagaagcagcaaacagcggagtaacaaattaaattcaattgaaaagcataaacaggcaattagcaaatgattggtcaattagcaattaaatgagacaattagcaattcaatgggacaattagcaattcaataggctctttccaaaatgccatctcccaaatattaattgcatttaaatagatcgcttcgaattgggagggttcgggcgcaattccggacgacgaggacggagacgtggacgaagaggggtccggaggtttgtgcccttaacaaacacattgatgtccaatcatttgaagatgggccatccgcggaggggtcgggcagtgcgccgacggacgaatttggacgacagacgccaaacgaatcggtggccatcactgatacggtaagtgatcgatcagcagggggcacagtattccggaagggttacggtggacgggagggactgactgatcattcactgtccgatttgatgcataaactaaaaaaagtgccaaaaacgaacaattccagcggtcccctgcccaatttggtgacagcgacagaagaccacagtacgccaacacaacaactaccgtaatccacctgcacagtttgagccccgtttctgtcctctccacaacgcgtgccactcctccaatatttgccaccacaacaacgacaattatgctggccaccacattgaggcctccgttgatgaagccagcggcaacgacggcacggacaacgacgacactcccgagttcagtttcctcaagggcttcatcgccaaaaacggccacgaccaccgtgccgagaatgatcaagccgaaagacaaggacaaatggccgcaaccgctgccgaaaagcaccatgccgcctttcgctcccacgcgcaccacaaaaagaccctttttcatttcggacccttccggcactttggaacaacttcggcccggcattttcgcctgttcgttttccccggttaattctcaaaatgtacgccccatttttagtcattgtcggcggagttgtggttggactgcttctgctaattctgatcatttcatatttggtgtatcggcttaaaaagagagatgtaagtgcacttttggcattcgattggcacgccaaattttgcgtgacggaggcgaaatttcaaagccaatgccttttttagtgcttttcggtttaagggaccatcaaaaaatagttttaatagagatggaattttaggcaattcctatataattgaaaatgaattaattttttggctattattttggccttatttttgcctatttttcgtttttgtgtctgaaaattactccctaaatttcgaaggttacaataanatttttgttttccccatttcaggagggcacttacatttgcgatgagccgcaccagcaaagccattacccttacgcttatcataag

SEQ ID NO: 24388 - DNA, 1734 bp, Heterodera glycines
  unsure (1)..(1734): unsure at all n locations
aattaaagtacannggctatagggaagctattccggaaggattcggtctccccataaatctgggcgcatcggttcggggggactgccccgaaaacaaaaaaatcgattttttcaagtgtccgtttggggtactcaaacaattatggggagcaaaaatccaacgcagaattaaagtacaggctatagggaagctattccggaaggattcggtctccccataaatctgggcgcatcggctcggggggactgccccgaaaacaaaaaaatcgattttttcaagtgtccgtttggggtactcaaacaattatggggagcaaaaatccaacgcagaattaaagtacaggctatagggaagctattcccgaaggattcggtctccccataaatctgggcgcatcggttcggggggactgccccgaaaacaaaaaaatcgattttttcaagtgtccgtttggggtactcaaacaattatggggagcaaaaatccaacgcagaattaaagtacaggctatagggaagctattcccgaaggattcggtctccccataaatctgggcgcatcggttcggggggactgccccgaaaacaaaaataaatcgattttttcaagtgtccgtttggggtactcaaacaattatggggagcaaaaatccaacgcagaattaaagtacaggctatagggaagctattcccgaaggattcggtctccccataaatctgggcgcatcggttcggggggactgccccgaaaacaaaaaaaaatgattttttcaagtgaaagtttggggaactcaaaccattatggggagcaaaaatccaacgcagaatttaagtacagggtatagtggagctattccggaaggattcggtctccccataaattttgggcgcatcgtttcagggggactgcccccgaaaacccaaaaaaaaatttttgggataaaaattatttaaatgaactgactagataatatttaaaataggttatttctcttcctttcagtatccctgcaaagtttggtgcgcttctgatcagtttctgaaaaaaaagttaagcctaaactttttggcctgtttaaaaaggaattaaaaatttttaaaaattttattcatctccctttttgatagaaaaagcatcagagtgcctaaactaacatgtaaataaaatttggtgcgtttcagaaccctttctgaaaaaatatttaagaattaattttgcaaaaaataaataaaaacgaaagactcagattttcgaaaattttttttgagccagctagctcggcgctcatttcagtgtaagttagtcctttaccggggagtatccctgcatagtttggtacgcttctgctcaattagcaaaaaatatgagtgatcgaattttcactaaaaaagttaagcctacattttttggcatatttaaaaagcaattaaaaaattttaaaatttaataattttcctgcaccgaaggtactcactcggcctcttcgcggcctcgtggtgggccttcgcccccccccctcccacgcccttcagagcacgacaaatatttcaacaaaaattttgaaaaattgactagagcaatcgaacgctaacggacgacctaatggaaaaaaatccccgaaggagagaatttaattaaatccattccttcgggggaccgtgccgggtgccgcggggtaagcagtgctggttcgttacatcacggcaccgaaccttttggctagtcagcaatcg

SEQ ID NO: 24389 - DNA, 1064 bp, Heterodera glycines
tctagggttcggaccccgtgggcgggggtggcttttcacgggggcgggggatggtgggggtcagagtcgcgggggcggggacgggggcacgataattccgcccccgcgggggcgggggcgggggtttgatttgaattaactccaaaaaattttacaaaaaattaattttttatgaatgatgtgatggctccacattcctttagtcaatgtatcgcctcaattcaattccttttggcataaattacacagattttgtctaaagaattaccaaattttagagatttttggctaattttttaagaaaaaataggtttttggggggccggcggtgccgataggccgcctggcgaattttgaaatttaagctcgatttctaacagatgtttacaaaaaaaataagatttttacgataaatttttgtttttttaatatattaaattatcatgatttactcaagcaaaattggaactcagatttgtaacatattttcttgaggcacatttttcaaaaaaaaaaaaaaacttggtgaatgtgcgagcgtagaggtccggcggtgccgataggcgccgccgggaaatttttttgaaaactgatggatctgttaatagattttgtccaaaaaatgataggtttttgcaatttttagagaatttttttaataagatttacgaatttttgggccctgcgatgccgataggcagcgccaggcgaattttaaaattaaaaaaaataaattaaaaaagaaaccgtcaacctgaatcgaactcacgacagaaagtaatgtcaaggttgattcactaaccactacacatcaatgaccaataataaaattaactttaattcataaaaaatttgtcaaaatggttaaaaaaatcaaaattgtataaattttttgcttttatccatgaatatgtcattctttagggtggtattttcccccccgcgccccccccgggggggaaaggtccgcgggggcggggggatgggcgggggtccaaagtcccggggggggggaacgggggtggaggccaaaaacctggccccccccccgggggggggggggg

SEQ ID NO: 24390 - DNA, 1020 bp, Heterodera glycines
tgtcgttgggcacttccggacagtgcacaaaaacaacaacaccagcagcaccaatcggcccaatcatcagcttttcaacgtcacacacggacaccgtatgccaaacaggtgtggccagaggacagcggcttacgataaaaatttgatccaccccgcataataccgtaatccaattcacagggctctagctttggcactggtgttatgggcggcgctgaacggcgcagcagttgggcttcatcgtcggccggctcgccggtgttggcaatcaacgcgcaacagcatgcacagttggagcgtttgtatcgccaatccattggacagcaacaggtggttggggaggaggggtaattagttaattaattagtgtatttaattaattatccatttaacggttcattagaataataataataatccttgggttaatgaattttatactctattatccaattcggcatgggcaaataagcttaatcttctcaagaaaatcgttgccctcccatatttctcgtggttcagttggttaaatgtccgactcagctttctttcgaacttcgttggttcaaatccccttgtatgcggcgccatatttatttatttatttctctctcaatattttaaaataacggaacaaattgtgcatttaaatatggaatttgttctttcccatgttgagaggcaaaacaatcttacgaggctgtatctactcaaagtgccttttcctgttggcgttgagttcgtccctcgattacaaattcctttttaacaaatatttttttttaattaaatttaaaaaatacaatttttttttgatttttttaaaaatacccaaagattagagaaattgttctttttttttcttatggcgaggacggaacatattgcaccttttgaaaactaacgaattcaaatttgtgtaggggggggggggctggctgctcagaatttaaataccggaaatgagtttttccgtttcaagaaattttgttaaaatccgaatttcgaaatcgccgctat

SEQ ID NO: 24391 - DNA, 1089 bp, Heterodera glycines
  unsure (1)..(1089): unsure at all n locations
cgaaacatagcaaccggagtttgaagaatggagaaaaatgccggctgacttttttgttttaatggatttattttaatgaaaaatttgattgaacgcataaaaatttgattggacgcataaaaatttgattggacgcataaaaatttgatgggacgcataaaagtcgattggacgcataaactgaacttgagccaaaaaagttcaaaaaatgtgttatttcgaaaaaaagcgaaattttcgaaaatttttgaactttccagtcgagtctgggttcggaattggtctaaatagatgccggattcgtgatcagtaacaccaaaataatgcatacctacctatatgcaggcacaacttcacaataccagtggtcgcagtagcagcaatggggacagtgcatttgctcgccgtatccagcaacattttcagccgggcgacggtgcgcagcgtttgtacaaaatggtccagcagccatttcgggtcaaattcgggtaagggaccattaattacataaaaagggcccggggatgcgcaactgcatttttgaaacattgtgaaacatttatttttttaagaaatggcgaagttgagcaacaacgtgccggttcttctgccattcctccattaacaccgtttttcaaaggttttatgcaaacataattgtgttaattgtaagaagggaggagaaggaaaaaaacgccccagtaaaaaaatttttttttaaggatagaaaacctgaaatatcattgaaataatacttgctaaatttaaaaaaacccctaaaaatttttttgattttgtttccttgaattttgattaaaaacgattttgaattatgtaacgaaaattttgaatttttttttaattttctaattttgataaattattttatggaactttataatatcaatatgttttcttgtagatgcacacccgcttttttgcaatgactctcccagacccaagcccatcacccaatcagccggcacacaaacgttcgcttttcgttattcatttttttttatctgcggaaattttgtttttttcccataatatggcaacctctactanataaaagggtttttacttttt

SEQ ID NO: 24392 - DNA, 1099 bp, Heterodera glycines
ctcgcgtcgcttggaccaacgttttcaaggcgactcctccaaaatctgaaagaaaatgaattctggtttaaatggtcttctccaaaaatttaaggccgagaaaagtcactcaaattagttttattaattaagcaatgtaattacgaagattaaagaccattttagaagaaaaattaaacagctgactttcaagtaatgataaatcgccaatgatttaccaaaatgggacggacccaaaccccaaaaacctcgtcatcctcctggtcgtccgggtcacagaacattcccgccccaccaccgccttcggcagcagtgggcgctgccggtgtgccgggccgaggcgtcggttcgggcggttttttgggcggcggtttgcccgaaccgtcaccgtccgatgccgtcgtcgttccaccgccctcccccgtcgcggtgccattggtcgccgctccaccgctgtcgctgctcccgcgttcgaccgccatcattcgcttttgttgctgttgccttgcactgctgcccgtgagaatgggataaaatatagtcacaagctaaaatatagaaagatatagaattatggacataaatcgcaatatggaaaaatatgtaaaatatggatatagaaatcaaatctagaagcttctaatgaagctaaaacatgtttttcctgcgtttaaggccatcgacaatccaggaaatattgatttttttcgtcataaagaatggccttctttttttaaaaaaaatccacatttaccaagagacaatatgtatagttttcgaaaggcaaagggtgacgcacaagccgcgcgaaaaagtccgcggcgaaaaaactccgcggcgaaccgaacggttccctaaaattatatgggaatccctactatgtaatttgggtccgttttttataccaatttttttttggtttaaaaagtcctgaaaacaggtaccggggggttttctaggttgctaagagagggatagaaagagagagagagagagaaagagagagagagtgaaagtgaatgataggtgtctgacagagaggatagaaaaaggaagagagagagtgagaaaagggaaaagaaagggaatggattggaat

SEQ ID NO: 24393 - DNA, 1342 bp, Heterodera glycines
ccaaaatttccctttttcaattaaaaaaaataatttttccattagggcgccgaagttaaacttggctcaagcgtgcccgatttgggccccaaatttgcacaatcggacagtgactacaaagcggaacggagcgcggaacatttccgcatgcaaatcattgagccaaaagtgatttcacatgcgcacattccgggtgagtgaaattattgaaactccgacatagccagggggggcctaacctaaaaaatccaattttaagggaaaattgattaattttcaaaatttaaaaaaaggccgtgatcaagagggcgcctctcacttttttccccagacctgtcgccttctacaattgtcatctcatatttatgttttacaaaataaattctttacagaaaatgtcatccattgcacctcatcctttttaatgaattactttttattcaaactaaaatttaattactcataatttttaccctgtaattggaaaaaaatcatcaaaaattattttatgttttttgcttcctattctgttaataaatttaaaaaattttgtttttttttcatccccaccatcaaaaaaattttttttagacaaatacatataaattaaggaccagttcatacatgtgcgccggaggttacttttcctttttgtgaccccctaaaaatatttttgtttttcgagggaaatgttttgagatgaacatgaatatgatgttcgtttttatctcttattcatgttacatgagttacgtaaaattttttgacaagcaatcggtaattgtgtgttttgtccccctccccccccccgccctccatttttcgaaaaaataacaaaaatttaaaaagtcgtgtaaaacgactttttgtgtgttttcgaggtcgctgataatgaatctgacatccatttctattaattccgaaccccgaacgcgagttagaacaaaaagttaaaactcaaatttcactattgctcggctctaataaaattgtttacaacaagaaaaactaatcagaatatattaaaacattaaaaacgaacgatcattctgatagatttttaaattttgaaaatgtgaattttcgactttttgttcgaattcgggtccgaggtccgcaattcgcccccctcgttcgttgtaagtcgtaaggggggcgcgtcgccggcaaacggggaaagaggaaaagttttaacaaattatggctctatccagtttatgagtcgggggcgtttgggccccagtttttgggcccccgcgtttgggcccccgtttttgggccctcgttttttgggcccccagggtcgtttgggcccccaagtacagaaaaatgaaaaatcaca

SEQ ID NO: 24394 - DNA, 1886 bp, Heterodera glycines
  unsure (1)..(1886): unsure at all n locations
atgccgaaaagtgcctggggatgcgcaagtgggcgatcgttcacggcagtgccttcagcggtgccccaattgacaatgtaaaaagatggctctgtgtccgcgcggtgccgcactctctgccacgccacgacgacccttccgtcgtcccttccccacaaatcgacgacattcgcacactttggcccattctctaaagcattttggcaaaaggaagaaacatttgctgtgaaaggtgttgcctttctgacagaaggaaaggtgcggaaacatttggcagttcaaatcgaccgaaattttcacgtcgaaagggtcaattcgaacgcatctgtccaattgaaagggcggcactttcggacaaaattatggcatttcacctcggcaacacccgcacttccatgtaaatgtggcactgtccccggagaacatccgcgggaatggccaaatgcattttggcacccccttggaccaattcgagtctcggtgagtccaaatggtcgtcaacagtttggcaccgcttcggataggctgtgggtggtgaatatccgtatacatcggcatcgtcatatcccgagggattctgtgacattggcattggcataactccaaaaagataaaacagtcactgacctgccaactgaccgaaaggtgtaccgtccgctggtcatccgactgcttgngcanggcaagctgaatctgagagcaaaagccgttatttaaatggccataaagataatgaatgcaaaattaaacccaaaccgatttttttggacaatgaaacccgggatttggggggaaatggttttggcccgaaaaaaatttaattgtgggggggatttttaacaaaaaggaaaaaaaaaaatttggggggaattttgaattccccgcggggatcccccccccccaaagagttttttgggggggaaaaaaaacccccccaaaagggggggggggatactttttaaaagggaaaaaaaaccaccccccccaaagggcaaaaggggggggcgaaaaaatttttggggggaggaaaaaaaaaaaaaaaaaaaaccccccccggggggggggccccccccccaaaaagggggggggggggggggttttttgtgccccccccccctccacaacaaacacccccccccccccccccttttttttttttttttttttttttttttttttttttttttttttctctcccccccccccccccgccccccccccccgccccccgccgcgcggcgggggaagaaaaagaaaaaaaaaaaaaaaaaaaaaaaaaaaaaaaaaatatccccccccctccccccccccccccttatttttctctccttttctttttttttttttttttttttctccccccccgccccccccccaaaaaaaaaaaaaaaaaaaaaaaaaaaattaaattttttttgtgtgggtggggggggggggggggcccccccccccccccaacaccaaaaaaaaaaaaaaaaaaatttttttgtggtggaagaaaaaaaaacccccccccccccccccccccccccaaaaaaaaaaaaaaaaaaaaaaaaaaaacaaaaaattttttttttttttttttttttttttttttgggggggggggggggggggggggggggggggcgggggggcggccggcccccccccccccccccccccccccccccccctttttttttttttttttttttttttttttttaatatataaataaaaaaaaaaaaaaaaaaaaaaaaaaaaaaaaaaaaaaaaaaacaagggggggggggggggtgttgtttttttttttttttctccccccccccccccccccccccccccccccccccccccccccgcccccccccccccaacacaaaaaaaaaaaaaaaaaaaaaaaaa

SEQ ID NO: 24395 - DNA, 1216 bp, Heterodera glycines
ccatttttcgcacttatcccgcgggtaatcgccgaggaattatttttttttttgggcggagggtcgtttttttataatttttttgtgaatggagaaaggaaatttcaccactaatggggtttttgaaaaaaattttcaaattaacattaaaattttcaacggaaatgagtttaaaaaagtttgtacgagctcaatgtacacacatcgtaatcagataaaacttcggtttttttactataaaaatataatttaattttctattttttggtacaaaagctcagtctgattgataccttttgaattttcttgggttttttttttaatttgaattcaattaattctttaaatttatttaatggcaaaaaagcgcaattaaaaaaattgttttttttcttcagttgaacaaaagcacttggagttggtgccgcatgagctgagcgagcaagaattttggacccgattcttccagtcccattatttccatcggcagcgcaacactccggcggatgtgccgagcacgtcaaaggcagccggcagcggcacaacgacaacggcactggacgacccatttgctgactgtgccaaaatggacgagaaaggtaaatggcacaacacaagcacaacctctgggtgatgagggtttgcgggtttaaaacaaaaaaaaaatttctctcgcaatcaggaaatttcgatgatcataccatcattatacatgaaagaaaaacacaagaagggggtcgactctcctccctccccctcttataaattagtcccaaaaattaacaacaaaaaaaaaaatccacgccgcagaaaaggcggttttaaaagcaaaaaaaaaaaaagtcgatttacatggccaaacccaacccttcgttcgcaaaagactttttttatacccttttcaaattcatattaattttttttaatcaaaattaataaatttaccaatgttttttttcccatcaaaaggtgtcgaaaattgatacggagtaaaattttgttcaatcaaaattctctggagaaaacaaaaattttttacatgactccaaactgctcaaagcagtggtcgttggatttagggatttgggagaaagtttttttcatccaaattttcgggttttaattttttcccctgctgggaccgtcctttggttaatcgaaggacgacttttcagatatggccaatctcattgccaagggacaacggacactcaaa

SEQ ID NO: 24396 - DNA, 1135 bp, Heterodera glycines
ctcgggttccaatgctgcacgtgcgccacgcatgcccattccaactgctcacgggtgccacgcaagcccattcgccaagccctcgggtccaactgagcacgggtgccacgcattcccattcgccaagccctcgggttccaactgctcacggacgccacgcatgcccattcgccaagccctcgggttccagctgctcacgggtgccacgcatgcccattccaactgctcacgggtgccacgcatgcccattcgccaagccctcgggttccaatgctgcacgtgcgccacgcatgcccattccaactgctcacgggtgccacgcattcccattcgccaagccctcgggttccaactgctcacggacgccacgcatgcccattcgccaagccctcgggttccaactgagcacgggtgccacgcatgcccattcgccaagccctcgggttccaactgttcacgggtgccacgcatgcccattcgccaagccctcgggttccgactgctcacgggtgccacgcatgcccattcgccaagccctcgggttccaactgttcacgggtgccacgcatgcccattcgccaagccctcgggttccaactgctcacgggtgccacgcatgcccattcgccaagccctcgggttccaactgctcacgggtgccacgcatgcccattcgccaagccctcgggttccaactgctcacgggtgccacgcatgcccattccaactgctcacgggtgccacgcatgcccattcgccaagccctcgggttccaactgttcacgggtgccacgcatgcccattcgccaagccctcgggttccaactgttcacgggtgccacgcatgcccattcgccaagccctcgggttccaactgttcacgggtgccacgcatgcccattcgccaagccctcgggttccaactgctcacgggtgccacgcatgcccattcgccaagccctcgggttccaactgctcacgggtgccacgcatgcccattccaactgctcacgggtgccacgcatgcgggttccaactgctcacggacgccacgcatgcccattcgccaagccctcgggttcaactgttcacgggtgccacgcatgcccattcgccaagccctcgggttccaact

SEQ ID NO: 24397 - DNA, 1255 bp, Heterodera glycines
aactctacctatacccaattgggtaattgaacaagagaattaataatgttttgtcaaaaatgttgaaaaatgtacatataaatgaaaatgaaaccaaaaaaaaaaaaaaacaatgtatggacatgccgcacatcttttcttcctctctcgactcttcttttcattccctctcctctctctctcactcttttctctctcttcttttcactttctctctctgtctcctcttttggctttctctctctgctcttctctctctcctcatttttttctctcaatttatcttttcttctcctctcctctctcctcttatttctctctctctcctcttgtctctttctctatctgctcttttctatctctctctctcccctcactcactctcctcttttctcgttctctctctcctcttttcactttctttctctgctcttctctctctctctcctcttttctctctctccaactctttctctctcctctattctctctctgtccttttctctctctctctcctcttctttctctatctctatcatcttttctctctccaccacactctctctctcatctctcctctttctcctcttctttctctctctctcctcttctctctttctctctctctctcttctctctctctctctctcccctccctctcgctcctcttttctctctctcagtctcatcttttctctctctctctctcatttctcctgtttctctaataattttctctctccttcactctccacactttgctcttaactatatccctctctctcttcttcactctttcctacaacatatttttttcctggcttctccatgctctaaatagtacgaaaaacactttcttttttgtgtttgcgtataaaaatcgggacttttatttgcatatttttgcatatttcgagatttttgtttatatttgcatattttggctttttctgcatatttcgtgcatattttgccattttttgtgcatattttccgattttttgcatattttgccatttttcgtaaaatattttccgttttgaatatcccttaagtaaattttggcagacaataggatgagctttagtaccgaaaatcttgagaaatttttgattttcaattgcaaaaacaaccgatatgaggaaaattttttaaatttatttgcacccctaattttcaagtttttttgtgcatatttggtgcatatttcacgactttatttgcatatttatgcgcatattttggccattttccg

SEQ ID NO: 24398 - DNA, 1246 bp, Heterodera glycines
attatggcctggaattgagactaaataggaatttctcgtaacgagacacagaatttcgggttttatgtagcctggaatcgggactaagaaagcggaatttccgactgaggtcccgaaattgggatcaagatgagaaatttcttgtaacgagactcagaagcgggatcaaaaatgatgaaaaaaatatttcggattgagtgtcaggggcctggatcaaaaaaaaacgaagggattttcctaaaaatggacggagtctcggatgaattattcgaatcataaatcgggatttgaactatagaacttctgttgttgtttgggactagattcaggaattttgaatcaaaaaaatgaacaaataatgtaaaaaataaatacaaaattttatgccaaatccggtattttgtgccaattttttttttcgtgccaaagggtccacctacggggccgcctggcgtccggccaccccgttctacgcgtacgctcccccgccaccgcccaactggccggaaccgatgcgcatggcggccgcgccgtgggcagcgggcggcccaattcggaaagagcggcgggtaggccaaaaaataataaaattttaactgggccaaaattattttggcaaaatttggtggcacaggacaaaccatttgacaacaacgacggagaggcggcggcgactgctgcggcactgacagatgaagaacagcgcaaaattgtgcaggtgggcaatttttcggggagcaattcgtcccccgccgatctccctctcgaaattttttaaataaaattttcaaacataaattttaagaacaaaaaatttagaaatttttttttcatagaataattcgtttttttttttttgaaaaatatttcagcaattttttgagcaatttcttcataattaaaaacaaagaattgctctaaaattattgtattagtattcttgaaaaattttctaagttttttttctgcatgatatggatccaaggaaaattaaactttgatgggtcttttttgtaaaaaattacattttattttattttcttgagttaaaatgcctcaaaatttcagtgaaaatctcttttaaaatggtcaaaatttctatttttcctccgacggcgcctatcggcactgtcgggccccaaaaccttattttttcataaaaatggggtcaaaatctcaaaagtggtcattttttggtgaaattctgttaacaaatttgattttaattgaaaaaatttttccggtg

SEQ ID NO: 24399 - DNA, 1437 bp, Heterodera glycines
aaaggtgtacagaaagagaaaaagagcagatgggtccccctagatgcttgtaaaatttataggatatcccaatcgggaccggattcatgaatctcagcttgtataaaagcgatcacatttttcattttgttgtaataaattcaaatatgtcaaacagtttctttgtgtttttgccgagcaatgtaacggattatcccgacaatcagcccaacaaatttcgggtccgcctcccgaagcctttacattttaatggctcatgggtctgtgggctgcatagtattagttacccctactcatggtcaaccattggcacattggacgaccaatggattgacattcacttcaccgatcgccgtgctagtgatgaggacagacagcgggtgatcagagttccagtgcccagggcatcgcatagtaaggttgaacagctcagagattttttgactgtcactttgcgaaatcatagtggtgcaaagttgttgccactcccccgtgaggaggaagagaatcgcaatcggacaaaacctctcggttcgccaccaccgttgaagagagagaaaagagctgcgccagtaattaatgagagcggaaaacagcttgactcccccttattgtacgatggaaatgatcaaggtgggattgacgagtctccgcctcatcatgaagaagaagaagaagggacaattcaggagtctccgcctcatcatgaagaagaagaagaagaaggggcgattcaggagtcaccgccccattatgaggaaacaccaaaagaaactgtgaaaacgcccgtcacaccaaaagtgccgacaccaccgcctgtcataagccctactaagccatcaatagtaaaaacgccagctcctccctctgatacaacaacatcgcctcccacaactgttaagccaccagtaaccgtccctcctccaatcacaaaacacaataacgccgtccgctcctccagccacaaagccaaagaccgagcctccaccaatcgtgcaaccaacaactacccctcctccaagcacaaaaccaacaaccgtcccaccgccgaccgaaaagccaaagaccgtccctccaccagccgtacaggcaacaaccacccctcctccaagtacacaaccaacaaccatcccttccccgaccgcaaagccaacaacaccgatccctccactgccagcaataaaaaaagttcctagcccgtctgttaagccgacaattccggcaccaccggcgcaactaaaaagctcgacactgtcaccaaaatcaaaagcacccattttgccagctccagtttctctttccgctaaaacgagtcctaagtctcaatcgtcgccatctcctccggcagaatctccaacgcattttgaagaagaaacaacacctgtaaagcctcaggggggggccgacaattacagcgcctccagcacagctaaaaag

SEQ ID NO: 24400 - DNA, 1492 bp, Heterodera glycines
acaaatcgcattaaatttcataaaatttctcgcagatatcgataggcaccaggtatggcacggaaagacttccggtttccgacatttttggggtcggaattccgacttccgaaatttttgatgaaaagtcggaaatttttttaatttttttttttcaaaaaactagtaagttttgtacaatttctgttaataaattgaactgaaatttttaaaaatttcccggcggcgcctatcggcaccgccggaccctaaaaatccctatttttcttgcaaaatttgctcaaaatcgcaaaattttgtaattttttggacaaaatctgttaaaaaattttcccggcggcgcctatcggcaccgctgtaccctcctctaagttcccaaaaagtttttgaaaaaatagcgctgtaaaaaacgtgtaaatagtcactccttttcccaaaaatgttctaaaataatgaaaaatgacaaaaaagattttgataaataattgaataatttttcaagcgaatatactaaaaacatttgtgaaataccttttacttggttaagaattaaaaaatttagcctattaaaatatttagaaattttttttattatattgtatattttttgaaaaatttccgatttccgacgtttttggggtcggaaatccgatttccgacacttccgaaaatttttggggcctcggaatgccatccctgataaggaccgccggaccccctgtttctagtttttgaaaaattgcaccgcaaaaaagtggttttgaaaagaaaaaaatagtcaaatttatgaaccgttaataatttgatttccgatcaactttttaccgtcggatccaatcggaaaatcttagtcgaccaatcagccccttttaatgcatcccgccagcccttaaaaatttatttttcagcatttttttatttttggaaattctttgaatttaattgaaattttttcgattttccaaaatcccgcaatcccgcacgggatcccgcaaattttaattgcgggatttgcgggattaatcccgcgggatcccgtcccgcaaaaaattttgagttccagtcccgcagcgggatccgcaaatttgaaatttccggtctctatgtactacctgagttttcaatgaatttttaaaaatttagaggacagagttttcatttatgttttgggacacgggactgaatttgcgtgatttagttggaacatttcgccattttttttgtatcataaaatttgaattttcaagatcacggtaggggggtccactgcgtttcggcgctcgcgtttcggcgccagctcgtttcggcgctcgcgtttcggcgccaaaaaaaaattataaaaattcagatacttggttaaaatctacaaacaaaaaaaaaactttttttagttaatcaatttcatcgaatatggcttcaaaaattgaaacaaaaaaacaacaagtgaagcttcctcacgaaggacatctttacacattcgacaaaatgagtg

SEQ ID NO: 24401 - DNA, 1293 bp, Heterodera glycines
  unsure (1)..(1293): unsure at all n locations
aaaaattttgggcctgagcgggacatttgagtcccgggcgtataactcgtcagggatcgggtttagccaaaaattgccttgaacattttntgtagagcatttnaagctctatcgaatggtgtgccatgtgtcggaaaatttcaaaaattttcgagctaggccccctagaaattttcaaaaattttttttagggcgagaagtggggtgaaaaatatttttctggggtaaaataaggtgctgagcacgaatatgatgtttgttttttgtttgggaaattttggaattttttaaatttttttgaaaatcggtcactttttttgccctctggattttgggttaaagtttgaaaattcataactcagtttagatcaggtctattttaatgtatagaggcttaaaaaatggagtaaaaatcggagaaatttttgccctttatttggtatttctatcaagaatataaaaaaagttattccagaaattctggaaattttcgaattttcagaaaaaaattcactactcggttctgaaaagatattttgtaaaataaaaatagcccaaaaatccgcaattttttgctctatttgataaattttatttcatgtttttatcattttttagtaaaaagttataaaaataaaagtgattttggaattcgggaccataggggggtgcacatggttttcgagtggggaaattttttcgcgcccaaaaacttccagaaatatgtctttagaggttatttaggacgctgatcacgaatctgaaatcagatttcgtttacctcttcgggaaagcctcagaatccctgcgtatagtgatgaatcctatgatggacaccatccccataccgtttgctagagggatggccaccatccccataccgtttgctaggaggatggacaacatcttaagattgactaaagggatggctaccattttgtgtgaggggggggcagtactattagagtgtcgagagactgtgttaaagagagaaacagttagagatactagagtaatagagaaatagtgtagagattactctaactgtcggacctattattcaacccatattctattagagtgtcgagagactgtgttaaagagagaaacagttagagatactagagtaatagagaaatagtgtagagattactctaactgtctcaatcttaaagggatggatcaatccctttaggccatccctttagtcaatcataaagggatggatccatatagtaaaaaagacgtatggtaaatgtttaagggattgatccatccctttaggcatccctt

SEQ ID NO: 24402 - DNA, 1672 bp, Heterodera glycines
ccaccaccaccaccaccaccaacatcagcagctcaaatagacccatcgcgtttgattcacacgctcgacccaccaaaaatattttttagaactcctccagctaatcaaaaccctctgacatatgtgcccaattcagtgtttattctgtatgaaaccaatatggaacgattcaaggtggtcttcaatgaggagatcatcagccatttgtctttctcaccgcagctaggctatgtgcttggctttgaaaaccctcagcatgtggtgtcaaatgaagttgccaaatacgggtttgatctacgaggtggcatatcaagttttgcagtctactcaaaaggactaactgaaaatatgataattggcaattcattgagctccttgctccgggttgtgtctatcagcggtgctatccccggggagtataatgagaagatttacgactcgccaatatttgcgcgagtgttgccacgtgagatcaacgagattgagattgaactgcgcacaatggacaaaggtcgtctcgtgccatttgcctatgggacaacgatggccgtgttgatatttaagaaagtgataaatttttgatttcattcattttgtgttttatttgttatacgttaataaaaatggttcatattgtgtttgacccaagcattgcgcagtatgacgagtatgtgcagtacggtagcggattagaaaaggacgattttgactacttcagggggtcaagcccctttcagagggggtacggtattcaacgaggggcgggcgttggagatgtgtttcgtggactgtggcgttttttcctacccattcttcgccgcgttggcaccacggtagggtcggaggcgctaagcactgggcaacgcgtgctggagcgagtcgggaatgagggggtgccatttaaagaggcgcttgtcagtgagggaaagcgaggaattgcaaaggaggactaccaaaacagtttggaagcggaaaacggagtataaaaagaaagagaacacatctacccagtcatcagacactaattggacgaccttttgtaaaacaggcaaaaaagcgtattcgatcggacgcttttggactttattaattaaataaatggctttccataaaatcgacaacgactcggtgaactcaatcaccaatgcattggactttttccgtataccccctacaaatgtgagcatttcatcatcaaaagtgtttgagcttctgcctagcaatccgcttacagacacaccttaccatttcaaacttcattccagccaaaattatattgatctgtccaaatgttatttgctcaccgagtttcgaatccgtaaggaaaacgttaatggtcaacttgttaacctaactgttgacgatgcggatattgcgccaattcaaatgatcggacaaaccttcatccgcaacataaaaatgagtatcaatgggcgtgaaatttttaatgccaatgccctaatggcctacaaaacatatttctcacatgaactctcttattcaacgacagcaaaagactcccatttaaatgctgctgggtattacagggacacgggtgaagtgcttgaaacaggaaatggatgcatagcgcgacgtaatttgtttgctggtagtaacgttgctcaattcatcgccgaaaattgacaccgacctattcaaccaaccgctatac

SEQ ID NO: 24403 - DNA, 2116 bp, Heterodera glycines
  unsure (1)..(2116): unsure at all n locations
tttaaaattattttccgtttagcaaagccttctccaagcaccgccgccttatcatccgaccggcgcctatttaatggacgatttccatcagaatcatcatctccatcatcatccattgatcattcccgaattccaacaacaacaacaacaaaggtagagagagagaatacggcaatatttaaagattttaagttttaaatttttgttaaaatttcaaattggcactttatttcgtcggcaccgacgccagactctttgatcattagtgaaaattccttaaaagcatatccggcgcataaaaaaagggctgtcacctcttgagggcgatgatagcctttcgaattgttggcatttctctctgtcgaaaatgccaaaaattggatttttgggttaaataaaattattaaataaaattatttaccccccccccccctctccaccagtaattcaagcagtacaacaattggtgaacaacttgggcaacaccagcaataatgccaacaatttgttgatgccgatgatggcaacaaaatattgcacagaatcagcggacgccgatgccatcgccgcaacgccgtcgtcggcggcacaaattggcaaaatggacaaggagttggcaacaaatggcagcacaagaccattaaccgcaacagtaattggaccaacacaacagctccaacaacaaaaatgctgatgccattgacaattgtaaggggaaaggccagaaaattcaaaaatgccattgtcagagtaaaaatggtggaaaaatgccatggtttgggtaaaatgacatttaaatgacaaatagaatgaggtaaaatgccattgccggagttaaaaatcgtgccaaaatacaattatcggggtaaatgatagaaaaacgccattttttcgtctcgagtctctggaagaaaaactacaaaatgccattgccagtgaggaaatccttcggcaatgccaatagcccccgggaaaattgtaaaatttagcccttttttgtttcaaaaactaacaaatttaggagactgatcattatcaacatccgatgcggaatgaacatgattgttgcagtgagatggaaatggcaaattcagtgtgaagaaatggaagagaaaaaaaatcaaattttccgcgttaattattatttttttttttttgtttgacacaccaccgtattaaattgacccaattttccataaaataaaataaaaatttaaaacgaaataatttatacaaattgatcaccaatttgttggcacaaacaaacacatacaaaataatcaaatcatcaattgaacacattatattaaagcacaaatatttggcaatttcttttgttttttgttgggtcagacattttcaggaaaattcaatttatttttcccgcaaaaattaaaatttttctcaattaaatttttggcgaagttcgcccactttgcccggctcggcgccaccaatttttttcgaattcgaaccaccaccaccagcagcgttctcattattcacagctgttgccgtcgtcggcgcaaaagcattgaaacgggcgatcagaccggccactttttctgaaatttggccaaattaatttatttaaaaatttttttcggcattttttgtgccaacttttttcgcgcatttggccaagaaaggcttcgtcagcagcagcattgggtgctggactcttcactttctccgccgactgaaaaggctgaacggtgtgaatttgtaacattgctggacggggacgaccctttgcttcgaggggggcctgaaaatttttgaaaatttttttttaaattttccgaaaaattttgtgcctctgccgtcgtcattgtctcctgctgttcaatcagtttgagtttttcctgatcacaacattcatcatcatcagctgcattcccattctgctgatgatcatgacgatcaaggcaaaagtcagcgcgacaattctttttgaaaatgaaaaaaataaataatttttttttcaaattttgattanaatccgtcaatcgaaaaaaacccacctcatttgactntccacactttgcaagtcgtcctcctgaaaatttttgttgattttaatttaatttacacatttttaaattaaaaaatatat

SEQ ID NO: 24404 - DNA, 1586 bp, Heterodera glycines
tcgaggtcagttagtcagtaaggtcttcagtcatcattcccactaatagccctccccctaagccgaccgatgggacggagcctttccgcgggggctacggcccagtctaacaatcagttggtgaacggtcggagatcgatctccggggttggaacgaagcaggccgggtcccgaaacccggcacggcttaactatactaagacagttagaaatttattaaaacgagggtccgacaatggacaagttgattttaaggcgtcgctgattaatttttaaatttattgaatttttcctatgaaactttacaaaaatgcgaaggtataaaatccccaaaaatagttagatcataaaatcctactaacaattgtccatatgccatattaaaggttcgaacattcaattctcacaaattaattgccgaagacgaaagcgtgccaatgtccgtcaaatattccaaggcgcattccaacgaattcggcagcatggcgctcaaattgagtgctttattcttttctttatcgcatagatgatgattgctggtgtgatattttcattcttaaactgtcattacaagcatcagatttaattccatggacaattctcctattatatttcattgcctttgtgttatttggcaatgaattcgtcaaaaagtgcaccgcctgctttcacaacaataataaccaaattcactcattcgaaatggcggagaatggtcccgctgctgctggtgctaatgggcagtaaattaatgccaattagcgaaaggaaacggacgaatttgtgatactgtatcctttatatcgttgttgtgtagtgaagccaatgttagtgactgtgtttttcataactatttctttaataatagaactaagtaaaaagaacaccgcaaaagaaataccttacctaataaagttaatacaattttaaaagaaaaatcacagttttgtgctgattttttttaatagttttttcggtaaaacacgtgtagccatgaaaattccatatttcaaaaagcccgttcagagttcaaacatttcaattatttaatttatcattttcaaatgtaacataaatattttttaaaaacatcattaaaaatcatagaaaaagatggcattgtgaagaaacggggaaaacaggaattggcatctccttaaaagttatacaataataaatgaccaatgtcgtctaaaaaataaaaaacacacccctaagaatggcatattcgtggaattaaaggcaaaattagaaatcttattttttggcctttattcttattttgaaaattttgaaatagaaaccctggatttagacaaaaacacccataaaaattgactattctggcataatttataatccttaaatttggtcatttttagacaatatctatgcaattataccaaaaaagaatcattcaaaaaaaaaatttttgtgagattttttggagctaattaaaaacaaacccccgcccccgtccccgggggcgagaaatttctcacccccgcccccgcccccgcgactctgacccccgcaatcccacgcccccgcgaaaagccacccccgcccacggggtccgaacccta

SEQ ID NO: 24405 - DNA, 515 bp, Heterodera glycines
  unsure (1)..(515): unsure at all n locations
ttaagcctaaaaattttttggcatatttaaaaagcaattaaaaaaaaattaaaatttaataattttcctgcaccgaaagtactcacaaaaacctcttcgcggcctcgaggagggccttcgcccccaaaaaaaaananaaaaaaaaaaaaaaaaaaaaaaaaaannnaaaaaaaaaaaaaaaaaaaaaaaanaaaaaaaaaaaaaaaaaaaaaanaaaaaaaanaaaaaaaaaaaaaaaaaaaaaaacaaaaaaaaaaaatatatattaaaataaaaaaataaaataataaaaaaaattaaaaaaaaaataaaataaaaaaaaaaaaataaataaattataaananaaaaaaaaaaaaaaaaaaaaaaaaaaaaaaaaaaaaaaaaataaaaaaaaataaaataaaaaaaaaaaataaaaaaaaaaaaaaaaaaaaaaaaaaaaaaaaaaaaaaaaaaaaaaaaaaaaaaaaaaaaaaaaaaaaaaaaaaaaaaaaaaaaaaaaaaaaaaataaaa

SEQ ID NO: 24406 - DNA, 1587 bp, Heterodera glycines
aaaaaaaaggtcgtcgcccggggggaggtgcccccccccaagccaaaatcctgggaccgtccctgtttgggggccggcggtgccgataggcatcgccgggggaacttttttatgaattttgttagaaattagcaaaattttccagaaatttccctcttttgggcgaaaatacgcccccaaatcagaacatatcttagaaatacgaatataaagaaaccatgtattaatcagataaaaataattaaaaagaaaacgtcaaccggtattgaacccataataaaaaatactgttagttgtgaagcaccaaccactaaaccaaaatatattgggaattcaaagcaaaatttactttatttcataaaaatttgtcaaagatgattaaaaaattcaaaattgtataaatttttgcattttatcccacaaatatgccattcttagggggtgtattttcgcccccgcgggggcgaaggtcgcgggggcgggggttagagtcgcgtggacgggggtgaggccaaaaaacctgtcccgtccccggcgggggtgacgggggcggggtccgaaccctagttataacttatcttatcagctatcacttaacaaacaaaaatcgaaataaaaggtttgaattttttagcttcgtgaatttgttgacggagctgacttcatggagaggattcagcagattatccgagaagaggtgttcgctcaattggccttcttttctttaaaaataattcaggtgaaagcattgcaagtgaaagcgaaacgagtggacaagcgcgaaattgaggaggaaagggcgagcccggccttctcttttagactgcacatgaattttacaaagttattcggcttttgatcactctcgcggagatattatgaaattttaaaattcattgatgtttatttctcttattcatgcgtaaagcttttgcgattgactctttgtcttaacattcattcctcggcacattaagtgccttaaacataatgactaattatgggaagtcagtgaaaacatatgaatggggtgggtgggacacattcgtaaattgaaatattgaaaagtcccaaattccttggaatttcttcaaatctgctacgcaactgatacaaatttcatgctcactttttttcttccaatacttaacatgaattacaatgcaattaattttatttatttaaaagaaaatgatgcctgctaaatgatgaatgaaaaatgcatttgtttgggagattgctttgtgagtattgtttttcatatccgtgtttgttatttttgcgtgacaaaatcaattttgaactgtttcaaacggaaataaggttcaatttctgatggaaatcctcggcttcagggaatgctccttccatttgtggcttctcacactcaatttcctcttcgaacatttttggcttttcgtttgatgtcgcgtgcgtcaaattgtctaattttccgagaacaacacgcataacatccttctttctgctggtgttaatttcagaatttgaaaaagaatgaacagacgacgatgaaggtgcgttttctgatgaggaagaattcgtgcattttttattgttttggttcac

SEQ ID NO: 24407 - DNA, 2019 bp, Heterodera glycines
ttaattttctgtcacagcgttttcaaaacgatcagctgcgcacaaactgaattccatcgtcaaatcggcggagtgcactcgccgacggacatttgccgtaattaaaatttaatttaaaataaaaaatagaacttttttaaattaatgaacttcaattaaaaaaacgaaccaaattttgctgttttttgtaaatatttctttttttcatttcactattcaaatcttttagcaagttcagccaagtgtttaataaatttctcaaaaatcatacaaatttctgtgattggcaaataaaaggtccacaaaaaaatgtgtccacaaaatttgaattaaatgttttttttgaattttcaaataaatttattttttcatttttccaggcaatttttgttgcgattttctgatgaacgtggaaggcccaaccaaagacacagagtgttcccgaaaatgtgccaaagcatcgtttgccattggcacatccatcaaaaaacagctgagggacttgcggaggatgggctgtgccgcggcaaaaacacaatttgccgtaagtttcttagttctttttaattaaatttaatctaatttaattattttttattaaaatttaaaattttcttaatttttaaggcattggaggattgcctaaagggcccagcacagtatttcaacgacataagccaaagaagcagcagcagaagtgccaacgacgacgacgagcaggacgaggaaatggcaaaaatgcgggcactgaacgaagtgtgccggcaaagggcggaggagcaaaattcgtaaaaaaaaattttgaaaaatttattaattttcggtccctaattttaatattaaaaattttcaatgtacaaatattttatgtgcgttaattgtactatttttttgttttgtttttaatttcttctatttatattttgtttatatttatttcgatttattaaatgcaataattaatcaattaaatttttctgcaaatttatgtcagcaagcctttataaggattaattattaatttgcgtccaaatttctccaaatatttgttccctaaaaagtggccagaatttatccattagtcaaaattgccaaaatttcccaccacattttcgtttagcaacaagtaacaaaggcttatctaagaaagttagaaaactaaaaaatttcagttttgaagaaaaaaaaaatttcgtgaagcgggaaaaaatgcggggggagggcaacatggctaatgccacgtcgagactgaaaatttcccaatcgagaccgaaccgccggcacttaatcggacagcttaccatcaacggcactgtttccatgtgccaaatttgttcgcctccctccgccacaattcatttggccaattcttggccaaagttaaaattgtgggggggcgggggcgccctcgtcgtccatcttaattttttgtccccacttttgggctgattgtacagcgaaattgccccccggggaaattaaaggaaggcaacgcgccgccttcctgttgatgattaatcaccacaaattttacctttgcctccgagggtaatgggaaaatttttcttccgctcggtccccacattttcaaaattcaccgtttttgttttttgaattcacattttttggcattttgtccctccctcgtgcgcctttcaaatcccccgggggcaggggggggggcacattggcattgcaatatgccaatgatgtttctgctgctgctgtttgtcaatttttgtcatcattgtctcgcttctttcttctgtctctatggcttatatcattcctccccgcctcgacccatcaattttaaatgaatggcattttctgcacttttctctttccctttttcgctctcatcactcactctttccgccactatttctctcctacttcctctcgctctctttttactatctctcactctctctctccctttcactctctctctctctctctctctctcccttccctatccaccaatttgttgccctttgtttctttttcatactccct

SEQ ID NO: 24408 - DNA, 985 bp, Heterodera glycines
tatttttgtcacttcgtcctaaaaaataatttacggtaatctgaatttttagaataaaaattaactattaaaatattaaatcggttcttttcatgaacattaaaataaattcatttgaaattttaattaaaaaaataaaaagtccattatatcaaataataattatatatatattaaatatgtaatgtttataaggagcacagtattcgaagaaatgtatttgggagttccagtcaagttaggttatgtagcagggatgggcctaggtttcgcttttcgcatttcgcctttcgaattattcgcattttttggcgtttcgcatttcgctttttggtgcgaaatgcgaaatttccacccctaaaaatgaatatatttgaaaatttaaatttttaaaacgaatgcttcagtttattcttattttgggctgcaggattaataattaccttttttgctaacttgctatagcctaatacgcacgaaaaacgagtttttaacttgatttgaagcttttatcttgaactttttggtgcatttttttgccttttttgcgattttggtgccttatgccgggcacgtaattttgatgccttttttggcctttatgacttttttgatgccttttagtatttttttgaaaaaaatagtaaattttttgaaaattttgtaacttttcctatcatatttacaatttccaaaaaaatttgcggcggcgcctatcggcaccgccggacccgcattttaacttaatttttgaaattttaaccccaaaatgggtagaatttgtcttttttgatctgagaaaaagattgaaccggaaaatgcagagattttgtttttttttgcatcacaacctcaaaagctattggtaaaatttttgaaaaaaatttcgcatttttggcttttcgcatttcgcttttttttcatttcgcatttttcagtttcgcaaatttcgctttttatttttcaatttggcccatccctgata

SEQ ID NO: 24409 - DNA, 2084 bp, Heterodera glycines
  unsure (1)..(2084): unsure at all n locations
aaacagtcgaaattcaaaagagcaatgcggccccatccctgaaccatgcccacaaaattgtcatcattagtgttaaatttgtctccacatttttctatcaatcacttcccaaaaaagaaacccttcccaaggacacacaatgaatgaattctctctatcgcaaaaactatacaaaaaggcctataaaattgtaagttttttcgggtgtgggaattggatcgcgcatatgagaagatgatgatgatgatgatggctggtgaagaaaattcttctttgcctccgaggaatgttttaaatgtgcaatttttttttggtgtatggatttaataagagttttatttttcaaattccattttttaatgattggtaaaataaattttaaattacaaaaataaatttgtgtttaattttcaaattttactttatttaaaattaataataataaattcgttattttcaatacgaacatcttttatttggtatataattttcattatataatttttaattttcccttgaataaatttttactaagtttctttcaagaatttttccaaaaatcactgaaaaattgtttaatttttttttgaaattttcctataataaattttctaaaaaatttttaatttttaactaattttatttatttttttctacctttattaaacaagcaaaaataacccatcttttcacacttttctgcacaaatacaatcgtaaaagttgaagcaacattacatattatgtgtcatgtcattattattatataattgcagcgccgaaagcattgcgcgtaatcgtcgcgcgcgcacgcgcgatttgtcacaccaccaaattccattttccaattttctattcaaatataatttgttcgaaaaaatcccaaaattttccatggtaatatggatctaggggatgattaagttatttctgagcaaaaaatcatcgaaatatataaacataaaatatgcgaaaaaatctcaaaaaatatcggaaaatttattcccgagagaaagagagtcgagagcgaggggatcagctcattttccctctgacaaaaatataaaactttaagttttctcaagttttttgagttttattcctgtaaaaacttaaaatatttcaaaaaaatttatttttaatttattttttgattatttttaatgtttttgtcaaaattcagatattttattaaatcatatggccaacattgtccctcatgatgaggttgatgaagaatatcatcgtgaaacgagcgaaaattcccggccaaattacacagcagtgatgacaattgggccanatgagacaaatgaggaggacaaaatgacgacaaatgatgtggacaaaaggacgacagatgagacggagaaggataaatgacgacaaatgatacggacaaaaggacgacagatgagacggaagagaacaaaatgatgacaaatgatacggacaaaaggacgaaaaatgatttggacaaaggaacgacagatgtatcggacaaaaagacgacagatgacatggaggaggacaaaatgacgaaaacgaaaaatggacgagacggcacttcaacaatttttgtgaatactatggagaacgatgagaagtcaccgtcatcatcatcatcaaattcttcatcgtcatcaaattaccaaaatatggatgctcatccggcaatggatgagaagcaagatgaggaggaggatgaagatgaattgccgtccccggcatcctcaaatgagaggagggacgacaatggaattttttgttcatccacgacgatgaagaacaacaacgaaacatcaccgccaacatcatcatcatcactggtgactgatcggaagaacatcagcatcccatcatccgcttcatcctcatcggcattggcactggtgaatgatgatgggcggaaaatgggggcacaattagtggtgccggcggtattggtgaaaactgcttcatcatcctcgtcttcatcctcgtcctcatccccatccgccgaagaatttgatgaggaacggaagagcaaaaataattttcttcttcaaatgccctccggcgacggggaagaaaagcagcagcaga

SEQ ID NO: 24410 - DNA, 2293 bp, Heterodera glycines
ctgttccagcggacggtgccgcaacaattttttacgtggtcaaaccgctccatttggaattgtccggcaccagtggacagtaccaaccccagcctgattacacgtttacggtggaagcgtacgattccacggaggacccaaggtgaatggtgtcggtgttgtgcgttacggtagatgctcggccggggccataaacatgagaaatttgatcactgatcacctgtgcttatttgaatagtgccgagataagcaaaagcctcatggtttatttgttggggttttgaagcacttgaaaatgccgagattctcgacctgctcggggtttgtcgtgaatggcacacggataaaacatgcaaaatgccaaggttttcttgggcaacaatggcatttgtgccgagttcgtcgggaatggaatggcatgatatagaaagttttttgaatatcccttggagtctcggttttttactcaagaaatttctcggattttttgcaggaccgcacgcgtgacggtcaatgtacgccttgcggacctgacggagcaagaggcggaacgcgagcgggaggaagcggtgcgcgagcgacaattggaccagcagcaccacaaccagcagtttgaggtgcaacaggacgagccgtccgctcaactggaagcggatgaggaggaggagcaggacagtgccgtggatgatcggcaccagagcagaatgtcaccacaacacacggcacaacgccaacggcacaacaattttgatcgggacagtgataacaacaggagggcacatgccgtgccaacattggcacttgatggcaccggggccaaacaacctttacaggtaaaaaaatcatggcatctaatgcattctaaaatgccatggcacaagattgccagatggtcagtacccatggtgtgccaactcatgaacagtgccatttggtgtgccaaagtgccaaaacatgactcatatgtccacattgaataattgaatccattatttttggcacgatcataggcatcatttattaacaaatgattggcatgccaataatgacaccttttgaaattttgtttaagtttggcaacaaatttggcgatctgctaccatccgatgatgacgaacggcaccagcaacaagcggttggcttggtgcgcttcagtgccgacaaatacacgttccgtgcgcgcggacctctcgcggaaggccaaaccattggcatggtgcatgccaaacgcatggacggcacggacgaggcatgttctgtgtattattactgtacataaagcttttacagtaccctgctccgattactgtacttgattttcacaaacgaagatttttcagttttaatttgttatttaaatttttatagtaaaatttccttttggacatgttgtaacaatttctgaattataacattagaaactgggatagaatgcaaaagatttttcaaatccaatcatttttattgaccattttttgtatccaaaggttcatttttggcacagctcatcattctcgagaccgtgtgccacttcattaaaacagtaatttttattttacccatttttcagattgaatttgccgtcgaggaaggcattgccggctttgtcggcgtcgacgccaacacgggacgcctttttgtcggcccatggcttttgcgtgaccgttttgaggaaatccgcttttcagtggctgcccaacatccgtccggacaagtgctggtaaaacatcattctcttacaataattcaaattgttctccaattgttttgctggcctttttcaactcccgccagtccacattttttaatcccggtttttttgggcggggggggggggggctaaaaatctccatttcgcgtactccataaaatttaaatcattttgatgtgccaccaattgattgcgggatcgcagtccgttttgcgggattaatcccccgcgggatgcaggacattgtcccgcaaaattttttaatccaaaatcccgcagcaagcgctgcaaaaaatcgtggattttttattattacaattctcatagaaaagaagataaaaccaattttttctcataaaccaaaataaaaattttcaatttttaagttttttttttactggaaaaatatttcattattaaatttttttcctcctcctgaaattacttgaaactctcgcccctgaattttcagtcttggcaaaaataagaatagacagttttccctctcacaaatcaaatcttggcattttgcatgtcgtcagaatgcatttcgccaattaaaattaataataatttatgtca

SEQ ID NO: 24411 - DNA, 819 bp, Heterodera glycines
ttgatctttgcacccgcgcaaattgatttacactttcaaatgtcagcacttcttttggccagcttttgctgttaaatgtgacaaatgaataagttggggagacaaagagcgaattgcgatggaaaagcgatgggattgtgcccacagcagcaagagaagaacactcgcatctcttccatacatttacattccatcccaattttccttccatttcctctgactattcttttgccattccattggcgtattgcgaaacgcgatacccacgggcatttttgtcgctaggtgcttaagtgggagtgggcgagaaaaaagtctcgtgtaggaaagggggaagccgccagagaatgagggactgtaatggtcgaagacgaaagaatttggcgtatttcaccgaaatttgaccctctcatcaaaatagcagcagaaatagaggcggcggaagaagcagtgaaattccatttggatattttaattgtttgatatttcgggattctttcaccgattgagaaaaggcaaatgaatgggtgggacagacggagggggggggggggggaagaaattgtaaatgtgtggccacgaaaggttcgggaaagaattgtggaggaagctaatgggtgtttgagaaggcaatgggcgggggaggagaagcagtacgtggaagaaagggaagcaagtggaagaagagcttatgttaagattggtccttttgctgttggtgatagtgagtcagtaagcaaatttgatgagtgagtgggaggaaggggagacgaggggaaaggaaagaggggaggggagggatggagagaagggagagga

SEQ ID NO: 24412 - DNA, 1367 bp, Heterodera glycines
attacatatttgatggcttttctgccgatccgtgctgaataggcgaggacggcgtgtggggagcggggggcacaaaacggacggagttggccaacacggaaaaaggaacagcggcagaaagggaggacgaagtgagcggcggatgagtgaaaagtttggactggtggctgtaggaaaaaaggcgggaaaaaaaaggggggggggatagagcaaagaacggaatgatcaaacgcagacagacaaaaagtgcaaccgatgatcaaataagagaaatacatgcaaacgttatacactcgcttacaaaatttgtataagaaatctcatttttgtgttcaacccattcacatttcccaagctttattcaaaaaaaaaaagaattcgaaaggcaccaacggatgaatgaagctccttttttgttcttctgttccaatttctttttctagagtatgtaattttccaaaatttaagtgccgcgggaggaacaaacaatatttaagcagatttttcttcaaaaatacaagcatctttatcgcagtttttgttgtgttagagcatccgcaaaaatgccaaggcttcgatcttacatatcccattttgtcaatgattaagccgtggcatcccacatgttgagttaaagtgcaggtcaacggaaatagagctacccgaaacatggccggccacctgataaaaattttgattggacgcataaaaattgaatagacgcataaaaatacccctaagaatgtaatacgctaaaatcgtagaaattttatttttttaatattttgtgcttaattgctatttgtgctttctaatgcttaatttagaaaagccttgatgcttaattaagtacttaattatcgttttttatctatatattaattttgcgctgtaactaatacatttaaaagtaaacaatttatcgaaacgaattccttttggaaaatagttcagtctttttttcttttcttttttgtttgttgtttacgtcttttttgtgttatgagcgagcacatatttcttcattattggaaaaatcgaggagagagaaacagaagagggagaaagagaaagaaagggagaagaggagagagagaaaagaggagagagagaaagaagaaaggagagagaggaagagagagaaaaagagaagagggagaaagaaagagaggagagaagggagagagagagagagaagaggagggagagaagaggagagagatagaaaagaggagagagagagagaagaggagagaaaggaagagagaaaaagagaagagggaggaagaaagagaggagagaagggagagagagagagagagaagagaagggagagaagaggagagagagagaaagaaaaaaggaga

SEQ ID NO: 24413 - DNA, 1173 bp, Heterodera glycines
ttagcacaaatcaaggcgagcgagggggggccactgctgagaagcgttaaaatcaacaaaagaaaattcaataatagtcgatggtaaaatgagggattaaataatggaaaggaattgaaatacataaattgagagatgaaaatgagaaaaaagcagtgggaattaaaatgaataaatttacaaagttacaggaaattgcatacggcttaaatattatgtaaaattgcttttaaattgtcgagtaattggcaaaacgattgaaaaagtcaaagaaaagaaaatggaggaaaaataatcaataaaaataagcttagaatgggaaacgggggcaaaaagggcggtaggggtcaactccgtctggccaactccgtctcagcaatgttcaaaaagctataacttttttctttgttggccaaacttcacaatcatggtatcattcgaaagccctagatgtttagaagatatttataagctatttctcagtgattaatcagctctcaaaaaagttgtcagttgaaaaccgcaaaaaaggcagaattttcgaagttttttatttctatctttttttatagttcgaaattttctgtaatttttagtaggctaatagagcctgtgaagagctttcgaatgatatcaagattgttttattcggtccataacttcaagagttatattgactcaaagttggctcagacggagttggccagacggagttggccagacggagttggccagacggagttggccagacggagttggccagacggagttggccagacggagttggccagacggagttggccagacggagttggcccgttcggagttggctcagacggagttggccccaagacggagttggcccagacggagttggcgagacggagttggttcagacggagttggccagacggagttggccagacggagttggctcagacggagttggctcagacggagttggcccagacggagttggccagacggagttggccagacggagttggctcagacggagttggccccaagacggagttggccagacggagttggctcagacggagttggcccaagacggagttggcccagacggagttggcgagacggagttggctcagacggagttggccagacggagttggccagacggagttggctcagacggagttggcc

SEQ ID NO: 24414 - DNA, 1199 bp, Heterodera glycines
aacagccccactaattacaaccgaaggttgtgagtttcattgattgtctgcctcaaaaaagatggtgtttaatggaaggtgctcaaggttggcacatgcgaatttagaaaattagcatttttattgcaggcaattcatttagaaaagtcattaatttatttgttatgaagttctttcattgaaattagtttaaaaaccctttcttgccgattacattctgttctaaattgtagcaaatgagcctattcttacaacctatttggcatttactataattgtaacctttggcgtttctaattgtaaaattaaaattataagaacagttttttcagtatgtacgcccgctattttctaatgatattttttagccaaagaataatgcttttttgaggtatggggtgccattaaacaattggcaacatctggaatattactcaaaaaggtatccttctactagcttccattaaatctttgaaagaaattttcaattttttcaaactattttcataaaatcctaccgaattcatttttagccggccgattaaattttgactgttatatctgaaatgatagatcattaaatagaaaggaaggaaaacgtttgggctaactcttcgcttcttcagaagaaaatttattgatatcattgtcctatcagataatcgcgggcgtagaatttaaaaaaacaaagcaaaagcataatctattaaatgaactaattaaaagcagaattttttaagaatgtgcctgaatttgtctattaatttgtggcccgttaaatatgttttttcaataaaagcacatcaattttgaaaaaggacctagtgcagaaatgcgtatcgccattgtttttatatagacaatttttacggcgactgcctgaacctttcttgaaatttgagaaatttgttcaattactgacgcctttagatgtacggctattcttaatatatagcaaaatacagaacattttaatagaatagaatattttttaaatagatgggcatttattgcgaatatttgataggcaaaaaatttaacatttctattccactaacagccccactaattacaaccgaaggttgtgtgtttcattgattgtctgcctcaaaaaagatggtgtttaatggaaggtgctcaaagttggcacatgcgaatttagaaaattagcatttttattgcaggcaattcatttagag

SEQ ID NO: 24415 - DNA, 1825 bp, Heterodera glycines
ctttcgctgttcaaatttgtttccttcgcaaatggtttaaattaaggcacatttaagcactcttggggaatgaatgtgctcttttcaaagggattagacaagtcaaacacagaacaaacaaagaaatgccctgggggaaaggagcaaagagaggggaaaaggggggtccttttttgggggactccgttcactcattttcatttgacacagattcaatttcgggacggaagcagtctcctgcttctcctgctgctgctgttctgctggtctcccgttccctcctccttttctgtcgcttatttataaactgtgccgccggggggtcattcattgcctttgcttttcctttggttttccttccccatgggccacccataagcattagccatcgcagcgggactaaaaagcaaaaagcatcataatccctccctctcccttttcctccccctctctccccccgcctccaatttgctttatctcctcctaatttcttacctttatttatccctttggcttttgtcccttcgatacgctaaactaattttgccaattaattttcgcctttaacttttattgtctcattttatgctgtaccatagaaaatcattgtcatttcttcccctcccccgccgtttcttcgaaattcaaatcatatcgaatttactctttagtggctcgtcaaattgctcatttccatttccatttgcattggcatgtgcttttcctttaaccaataaaagctttcggctgccaattttcaactcattcgtccaatttgcaactgattcgttcggctaattccccttcgatcatttaaccaaaagaattgggaatggatgatggagaagggtcggaagagcaacaactttgtggagaagtacattttatctctcaaatttaaatttcgtttggcgatatgcccttcccctctctcccccagtacgaaatgtacactttggcacgcttcctcttcctctcgctgtcctccgtgttggcactgttcggcgcggctgccaatgccatgctttttgtgctgttctcctcccgcgccgcgttagcacgtgccaatacgcccgccacgctttacccgcgcgtgctcgcgctgctcgacgcgtccatttgtgccggttacattttgttgttcggtgccgacgcggcggtgatttacctgcgcatccgtccgctctttctgctttaccatttgtacattgtgccggcttttgtcctctcgcgcatttgccaattggccatcccttatatgtacgtgaagtgccttctccgaatgtgtgccatttttcctttcctttttaggctcattttcgccactttggagcgcctcgtttggattagcagtggcaaaatgtgcgcaattttagccccaattaacttttaattgccttttcagtcgaaattcgctcctccggcgaatgtattccgtcaaagggcgccatataaccgtggtaatttcgtcctttctgttctttgcactttgtgccaatggcttttcctcaggcttttactctcggcgcgtgtgccattctccgtttgccaacttattgggccaccacagtccacgaataccctcaggcagctttttgaattcaaatttattcaaaggcatttccaatttctgtgttcagtgcgacgactttttccgcacaaaaaccgccgggcccgccgattgggtgatgaactcgcgctttttctacgtgtacgacttccacttgctgtccatcgctcaaaccgtgttccccttcttcgtcctggtcgccttcaatttggtctgttctcggcttttcctcttcctttcccccctcccttttgg

SEQ ID NO: 24416 - DNA, 1891 bp, Heterodera glycines
ggcttttcgcagtcgaggcagtaggggtgtccaaacaagccatgtaattctgcacaccatcaaaatgctggttgttcaaatagggcacaatgggggtgtcgtaatgatcgttgatgtatttgtacaagggcttgtattgtcccgatgagccaaagatgaacactgcaaatcgttgctgctgctgcgtgttgttccagtggtcgaccacacgcggcacacaaatctcagcatcataggtgttccgaccggtctgtacaccaatttgctgcatcagttgtaaagcatcccgcctcagacatccctgttgtcccctccgactgtgcaagtagtcgtaaaatctccaacggggccaaccgcacgttttgtccaccattgtcgcctgcaaggcgtagaagaggcaatgtccgtcggggttgcaaatcttaacaaaattttcacttaaattattctttcgttgtgatgtttggaccttaatcaaacaagtttccgtcaccttatgatgcacaggtgctaggcttcgtcgagcaccgcccttcagcacccttcggccgggcagtccagtacggtcaactgtggtcaccaccacagtgaatggctcgccccacagtgtgacgttttgctgctgcttgctctgtgccactttggtgaactggttgaggatggtgttgacggtgttgtctgtgatttgtcgaaccggaatggggatgtccccgccggtgagcaacgaactgctgatcatgcagccgagatgagtgggttcaattccacgtccacgactctcctccatcgctgcgtcaagacagtactggaagatgccggccaggagtccctcaggatttgctgctggcacatcctcaatgctgaaccgcgacttgactttgctgtactggaagcggggcacatgctcaatggtgctgtccaactttttgacgtagtcctttgcagactttgatgatgatgagctgctgctgctgccgccctcttgaagcacctctccaagcaattcattgatgaggaagccgcgacgcggctttttgcttggggccgatagaatttggtcaatggaaaacagagagggatgcttgggaggctgattttgcattatctaatttttcagggaaaataatgaattgaatgaataaaatgaacaatcttgacacatatttttgaggcatggaaattgtcgttgtgaatgcaaattaatggataataataataattttaaaattttttaaccaactatgccctgaagagcagcgcactgccacccatgaagcataacacgacagggcacataaacggctcggataattagtaaaggtcacgcgcacaaccccaagccctaaaagacacacaagtgctgccaggataaacggagcccaataattggagcaaccgccctggttaacagcaataaattaactatttaaaatattattattattaaagtgagtaaagatatgagcagatgtaaatgaaatgtgatttggactggggaatttatgaagattgggggcggggtgtccccatccgaataccaattaattttctcgaactccttcgtagtgtcggcaaattcaaatttcctttgaagtcatctccttcactattgtcggcaaattcaaatgtcttttgaagtccatattaattattgaataattaatgagcccatgagaaccgggcacaaaaatattttaattcactcttcattcattctttcaaatttcatgaccaatataatgcccaagcgattaccagccgagcttctcttccaattatctactcacttcccataatgaatctgttttgcagaggtaacacccaagccaactggaaaaaaaatcaaatttcaattttttcccaaaatttaaggccgcccaccatccggtat

SEQ ID NO: 24417 - DNA, 2213 bp, Heterodera glycines
ctaaatcttttatcttttttgaattcaattttagctttctttctatttaaattacatgacaaccctagaacaatgacattcaaaacaaatatgcttcaaatatttttgtacaaaaaaatttgtaattttttgtgattaactatgcaattctgttatattgattgtatggacgccaagggaccaatttaaaagtaacatataatttttacaaaaaaaagtgtgcataaaagaactggcaaacttcaagagtgagctttttctataatttactattaaggctatttaatgttttctacttgtcatgcgtgattaatatgtataaaaatttgtaattcaaaattataaaattaatttaatttaaaatttgcaaaaattacaagcaaaccctaaaatatccgatgaataaatgatctctttataatattttgcacaacatataaattaccaaatggaatataagaaattatggctatgttgcgaagtataaataataaaattaaatttcaaatcaaattaataattagattttaaaaagtttatggtaatttaaaaacgcaatgaagaaacattttatgaaatggcattgtgaaaattaatatactaaaaaaattatttttaattttacaatttaagaaaacaaccaccaaatctggaattcatatacctattaattatttatgcaagcattatttataagacaataagatcaatttcaggtgaagaagcttaagtcatggcttagattataaaaattattataataataattatttaaaaacaaacaaatttttaattattgttgtatcaacattaattacctagcaatcactatatatatatatttgatatttatttttttttgttgcaatattttttagtgatgtcttgatgttaaacaaacaataaatgtactttaaattaatgaaaaaatttaataaaaatacactttaaatttataaaaaaaaggtttttgctactgaaatagggttttacaatacatgtacgtggggaaaattaaggcacgtggtgtgggtaaacatcaaaataaggattactttaaaatttcaaagtttttgattataaaaaataagaatattaaattgctaacaaggcataaaaatcagaaatttttaatgccgatttcgactaaacttcaatagattaaaaaacccgagtttgcatcgacttttccaccggcctcaacaattcgctcgagttgaatagacaccctttgccccggcctgaagacatttacagggccatcagcggctccgtctatttctccaatctcgacctccgagacgcgtatttgcagatggaattggatgaggaatccaaacacctttgtggaataaacacccaccgtggcctcttccaatgccagcgcctcccatttggcgtcaaatctgcgccgtctattttccaacatttgatggaccaaatcgtctcaggcatcccaggcgcatttgcctacctcgatgacggcataatcgcctccaaaacgcttgacgagcacatttcttcgctctacaagcttttcaaacgaattcaggaatttggcctcaaaatccaatgggaaaagtgcaaattcctccagcccgaattgctatttctcggccacgtcatctcagcgaaaggaattcgccccgaccccggacgatcagaagcaattcgccaaatgccgccaccacatgatttgagcacccttcgctcgttcctcggcgcattgaattattatggaaggtttataaagtccatgcgcgaaatccgcgaaccactggaccagcttctgcgaaaggacgtgaaatgggaatggaccgacgaacagcaaactgccttcaaaaaggccaaagaaatcatgctgtcggatcttttgctcacccatttcgacccgtctcttccaatcgtcgtggctgcagacgcctcaaaagacggaattggcaccacaatcagccacatttttccggacaaatcggaaaaagtcattgaacacgcgtcctgcaccctcaacgacgcacagaaaaactacagccaaatcgaaaaggaagcattggccctcgtttttgcggtccagaaattccaccgaatgttatttggtaggaaattcacacttctcacggaccacaagccattgctggcgatttttggctccaaaaagggaataccgatttatgcggcgagtcgtcttcaacgctgggcactgatcatgtcca

SEQ ID NO: 24418 - DNA, 2259 bp, Heterodera glycines
  unsure (1)..(2259): unsure at all n locations
caaacatagaatttttcacataaatcttaaaaaattttgaaaggattttttagacaaattttgaaaaatatagtaatccatcagaaatttttgaaaaaatcgctagaaaaattctccaaaatgggggcggggaatgtaatgcacctctataatagaggcatttacgtagctggcccgagattctgtccaatataatcacctaattcgtttttaaaacaaataaaatttctcataaaaaaatatttctatatctttacaataataatgcaaaacaattggaacaacaaaagaatgtatgtcataaatgattgatttaaaaatgatttttttttgttccgaccgataaaaattttgggcgcaatttatcttaaaaataaatattttcgccttcattagatccaaagtctattttaagtagtcctttttaatggaattaattaagccagcaaaattttgttgtggttaattaacctagccaccaatttttgtttgttttttggattattatttatgccactaattaattagagccgagcttaagcgctgtccaacaaatttacttggattttgtttatgtatttactatttaattactgaaaatgttcaatgtgtactttgcctaatctgcttaactacaagggattttttttttgagaaaaaaaggaactaaaaatttgcttttaatcacttcgctataaaaacaattaaaatgtggtaaataaatcattcctttttgaaattacaatattcgcacaaaatttaaaaaaataataagtttcaattatgtccttctctggctttgtatttgaatgtgtcattctgttgttcatcacattcaaaatgttgaactacatttgtgtgcctaaggtctgtgaaatgaatggcatttttatacaaaatagcaatcagggctggacgaaatttcgtgtcgttttcgtttcgtcctacattttcggcactttttgagtttcgttttcgtgtttcgttttcgtccgctaaagttttttcgtttcgttntcggtttcggttttcaattaagtattttagtttagtggcgaaaacagcaggtttgctttgtgctgtgcattaatgttcgatcccgcatgaccgcactttattttaccgattttttaatcatgtttttaccgattttaattgaaaatctgctatgaaatagcactcaaattttcccggcgtcgcctatcggcgccgccggaccctcttcccattcatcaacttgtaaaaaaaatacactgcaaaaaaaaacgtttgaaagtcttttttttcagcagttgctaatttcttccccaaaaattgttaaaatccataataggatgtgaaaaacataacattttaatacattttttatcgaaaaattatatattaactgattcgaaccaattttgcaagattgtcttttttgaccctaaaccttattttttgtcattgatgttctttattttaaaaattgtttggtcacacccctatcctagagccacattagcttttccacctactaggatcttcattccttcagttagaggatacaattttaaagttttatgtttcttaattatgattgaaataagttcaaaaaattttcggttttttcgtttcgtttcgtacgaaaattgttattttttcgttttcgtgtttcgttttcgtccgtcaaaattttttcgtttcgtgtttcgtgtttcgttttcggttttcaaaatattttttttcgtttcgtgtttcgttttcgtatcgaatgcactttttcgtttcgttttcgtatacgaaaaagtttttttgttattttcgcacagccctgatagcaatctaactttttagtatttttggtttttttttttttgctacaataaaaataattaattaaattttatttattttgatagccgaattttgaataaaccaaaaaaaaaaatatatatatatataaggattcttgaactaaaagtaaattatttaaaaaacaaagtaaagcattcattaattgcctctttctaattactcagaaacgaacaaatgttaatattaagttattcattcatataatagcatttttaataaaaatcttttaaatcaaaaaattaaataaattttttgatcagattaagaagcatttttttaattgttcaattttagttgatccattctccgaaacaatgcgatcacatcagaaggacgtcaaaaaattttgagcaatttgcgcaagtggttggatgacaaccagtgtgccaaacacaaaaaaga

SEQ ID NO: 24419 - DNA, 1200 bp, Heterodera glycines
gtctggctctacccaaccactcacacgattatttgaaatgctacggaaaaaaattcttgccgaaaaaatggctatctcttttttctcttggggatttgaccgcaaacttggtaccaacatttgccttctctagtctggctctaccaaacactcacacgatatttgaaatgctaacgaaaaaaattcttgccgaaaaaatggctatctcttttttctcttggggatttgaccgcaaacttggtaccaacatttgccttctctagtctggctctaccaaacactcacacgatatttgaaatgctaacgaaaaaaattcttgccgaaaaaatggctatctcttttttctcttggggatttgaccgcaaacttggtaccaacatttgccttctctagtctggctctaccaaacactcacacgatatttgaaatgctaacgaaaaaaattcttgccgaaaaaatggctatctcttttttctcttggggatttgaccgcaaacttggtaccaacattttccttctctagtctggctctaccaaacactcacacgatatttgaaatgctaacgaaaaaaattcttgcccaaaaaatggctatctcttttttctcttggggatttgaccgcaaacttggtaccaacatttgccttctctagtctggctctaccaaacactcacacgatatttgaaatgctaacgaaaaaaattcttgccgaaaaaatggctgtctcttttttctcttggggatttgaccgcaaacttggtaccaacattttccttctctagtctggctctaccaaacactcacacgatatttgaaatgctaacgaaaaaaattcttgcccaaaaaatggctatctcttttttctcttggggatttgaccgcaaacttggtaccaacatttgccttctctagtctggctctaccaaacactcacacgatatttgaaatgctaacgaaaaaaattcttgccgaaaaaatggctatctcttttttctcttggggatttgaccgcaaacttggtaccaacatttgccttctctagtctgggtctaccaacactcacacgaaatttgaaatgctaacgaaaaaaaattcttgccaaaaaaatgcttatctcttttttctcttggggattgaacgcaaatttggaacaacatttgccttcctaatctgggtctaccaaacactccacgatattt

SEQ ID NO: 24420 - DNA, 2426 bp, Heterodera glycines
  unsure (1)..(2426): unsure at all n locations
gtaaacgtgaccatgacagaaaaaatcgtggaactcaatggtaaccgtgaccgtgaccgaaaaaccaagaaactcacggcaaacggaccgtgacagaaaaacccgtaaatatgaccgtgagtgaaaaagaccgtggaactcacggtaaccgtgaccatgactgaaaaaatgaagaataagcgtgaccgtgaccgaaaaaaccaagaaactcacggtaaacgtgaccatgacagaaaaaatcgtggaactcaatggtaaccgtgaccgtgaccgaaaaaccaagaaactcacggtaaacggaccgtgacagaaaaacccgtaaatatgaccgtgaccgaaaaagaccgtggaactcacggtaaccgtgaccatgaccgaaaaaccaagaaactcacggcaaacggaccgtgacagaaaaacccgtaaatatgaccgtgaccgaaaaagaccgtggaactcacggtaaccgtgaccatgaccgaaaaaatgaagaataagcgtgaccgtgaccgaaaaaaccaagaaactcacggtaaacgtgaccatgacagaaaaaatcgtggaactcaatggtaaccgtgacaatgacagaaaaaatcgtggaactcaattgtaaccgtgaccgtgaccgaaaaaccaagaaactcacggcaaacggaccgtgaccgaaaaacccgtaaatatgaccgtgagtgaaaaagaccgtggaactcacggtaaccgtgaccatgaccgaaaaaatgaagaataagcgtgaccgtgacagaaaaaatcgtggaactcaattgtaaccgtgaccgtgaccgaaaaaccaagaaactcacggcaaacggaccgtgaccgaaaaacccgtaaatatgaccgtgaccgaaaaaaaccgtggaattcactgntaggggctaaaaatagcattttttaatttttactattttggggagggagggtaaaagccattttcggcagtttttaggcagtttttagtgtatatttgggaatttttcggtttttagggcatatttgagggatttttagtcatattttatgggcatatttgacttttttttagtgcatacaacttataaccctatttatcacagtttcattatttttctactgtatctaagtaattcaattcaatttatcctttaattatattcaataagccatcagttgttattttgttgtttatattcgaagcatcgttcagtagtacgactcttccccatccacaaagtcgacgggggtcagtgttctaaaaaagcgcaaaattaattattaaaaatgcaattagtgcaaaaacaatgctattaagaagggactcacgcgcatctctcccggtttgcctcaccacacttattgcatgttcttgcgcagttacgagccatgaaatgcgggttacgctcacattctttcatcggaatttgcttgggattcttttgctttataggcttccctaaaatattttatttttttgtgttcgggttgaatttttcataaaaatatagttaacttttaattaatccataatttattggttaacatctcccccaaaggacgataaaaatttctcgactttcgagtcgagaattccacttagatcaaagtgaatttaaattggttgcctttgtggccgtgcccatagcccgggagtaggtcaagcaaagaccagcgtaagcactgcaagtgaatgtccaaacaaccttaatatagtaattaagcctttttcgagatgtttccttatggcgcttaatcttcaatatttggcacgctcctacgctttttctctattaattaccgggaaagaacgccagagggtacggttggcatccgtcatagcgacatgaggccgggcacaaattgttcatggaaatctttgccatcccgcaggtgccattcgaagcccatagtgggcaacactcgtggttgtcatagcacaaacggaatttggggggtgaaggctatggaaaaaggaaaagaaacagaaaattaatttaatggggcaattaatataaatttctattaaatttctaatagctttttattttttatgtttttaattaaaagggaattaatgaaattgggaactcactgttggcgatggcgttgttggcccacggcctttgccttttccatggccatttccgttgccatttccatttccattcccttggccatttccgttgccattcccctggccatttacatttccgttgccatttccatttccattcccttggccatttccgttgccattcccctggccttttccatttccgttgccatttccattgccatttctgttgccatttccattgtcattcccttggccatttcccttcccattgctatttccatcaatacgaatacgaaactgaaatatattccagagcatgacgccataaaactggtcttaatccccgattggg

SEQ ID NO: 24421 - DNA, 2383 bp, Heterodera glycines
  unsure (1)..(2383): unsure at all n locations
aattaatgtttataattatgatggcttaggttaagtaaaacttccagatcgggttcaaaactacctcttatatatagcagacaacncaatattttttttttgtcaaaaaatatataattccttacttttgtaatcgcgcagcagtcaagtcgataatgttctctacaacaatcagaagcaggccatccttcatcaaatacgcaacttggcgccaatgtttcaccaagcataaaaccatgctatattaaagattttatttatatatgggatgttgctttttatcgtgtctcgtattctcttggtttaatgccgtctcggtctctttttttgaacgagacacgagatttttattcattggtaagaatgagggggaggaggggggtagagaaaatattttttttgaaaatttagagaaatattttaagagaggaaataataatttaatttaacttttaaacttaaaaaagtgaaaaacttacagtctaatttggttcattctctgtgatttctgccttggttcgactcccatacagaataaaattagtctattattcttttaattgtaaaagtatttttaaaatttatttacgaaaatttttcaacctccaaaaacaaaaaaaacaattaatttttttcactttttaaacagagtcaaaatccaatttttgtcgatgctaatcatgtaacaaaaatgtgacaagattccgaaattcccggacctaaaatcacttaaaatattctaaatttaatccaaaatatatatattacatctttgcaaaatggtcgagcgtgatcatacggtaggttgccagtaggtctccagcaaggaatgttgcacttattcatctcaattgtagcgcggcacttatgatcgcacaagcgagggaaggggtagcatttctccagacaagattcatttatgtaagtctcattgaatacttaaaaaatcgcatattattagagcatattttgagaccttttggtgttttcatcccctttttttggagtttttttccgaaaactcccattttgatcgtcaaaatttgtttggtttttccttgataagaatttagatttaaaaattttgcttattcgaaacaaattaaaaatatataattatcatttaaaattttcttttctttttattacacaaacaacatacggtaacattgactgcatttttacctccgcattcgaatttgcactgggtgtttttgcagttcaattttttagccatagcatcacattttggtgttttataccttcgatgcgcttcctaatgatagtattaaaatagaaaaagatattaaaaacattcttcgagataataccgtggattgttgtaaaacttcagggtcctaaaaatattgtagagtacaattaaaacaatagttaagtatttttagacgaaaaaaagttaattattttagaccaaaaaactttttatttatttttttaataaacattaactaattattcaatgtttgcaacccgggattcattgcacgggattctctttcgcatttttaaattcgcgttattattattttttactttgtaccaatttttcagttatacatttcttgcatttgggtcttccctgtttttcaaataagcataactggttattttattaaattttaccgttttacagcagtcacattcttgcccccaaacaacacaacaaacacccttcagataactctgactgaaaattttttaatgcagcttttaaatgttaataatatatttcaaaatgcctattcagccactccaccccccacccctctcgagcaaaatgttgtaggaaattttttctcttaattaatttgtacagttaaagaagatttctacttacgggaaatttttggcttcgcaaaggcaaatggttttccccttgcatttttcctttgctcgcatttcacggtacacgtccatctgtgtaattttggtatgagatatgagtttactgtatgtaaacatgatacataccaggtttcgtcgcacccatttaattcttggattctcaaaaaattataaattagaattggtctgctctaatacgataatgaaaaaaagagttaaaaaacaaagaaatgattgataattagcctaattatcgaagggggagcactccaaaagctcgccgcccaaaatctcgccgtgaaaaaatgtcgccgtttcttaaaaatttcaaagcagaatttttcaagaaaaaatattaagaaattttttaaaaagaaaatttgaaaaaattttctttttttaaaaaagtttatataaattttttttgaaagtattttcaaataatcgctctaaaaacaaaaaattttctgttcgaagatgcctataaaaaaagtttaaaagatttgttgtcttgaaa

SEQ ID NO: 24422 - DNA, 1675 bp, Heterodera glycines
ccgaagccccgcccctatttttgaattggcggttaaatgctgttttgttgtaataggaaaaagaaacagaaaattaaaaaatataattgaagactaatagagaaaggttggggtagaggagagattgcattgtttgtttctttgtccgcgcgggtgggacgaaatgcgtgtgagtttgtttatgtttgtgcttgatgtgtaggagtgggtgggaatgagaaggtagataagaagaggaaaactagagatagagtgagagagcgaggagaaagaaaagaaagacagtaaataggattgagagaagaagaaagggaaatgcgaggagaggaaaagagacagaacggagaaaaagagaaaggaaaagaaagagagatagtgagaaagagaaagaagaaaataatggtgagagaaaaagaggaatgtgtgggagtcaaaaagaagagaaggacaaaggaagggggagagagaaagtagagaaaaaagagggagagtgttgtgagaaagagtgacggagagggagagacagagagagagagagagagaaagagatgggtagaaaagaaagagagtgaggtgagaagagagaaaaagaaaaagagagagagtgagtgagaaagagatggagtgaggtgaggagggagaaaaagaaaaaatagagagagagataataagagagagagagagaggtaaagagagatggaggaaaaaagagagagagagtatgtggtgaggagagaaaaggacgaaaaaatagagagagggagagagagtgaggtgaagagaagtgagaaaaggaggaaaaaagagagagagacgcagagaaagagggggagagagagaaacgagcagagagttagagagactgggagagagtgagaagaagggagagaaagaggagggagagaaaaggagagagagagaataggagagagagaagaggagagagagaaggagagagacaaaagaagagagagaagaggagagagagactggaagatagagagagaaaagagaagagagagagagaaaaggaaggagagagagaaactgggagagagagaaacgagcagagagttagagagactgggagagagaaaaagaagagagagagagaaaagagagagaaagagggtgaaaagagaaaaaagagagaaattgggagagagaggagatagagagaaagacagagagagagagatagagagagaaagaaaagagagagggaaagggagagagagagaaaagagaaagagataatgagagagagaagagagagagggaaagagagagagggaaagagagagagcgagtgagagggaaagagagaagagagtgagagagaaagagaggaagagagaaaagagagtgagagagggaaagagagagagatgacgggggagagagatagggacagagagaggaagagagagagtatgaacgaagaaaagcaaattactttatttaataaaaatttggcaaaatggttaaaaaaattcaaatttgtataatttttttgccttttctctcacgaaaatgccattcttaggggtgtatatttaaccccgaccccgagtcggggttaagggtcggggttcggggtcgtcggggttggaagtgtcggggttcgggtcggggtaaaccagaaaaatggccaaaaatgtcggggtcggggcgg

SEQ ID NO: 24423 - DNA, 1881 bp, Heterodera glycines
aaaattgctgttctttttcagttttttggaacatctttaaaaatttatgattgtggtaattttctgatatagtctacgaaaactataaattcatctataattgacgctcttggggagcgcaccgggcgggtcacatattccttcatcgtttcctataccttatcgactaattctccgattccgaggtcagactgtgtataagcgttacggtacgcagtgccaacgtcttctctatatttctcgacaatctgaaacgtctttttcgcttcatctgacaattctagacacattaacaagtccttcctatacagacatttattcatatcatcaatgataaatcccattttctgataatcttcattaatattaaccgaaatgctctgtacttttcttaccccttctaaaagtcgtccaaaccatatatttacccctgaggcttcgagatttcttatcttaactttttcagcttcttgaatggctctatgagatgagtagtaaaaatctatacattcattatgtaatgtgccggtatacgtaaacactgtgtcatttgttaataaaacagtgttcaattgctgtttttcaatcagtagaaaggcatcaacaggggggagggggtacgggcgggggcaggaaacgaactgttcccgctaaacgtgttccatttttagcatggcatccaaagcgtttggagttgctttcgtctggcgccaaccaaacggtggtcagatggtcctactcagattcggtaaccctttttcatttcttatattttcccaaaataatttttttttggaatctccaggactccatttggcttccaatttctcgctacattgttggcgacgaggtcaattgctatgacatcacttattcgccttgtggacggtacgcactgtgccattcattcctcggcggattccatttttgggaaattgacttgaaagtgcgcgaaatgggaaaatgttggcaaaagaatgcgatttctaatttaatttttttcgttttgggttgaaaattggtatatgtgggttttcgtgggtgctaaatactaatctaacaccaaatttatcgtatacattatttaaatctatgctgggaactctatgattttgaaataactgggggcggggctttaggtttgcaaaaaaaatttttttttttttttggtagtaaacttgaaaccattcccaggggtttcaaattcaaaattttcgggtttttgtcttcaagtttatgatttttcaaccctaaataatacgaaacccccatttttcagccttgcaaaagtgtctaaaaaaatttaattaaatttcatttgtttcagggcgtggtgttgcccaagtgtttccccattagcggacactttgccgaagtgaccgacctttgttggtcaccggatgggtcgtttttgctcagttgctctgccgacatgacgacacgaatttttgccaagcacaaaaaggtctgtccgttgggtgtatgcacttcatttcttcccacgtgtttccggggacgggacaaagtttcgacgccgaaattttggggtccatccgtatttccccccccccccccaaaaaaaaatttaaaaaaatgttcgaatctagttttcaagaaaaaattaaaaaaaattcttccatacgaaaatctaaagaaaaatattcttggaaattttacagctcattttttgaataatttttgagaaaaaacagtattcattataaaattttgaaaaaaaattttcttgcaattttcatgattatttcttaaaaaatttctaggtttgaaaaaaattaaaaaaattttcctgaggggaaagatgtggggagcaggcccaaaatttcggggagggcacccgaagagttttttttttactcttcg

SEQ ID NO: 24424 - DNA, 1189 bp, Heterodera glycines
cgggcaatcttgctcgaaattgtacccgatcagtcagttgccacattcatgttgagctttagataattcgttgccaagtttggctccccgtccagtgtttattgcgacaatgcgcctacatttcacgcatttgccaaattttcccaatctcattttccccttaaatggcaattccgaaccccagcagccgcgtggaaaggcggacactacgaaaggctggtggcccttattaaataccacctccgaagagtcctttccggccaccgccctcgtgtgctcacaagggaacaattgggcacaataatttcagaaatcgaaacagttattaactcccgcccgataacatttgactcatctaatccagcggatccccgcccactccggccaatagactttcttcacccacttggccaccgctcccaaatttacccggtcttaaatcatcccgaaattgtctcaattgaaagtacccatcacaccctaaacgatttatggcgaaatatgtccaaagtaacaaaatctttttgggaaaaatggacaagtgactacctcccgtcattaagagaaagacataaaaaattgattgccaaatcccagagatggccacaaaatggtgaattggtcttaattcacaacgacaataccccccgttccacatggcctcttgccgttatcttagaagtttacaccaatgaacaaaacaccccaaacactgcaaaaattaaaaccctttccggccacattaccatacgttcggttcaccatttacttccccttgaaacaaccgaagaaacggcacaccgtaccaccccctccgaacaaattgaatctcccaatgaaaatctcaaaaactcagataaaagtcctattcatcctcccgcacctattgtcccaacattttcacagaccattcaatggccaaaccaaacaaaaggcacagaaagacgatggctctattcccaccaaaccgccgctgggcaaagcagccgccgactcaacaaaattgaaagcgatcattttcaaagccgttcacaaaaggccactttcatttaccaccggcaagcgttggaaagtcgcggtcgcttttctgctgctctcgagaagtctgctggctttgggacaagctttgcaggttcaactccggctgaacagagggcggaggttgcggctctgaatgggcattggtgta

SEQ ID NO: 24425 - DNA, 1575 bp, Heterodera glycines
atgttgttatttttgctccaaacgacgtttagacccctctcactggagttcgaacaaatttcatttgttattttcgctcactgagcacttgtaagacctcaaaagagactttaaatgtttgtacagtgactgggagccctgggttattgaaaataaaaagttcgaacaaaaggtctaaaagtcgaacattgttcgaactctacaaaaatgatcaggaagacatttccagacagggggttactccaaggggggtcgaaatgttgttatttttgctcaaaaacgacgtttagacccactttttggagttcgaacaaatttcatttgttattttcgctcacagagcacttgtaagacctcaaaagagactttaaatgtttgtacagtgactgggagccctgggttattgaaaataaaaagttcgaacaaaaggtcgaaaagtcgaacattgttcgaactctacaaaaatgatcaggaagacatttccagacagggggttactccaaggggggtcgaaatgttgttatttttgctcaaaaacgacgtttagacccactttttggagttcgaacaaatttcatttgttattttcgctcacagagcacttgtaagacctcaaaagagactttaaatgtttgtacagtgactgggagccctgggttattgaaaataaaaagttcgaacaaaaggtctaaaagtcgaacattgttcgaactctacaaaaatgatcaggattaggtctaaaatctgaattaaataaaaatgactattaaagtagcgtaataaagtgatttaatacatttaacttaaagtaattttaaaatgcatttttttatttgaaaatatgctttttcatattagaaaattaatatataaaaacgaatataattaaggaattaatatttattataaaatgagaatgatgtttgttgctgatgaaaattttaacaaaactgaaaaaatgagaaaaggcaaatgttcaggagcttaaatatccttaaacaacggtaaagggatagcatataatcaattaattgaaaaatcgaaacagaggcgtccaccatactctctcatcgccacacgcccgcctccgcagtgcttgtggtgaagcaaaggggaaaatttttcaccatttagtcaacaattatcccattcctttcaactcaccctgtggccaagtggttaagctcctcgcttccactctcaacggttcgagtccactaccatgtttttgatttttcacaatttttcggaattttcatcataaagtcaacaattatcccatacctttcaactgcccctgtggccaagtggttaagctcctcgcttccactctcaacggttcgagaccgcgaccatgtttttgattttccacaatttatcggaaaaagtcgcgcacaaaaatatttaaataattaatttaaatttaaattaattaaattctcgcgcacaagtccatccaataggtttcggttgaagggatcaaagatcatccaataggtatggggcggggggggggggggtccgaaaatatggattgaaaaaaatcgataatcaaagtactcgtacattgtagtc

SEQ ID NO: 24426 - DNA, 1837 bp, Heterodera glycines
ggtcaaagtggtcgccgtgttgattcggcaggtgagtcgagagggctccctgaggcatgactccgtctgtgtggtcacagcgatggtctcggcgttgctgagggcgacaggggtggctaataggatgccgatgagtcgggtggccgccctttgagctcgccgtccgtggtgccgtgtctgtcgtcggaccctttggactccaacttcgaggcgtcctgcgactcgttcccggtcttctcgtgtccagggacggccggcgatgaagaaggctagtcgaaggggccaggaaaggagcaatgcggtgatttggtagccgaacttgagcacgacgcgggcagagggcaaaaacagacaacccacccgatcagacaactgatcagtgacccaatgaccagaagtaagacaagggagagccggggattacaccgccaattggcgggtcggtcgatgcagatagaacaatcgatcaattcacattcgttgaccgccggacaggcaatttcggcggtacagctgcgggtcgaagagagaccgaatgtcgcggagcagacatactcgttgacgaggaggtcggaggacaactcatagctgatctcagaggcggcgagacgatcaaagcaggcattcgaacaacaaattgtcaccttttgtaccgcaggatttgacgagattttgacgccttttcgggtgcaattgacgtgattcccgacacaattagatgttaggggtgactcgggacggtccggatcgaatggccagattccttgtgctggggaggcttggacccacaggagagtgacgagagtggcaatggtcattgttgtggtgggagggatcgcgaaaagccgtgattttcgtcgcgtaagcatgccgctgtgcttactgatcgtcggttctccagaaagtgaggggaccggcggcatttcatgtacagacatttcgacgtttttggagtcactggggctttgatcagacgggataggtacggtggcgtccggggcgggttccggggtttcgacgatgaccacttggccgatgtggggggtggcgggagttcgaaggcggggacctttatgagtccatgcggcgcgctctctgatggcgaggaggtactcatgactccatttgagccaaaaatggtcggcggcttctcggtaagccttccaaagggcggcgaggcgctcgggaccggaaaggcagtcgtcatagtcgaggtcagagtcgacgatgtccaggtcgttgaggaggccgggttggataagatctttcggggtgaggggttttgccgagtccggttggtctgacacccatgtgatcgggcggctgttgacgctagcttcaatttcggcaaggaaggcactcagatcgtcgtagtcaagaatccgccggccgattgttcttttgatacacgatttgacgaggccgatcaggcgctcatagcaagctcccatccatggacagtaggcgggaatgaagtcccactggatgcctcggcgcgcggcaaatgtgacggggtcggtttcggccgaagggccggttagaatgtcgagggctttgctggtttggacgaaagtaggggcgttatcactcaggattcgccttggtcggccacgacggctgaagaatcgtcgcaagacattaatgaagcttggggccgacaagtcggtagtcgcctcgaggtacacggcgcgggtgacgaaacaggtgatgatgaccaaatacgccttggtcagtgatccgtcgcttagccgagagggggtgggcccggcaaaatcgagaccgacaaactcaaagggattggccggtttgacgcgcattgagggcagagggggcatag

SEQ ID NO: 24427 - DNA, 2396 bp, Heterodera glycines
  unsure (1)..(2396): unsure at all n locations
tgagccttttgggggcattcatgaatttaatttggggagagggaacattcgaaaatttacntaaaaatcacagtgaaggcgcagaatcagctacttattgttagcaaatttccttcaaatntaaaaaaatgcctcaaaaatagcgctccaccaagtaatgggatgaggaggaaaaagtcaccaaatttggcttcccaaatttagccccccccctttttttgtgtccggaggcctcccacgttttgaatttccatcttcaataatttatagccattttctgtcattgcttctcacttttactttttactttctcttcctctctttcgtcctttttctctatcgtttcgtcttcttccatctctgggaatgatttcaaacacaaaaaccgttctttgcagctgttttttgtcctcacaaaatgaattctgtttttgaaagggaaaattctttttcattgaccaattaattaatttaaaaagaaacacaaacagaaaaacttctcggtaatcgctgttgaaaatcagctaaataaaatggataataaatttaatttacaaaattgggaaattcacataaatgacgcaattgacggaagaattgaagatgaccaaaaagttgctggcatcggagagaagatttaagagaagggcgtcgggttcgaagaaagtctcgatcaaattgacgataagggcgagagtgttacagcacaaaaacagcacgaccacctgccaaaacagcggctgatcatcgatcagtggaaagattttgcaagagtccccacaattgacgccatccgatggcattccaccgatccgtccgactgaccataatcatcgtgatggtctcatcggagccaggggtcgctttcggaaggggcggaaattgggccaaagtgccgcccaaaagagcagccgcaatatgcggctggcgctggtatcgctgagagttccgatgggggccgtaatgccgtaaactttgctgtggccctcgggggaaactcgaccggcggaatttgccatcgccgttcacgctgagctgtctcttggacgagtcggtcgcaagaagcttcttctgttgggcggctttggtagggatggaggagaccgaacaattgctgaatcggccgagcggagattaattaattaatcaataataattaattaattaatgcgaggcaatggccaaaggcaattcactgctcaccttttcttcttctttcgcatttgatttgcttccaccgatttgcaccaaatgatcagcacattgagaatgagcagccaagagaagggaagcaaagtcatgacgatcatataaagataaactgaggggagagagaagggataaagcgaaaaggacgggggagagaggagagaccgttgtaaacggtgttaatgttgaagaacaaagtggtggggcaaatctcgacaatcatttccttcaatgggaattcgaagtttcccggcacttttcggcctttcctttgccattctttgccccccaaccgaactttgcttccctcgtggatacaatggcgaagattgaactgtggaaaacgtagtgaattgtaaagcacggaggccaaaacaatgcaaccgacgattcgttgtgccctttttaccgtacaatgccttttggcattggagcgccagcaaacctaaaaaatcagaaatgaaaagacatttttaaaggagtgaacttacacaaacgtaacagtcgaaagcagccgcgacggtgaagtaaatggagcacgactgggccatgtaccctaaagcaatgggaggaattggcacaatgccaaaagcacaatggcaccaaagggaagagtgtaaacggtggtgtacggagactggacaagttgagggatgtaggaacgagctgaacaatgaagcgatgaaaaggtgaaattaaagggggaagggccgacccgagtcgacccagaagatgaacaggccggtgatgaccacgaagaagtcggagcaggccaagtacagcaagtacgtgttggacgagtttctcattcgcgagcgcgaataaacgaacacattgaccacgttggtaatgacgccgaaggcggagagagaggggagcataatgatgatgacgatgtagttgaaccaggcgtacagcggggagtaatcctcgtgttgcaaatccgagcagatgcctaaaggcaaaaagataaacgtacagatggaaaacccagcagcagtcgcagcacattctgaggcgttgaatacgtcgggctgagcagccataatactgtaacagggcagggtatacggtacaaaaggggggggggacaaaagcaccgaccgatcaactcacctgggaaagaagggaatgatgcccggagtttccacaacagtaaagcttccctcaccctcaaagaattcagt

SEQ ID NO: 24428 - DNA, 950 bp, Heterodera glycines
agatgggagtggggagaagatgaacatgcgactcctgacaatgagcgcattggatgtccatcagaatatcaataacacctgtgcatcaatccgttgatgctagtctttccgagacaaacagaaagcagtgaagtgaagagagagtaatacacctgcaaagggaatggaaggatggaagaacgctaatttgaagtcattaatagtaattagcgtgaccggacatttggacagtggacaatacgaaagagagtgaatttttttactattaaaaatggctttagtaataacaaaaatattttcctgagccatttggcaagtctaccaacccgattagtcaatttataagcgcccggctcgttaataaacagcaataaatttcatcttgtttattttttaaaaaacaatctttatcttaacctttagaaagtatcacttacttattttaatgccatatcagacttatgaaaattcaatttacctagatattcttaaaatatatttttttattgctgctaaagccatttttaatagtaaaaaaattcagtctctgtcgtattatccactgtccaattgtccggttctgtccaaatgacttcactgtccaaatgtccactgtccagatgtccgggagccgttttccgcgggtgacagctcgcgaggttcccttgtgagaatgacgggagccgaggagacggcggcgccacaaattttggtaccctttttaggggactttataaaatgccgtaaatttacattttttttttctaatttggaagggtacacaaataaaattttaaaaagttacgcacaaaatgtacaaaaaacaaatggtggcgccaaaaaaaacaacaacagagaatggctttagtgatcagtgatcacattgtgggatctttcggcactaattaaaatgtacgttttgcaaacttttgtaaaatatttaataacta

SEQ ID NO: 24429 - DNA, 1692 bp, Heterodera glycines
aatcaacaaaaattgccttttcaggcagggatttccgggatcactgatcactagggcttccaattatatggaaatccatatttttttcctggacacgcaagaaaaacatgtttttagcttggtttgaagcttctaggatggatttctatatccatatttttccatatttcgcgatttatgtccatattttggcatttttctacaaaacccctattagaacggccctcgtcagctaaattggccgttttgaccccaaagactggaaaattttccgaaaaagacattttttaacaaaattttgtcgaaaaaattgattaaatttaaattttcttagaaattggttatttatgtcaaaaataagcaaaaaggaaaatttcggtttttttttgttggttttcattaaaaatagctttttttcttttaaaacgagttcttataccgtatttagccattttagatgtattctaatagaatttaatgaatttgaagaatatttttgaaaatttacccctcaattcggagaatttatgtccatatttttgctattttatgtccataaaattgcggagaccacggcggttaagctacagcagaagaaagatgaaaattggaacaacaattgtaacaatgtgttcatttggctttttagtggcactaattgcattgggtgagcaataaaaagcatttgatttttatccaatttgaattttgcgcttaattaaggcctttgtctccgccaccggcagaagaagcgggacaaagcatcacaaaagtgcgaaatgagtgagggacaaacgaacaaaaacagtgactcctctttctccccctccttcttccgtcgaatttttccttttcctctctttctcttccgtctctcctccttccccactgctattttcatccttttcctcttctttctccccctccttgcttcgaatttttccttttcctctctttctcttccgtctctcctccttccccactgctattttcatccttttcctcttctttctccccctccttgcttcgaatttttccttttcctctctttctcttccgtctctcctccttccccaatgctattttcatccttttcctcctctttctccccctccttcttccgtcgaatttttccttttcctctctttctcttccgtctctcctccttccccactgctattttcatccttttcctcctctttctccccctccttgcttcgaatttttccttttcctctctttctcttccgtctctcctccttccccactgctattttcatccttttcctcttctttctccccctccttgcttcgaatttttccttttcctctctttctcttccgtctctcctccttccccaatgctattttcatccttttcctcctctttctccccctccttcttccgtcgaatttttccttttcctctctttctcttccgtctctcctccttccccactgctattttcatccttttcctcctctttctccccctccttcttcgaatttttccttttcctctctttctcttccgactctcctccttccccaatgctattatcatccttttcctcctctttctccccctccttcttccgtcgaatttttccttttcctctctttctcttccgtctctcctccttccccactgctattttcatccttttcctcctctttctccccctccatctt

SEQ ID NO: 24430 - DNA, 2369 bp, Heterodera glycines
  unsure (1)..(2369): unsure at all n locations
ttgtagccgcacatcggacaaaacaagttgacgcgcacccaattgtagaggcagcgtcggtgcagcggatggtggcagcccatcgtggtacgcgtgattcggctcagtcggccccagcaaattgaacagcgctcggctcgtcgcgatttggcggtctgtgggaaaacaattggggaaaattattttcggttttaaatttttttaatctaaacttacgtttcctgcccttgctctggccgccttgcgcagctgcgcttgacgcttttccgccttggccgcacgcgcccgtgccgcgtacattgcgttggccattcgctgaaaaatgggggggggcaattagcacaatgaaaatgcacatagcaaaacaattaattacctaaataaactgacgatttaagtggcggtggaggaggacgaataattaagtggatggaatgaatgaacggaatgaacgtggaaaagcaaaatgtgtgggccttaaatagcaaattttttagtcggaagagtcaaatttttcggataaattcatatataaaaggcacaaaaattcatttggttgccatttttccattatttaattaccggcaattcatcttcatcaatcatcccttctctgtgtacaacgaaaacgacgacaattgagcaatgtcggaccatccagatgctgcgctggccgacctgtaagccgctcgaatttaaaatttcacaaaaaatcggattttaaatttttgcaattttcagcagctgcgtggcaaacgacgtttggctggacactctgttttggattgaccgcgctgaagttggcacgaagtttgcactgatcgacgcgcgcttcggcaggctggtggccacgcatttcaaactgcgcaaatggaagctgggcgagctgggcattcatcgggcaccaagcggatgggacaggggcggcacggcggctgtcaccgttatggacgaccacccgttgatgaatcgactgccgcttgccaagtgtcctgcaccgaacggcgtgattggcttccgtgccatctacatttggtcttagcgaacaaaatttttttgcaaattttcaaaaattccctaattttccaggtacgtcgacctggaagtgatcacatttctgcagtgcctgcaacgcgttctcaacctcggcactgctttgcagttcaccatccattcgaaggatgtccgctgctgggcgctgatgtcccaacgcatttggccactgatcgcgcacgctgtcaccacgctgcacgacatgaaggacgtcgacttcgcgctgttgcgtcgccatgtgtcgccgaatgtgctgttcgactgtgtcaagcttcgtgtcatcaccaacacgcacatgttcccggtccaaccgccctccagcgctgtgcacatcaacgaactgctccaaccgcctgccactttcaatgagaagccgaagcatcaactgttacgatggctgcacacaccgctcccagatggcagtcccaaaattttgactattcgcaagtggcgacgcgcgcattggtctacgctcacgtcgagcctgcgaacggtcggtcggaaattatttttttttgcgtttttcgattccaaattttttttttcaaattttccagtatttcgaagcgccgagtgccattgcggtcaactacgtcgtcgnttgtcatcgggcatcgcgtcgcaacatcgagggtcgttgagcgggagaatgaacggacgggcgagtggctgacgctgcgttggcgtgtgcccgtggaggctgtggttgtacgccagcggagccggcacggattggcgcacagtggcgaagtgggagtgggacgcaaaccatacgttggacactatgctgtgcatcaacatccaggacagcgacattgggtagagtttttgaggaaatttttttgaaattttaattttcaacaatttttaggcccgcacttctcgccgaactgatggccaacgaatgaggagggatgagaaggaagtcatgcgcaatccaagcggaagaaatatattcattgtaaatttgccgatgtgctttggtatttgatcgtatgcatatttgtgtgaattgtataacatactgtatgtataacatttatactcattattacattttgctgccagtgttgtataaaactgtacacaatttactggatttggtcaatttacgaaaataatggtctctgatctcttcgccgaaagggaggggtttatgattttggagaatttctggcacttttgctgccttggacccacgaaaaaattcaaaaacattataaatttttcattttttgagtcccggaaatttaagctaattttttatgttttttatttggtttttctgacataaagatgagttttcccagaaattt

SEQ ID NO: 24431 - DNA, 1877 bp, Heterodera glycines
tttgcgattgtgtggctgcttcactgtgcaacggctgttgcagcgcactgggaaatcgggtgggttttgtgaaacgaggagaagcggactgatgcaaacctgaaaggaaattggcttgaagtaaagcaaattgaaattttgaataaaaaagtgatgtaataaaagtatacgtttatcggcagaaaaatgatatattgtcttctaaactgtttaagcaccgcctatgtcagtcaaactgattctaattgtaagacccaaaaaataaatccaaaaaataagtctaaccaattacctggaacgctgacttgagcaagtgggaccggtctaccattgctattgtacgcgccgccgccgccagtcaatttcggcctgaactgttgacggtattgcggacgttgtggacggtattgttgttgttgaggctgctggtattgttggtcttggtaagccatatgctgctgctgatgatgatagtacgaattgaacgaactgcccatggttggtggccatccgtacagcgctgctgccgcctcgtaacttccgccctcaaattgttgcggctgttcgtgttgttgttggtgttggtccggtctgccaccgatggaacgaagtgcttcttgcgcttttagccatgccggattcatttcctgttccgtcggcacaggaatggcggacaaatcatcaggcaaaggcacttcctctgtcgattgagtttggtatgcagaaagtcgccaattctcattgccagactcattttcgtgtgctgagtttgtcctgtcaccaccttcatcactgtccttcgtttctgtttgccaagaatcagccatattacacactatttgtgtatggctaattgggagtgcaacaagatttaacaaaaaatggagaaagtagtaaactatctgaatactaattaggcgatatgatgattaatatgtggtaaggataatgttgttaacaaagccttaactttgcacttaaaatttaagacgaaaattgcatcccatcttcatttaagattaagcatagagtgtcggagagtcggacgggaaagaacaagaagcaatttccgatcccccactttttaccggaacaatttgttcgcacgaaaaacgcgggactcctgcacaaagtttccgtcttgcattttttgagaatttccgtttctgttcggtaatcggcttggtttgctctatttttggcattatgattttaatttaaattttcaacttttttcggtaaagaaaaatttttttcaactcaccagtctctaaaaaacctgtaaatgttaataaatatcagcatgtttcttctgcctttttttataaacacatatgaaccattgcgaaaatgaactcctgttccataaattctgtttttctctaatatagagcacatacaataaagaaaagaggctgaatgattttaatttaaaattgatttgtagcctaaattccaatggatccatatgatctaatagagcctgtcgatatctcatcaaaattgaacatcaatttcgaaagcccaaaatggcaggaaaggaaagaggccttggacgcactgcaacaattgttgtcgcaaacgccacgacttgctgattcgccaaattaccgggaagtcatcgaacgcttagcaaaggtctataaatgcgaatacaaatagaaaaactttttttttttaaatatagactgtggcaagtgacgcaaatatcattgtcgccgcaagtgcgaccaaatgcgtgatgcttttcgccaagggattacgtgccaaattcacgcctcacgtgtcgttggttgtcccggtgatcttcgacaagttcaaggaaaagaaacagttgctcagagatgcgctggtcgaatgcatcgatgtcatcgcag

SEQ ID NO: 24432 - DNA, 1807 bp, Heterodera glycines
gggcaatagacttttctggggccccgaattcctctgaaatgggaaggaatgaatgccattgtcaaggcattcctcggtagggaactcacttccttgtccacccgtcccaacgcttttttcgcctcgtaatcatttgggtcacgttgcaatcgctgattgtagcgcaaccgttccgcgaccaattcttgaacactcttttgaggcttaagtacaaaattaattaattaatattttgggagaaaaagagtgccttcgtcagcccaatggggtcgggccgagaggaggccaaagagaaaacggcggaggaaggacgcgcggagaaggccgaactgctcgaaaaggtggccaattccccgccggaggggccgtgctgctgaacagccgttgacagaatggtcgcctgcagtgccgactcggccttctgacgggcgaccttaacaaagcaattcgcctgaggcattttcaccccaaaaaacaaaaggacctgtgcctcgacaaaagtattaaatcggtccaaaaagtcctttccatggccccccgtcgtttccttcatcgtctcattgctctgttgaccatttgtcgtcctctgattggtttgtgccggatttttggtcgttggcaataccatcggtgtgccagagtcggaagggacgaacgctaatttggtggctggcggcaaagcgggctaaatgtaaggcataaaattaaaatctaaaacggatactgtagcaaatgggtgttttgttttttgtgcaatttatttttgctttccctcattctctgggttttgactgttttcattcaatgtcaccatcattgtcacaatcgctcgttaacttctcccaattcagtctctcttttcggaatgtttcccttttttaattgtccctccgcccattaagtgccttcttatttatgtaattttcctgaccatcgtttccgtcaatttttcattgtaaagggtccaaaaaatcgttcagtatcaaaaatatttcttctctaaatcaaaaagggactgaaaatgtttcacccctcaaattatgaaggcataaaaaagagaaaggtttggacgagtcttttgattaaatgctcttcaaagtttccctatttaattgaatgacaaactccagcaaaaccatttccaaacccaagtgaaacatttataaaggaaatgccaaaactcttaattcttttttgcgcatcaatcatcggcacaattttgggcaagttccaaaacaaaacagttttaaatgattcacataaatgcaggcctggaatgttggacagaagtgaaaccgacgcacccggaagggtttggactcagtttaaggaaaatgcggtgcccggaaggcggaggcgcgagaatgcaatgcgcagagacaaaatgtgtaacgagtgagtggttggggaaatggaagaagaaaatggggggggggcaaaaaagtgtaaaatgggaagagagagattcacccagttttaaatgagtttggatcaaagggttatgggataaagcacaaatttacggaaggacaaaccgaaaatgaagggaatggctacgcgacggtgggcaaagcgtgcgccgatcgattctattgtgaaatgacgaaaagagcttgcgaatttgacggggaggggaggatggaaaagtgcgatttgtgtgacggggacttatgcaatgggacggggacaaagtacagaaaatggcattttggatggaccatttgcattgtggcgacgatggcacgtaaggaaaacgcaaaaccgaattggcacattcataacattcagtacttacctcctaaaacga

SEQ ID NO: 24433 - DNA, 1842 bp, Heterodera glycines
ataatgattttcgtttttaattttatcttattaaacctttagagaattgatattttttaaccaaataaatgatattttttacgattataatagtcggtgaatttattatagctgcctattaaaatgagaaattgatcaaatcaaatattttataagcaattttcttgttttattttctttcatgaataaatgataatattttttattcatttgtttttgtattcgataaaaattatataattttgcattttactattttttggtatccgatttatgactacaaatgtgaattgccgagaatatttttagaatttatgttttttattagagtatataaattaattatattgtttatctgaacaaagttaaattttttatattttaaaacaatatttaatttttttttaaatagttatatgacattaataattgagatcaaaatagtataaataattatagattattaaattagcatttttatgcaaatttgttggccgttggaagtaaatcgactaaggttgtgtaaagttgttttttctgcacgcctttgtttagaaattatttcgtttttaaaatgcaaaaacaattttacttaatttatgtttaatctatttagttgatcgccttaacaattgtccagcgcaattgtttgtaaaaactttttcctgcacataattttttaataatctttatttaaagtttctttatttattaaaacttatttgcaactttcgttaatgttttaatttacttatttttgcaaagcttcaataaaatttttaaatacatgatccaatcatcatttcttgattaaaataattattttaaatttttatttttagattcgaacaaaatttttctttgatttgattatttctgtaattttggcagcgaaattttatcccgtcgaaattgatttgtaaacaattccaaaagatgaatttgacaagcacaaaaaactctcttttttttaaatttgttttgattttaaatacttaagcgaattttctaatgtataaaagtatttcaaaccactggacatatatccggttagattgcatttaaaccgtcaaatctaattaaaaaatgctaagtaatagagacagttatttataaaataaaatattaatcaatttaaaacaacatactataaaatattttttaattattttatttaaaaaattatactgcaaatttatttattgtgagaaataaaataaataaattttaattattctaataagaaacaaagtgacacaaaattaccgacaaaatccataatttaattatttaacatttgtttttaaataataatgaaattagtcttaattttatgatagagtttttgcaataaaataaattaatttataaagaataataatcacataagttaaaatgaaataatttaaaaattctggaattctttattcatggttttcaaaactaatggccctctgtgagctataatattttcagttacatttcaagatttattcaattgagtgtttaacagtttcaataaattcgaaattcgctaaattttctgaaattattcatttttatttctagaaattttttttaattttcttcatgctatgtgattgaaaacatgaaagaatttatgatttagaattattaatataaagtcggattacaaaggaggttattctatctttcttctcattgtcctgataacaatttatttttttcaataattaattgtcatattattttagcatttttttattatatttatttttttcaataattaatttcaaatataatttgtaatgttatttatattatttagctatatttttatttatattttatatggatata

SEQ ID NO: 24434 - DNA, 1623 bp, Heterodera glycines
  unsure (1)..(1623): unsure at all n locations
ttaaaaattatccatctcattaacaacattaatatttataaatttaataaaaaaatttgttttttacagtacttaatcgatatttaataaattttgaaaaatttaaatttttttttcttattctttcgttaatcagatttttatgagggttttccgaccatgtcaaaaattttttgggaaaaaaatgaagaaaatataaaaatgaataaattagtgtttttacatttatttaacttttgcttttctaccaaattattttattggcaatatgtagagaaagaatctatttgtaggtaaatttgaaatagtaattttattttttataatttctgttttaaatttattctttctatgtaatttatattttgattgaaaataataaagaagtttaatttttttttatatttaaatccatcatttcgtcgttaattaatatttatattttaaataaattattaatttatattaaactttatatacaaaatttataatttttttaaatttcgctcttttttataattacataggttaatattaggtaattgtaaatttaatttaaaaaactatttatttaattttcatgcgctttaaagatggtcttccttctgaaaagttgtccaaatttttatataataattacagacctgagacagcataatcaaaaaatacccctaaaactaatgaagctcaacagaaggcaaaaagtcacaaaagcaataatgactaaaccaattaaaatcatcctaaaatttaaaaaaatatgtttacattattattattattataaatgcaaagttaaaatgagcaatttgtcgtanaggataatcggaaaatttccgccgggacatccanagccttttttttgcctttggacttacaacataatcgcacggatatttctcgcgagataaagatttaatctagtgtttttagtaatcattaaagatgagatatggtaaggccctactgtatccacctcataagtcaaggcccgcgtgcctttataaatgccatttacatttgacggtggtagaagcacaaccgccaaacaattcggcatttagaaaatcggccacattttgcaaattccttttgcgcgagttccgttcatgtgtagacagcagactactgttcaggttacctaaaagagaatgttcttagagctaggaatttatttaaaacaagacggattggggcatttatggcaaaattctccgttcttcctcgaaaataccttcgtcgtgataaacggcacctccgccgctgtaatgtcgcgccattcgaattggttataaatgccgtgccaaacagtcgacggattttgcgcggacacttcggctcgaattggtttgaatccactgatcatcaaacggcgatttgagtgcgcgtcggacagtgccaatgtcaacatccaccaccaaagggaagtggtgatatgcgcgtccgcgttcaatcagagcgggtgtgcccgacactttagcaccgcttggctaattaccaaatcgtcgcgttcgtttgtgatcaggcgcggagcgatgacagaaacacatcggactaatgattcggaatttagaaaatcgtgcacatttttgcaattccttttgcgcgagtgccgctcatgtg

SEQ ID NO: 24435 - DNA, 1322 bp, Heterodera glycines
tgcccccccggggcctgaatggaagccgtttgccagcaacgatcactgagaagatgtggtgcggatccttgataaggccgacttttgaaggaaaaaggattggcaaatgcattgcagctgctcggactagtgcgaattcatgaccgtgagattgaagagagtagtgaagaaacaggaaccgaaaaagtcacgactttaattcgacttttgaatttttagaagtttgtagagcttaccatagaatgattaagcaaatattttttgaaaaaagaaaatattatatataagaatttaaaatttttgggaaataattttttaaaaaatacaaaaaaacctgtggaaattttatgggataggaaattggttgagtttccatagcttaaaaatcatcacgaaacggggattgtgcttggatttccataatttaagaaagtttatcaggaataggaaacctatttttttaattagaaatttaacactaaaatttattttataaattttttaaatgaaaatgagtcattttcctatttttcccgtcagcaatcacttccccaagttttcatttcaaattaagaataagacttaaaattattttctttgaatttcgtaattgactatcgaaattatttttcaaaaattattttctttgaatttttcgagagatatgaatggcgttttcgtattcgactattgaaaattactatttcgtttagtttcgcttttttgttttgtaccaaatttgcttctctcatgaatatttttttgtactttcatccgcctccgataataactaatgacaggcattccttttacgcgacaaagaaaagtaacaaaataagcaaaaattgcgtaaatatagaaaagagaataaaaaggaaaagaaaaaaagtgggtctgtagagctaaattttatcgtttttttaccattcaattgctcttcgcgtgttctatcaaactaaacttcgaaaaggaaaattagtaaattctgattaatttgctatcaaattttctgaattgcttaaatagagcaattagcttttaaatgtgtaaagctttcgaatgacaatgattttaataaagttagtaaactaaaaaaatgatccacaaaattgtctggagctaaaattggcgagctcaaccgacccatccgaaggaaaaaactcaagaaagtgttttaaatgacagtaaatgttttgacgttttaaatgcttttggtttggttagtgctccgtctctgctcggcttccatcacttttttcatccaagcgatgccaaccccaacccttgcagttggccgacaatcattgggtttgcccccgaat

SEQ ID NO: 24436 - DNA, 1654 bp, Heterodera glycines
tttggcacggcataactcggcactcgtactcattcagcaaaaataaaaacacttttcttaagaacccatgggtgctctatccacccaccaaatttcattcggaaatcccacggacacccggggaccttcctttgtaagccacttgaacaccaatcaacaaatttcattgtttaccttccttcccttgatttccttaattaatttttgacttacaccccaatttcgatgcataacaaattaacatttcgtaataaataataacaaatgcaaactttgaacccaaatttgtcagtttaccatcagcttcgccatttccttgaaatgatcaaaaaatcaccagtcagtgttacgctgggaattccccaccattttgcttataatacgcaaggaaagacactgaccgagtccgccaacattaatttcaacgaaatgattcgacgagaaacgcagaaaaaaagacaattataaggaaaggaaatattttcgaaaataatacaaattaagtgctcaaagatggtttagttaatgactagattaacaataagcgaggcatttaatgctgagatttcgtcccgtctgtgccggcgcaccgatcattccgcggatattgttgaagaagagtcgttgtccgggcatcagctgaatgtcgcatatgttttctgcgcaaacgcggccaaacttttgcagcgactcgtaaagttcgtccagggaatggacggtaattgcgctggaacgcgcggcgttgttgaaaaagccctactggtgaacaaaacattttgtaactcgctgcaaatgccagtacaaaccggcagaatatggccttggtcgtccaccctaacgacgggatgagttgcgaagaaagggccctgtcaaaacatttccatttcaccacaaaggaaatcccattgtgatacctcggcgtactcgagaacacaagtcccgaggaagaccaaatgtttggggtatcgcttcctcatttcgatgagcactttctcaacgtcgacgaaggaaagcctagccggcccggaaagactgtccaccgcaacaaccgaagggactttggcgaggtgcggccaaattgtgcccggctcttgcgcttcctctccccagtaacatttgcctaattcgattccgtcttcaattggcactcgcgcgtcagaaaaagccagcaaatggccattgagtgggccagccatcgatggctttgacctgccaaattgaccattttgtctgcctctatgagcgccgtaaagcctttccacggggctatcgagggcaatgtcacgaagaaaattggaagtgtatctaaaatgataaaaggaaagggtcagtatttaaagaaagcaaaaggcaaagcacccgccttgaggcaatgaatggcggccattgcacttcgagtgcctctctgctgcatttgatttcctggggccgcgtgttgaggtcgagatggaccaacgacggacgccggcgggcgttgtcgcgtaaccaaacgtaattgaactgaaagtcactttttgaaatggagagaccgatcgatccaactgaatgaaactaacctttgccaaaagaccatcttcccactcgacttgaacatatttctgcaaatttcgcgcggtttttagcccaaaccatttcaattttatcttttaaattg

SEQ ID NO: 24437 - DNA, 1462 bp, Heterodera glycines
  unsure (1)..(1462): unsure at all n locations
cgtaaataagactttttttcaccattcatttttgagaaaaccagttaaaaaaaaattttttttgaggcaatacttttgcacctgactgtatatcaatcgattcctctaggtctgtaatagaagaatccgaaagaatttttctgcgggaaccaatccctgaagagttacagacccgggactgaaatggccaaatggctttgggactgaaccatccaaagccataaacgcatggaattgcgaccaaatagacaccaatcgattcctcacgttctgctaatcatgaatccgaaggaatttttggataaaaaagaaattggaaaaagttatgggccatcaaaacctatgaaattactgtgacaaaaaaaccaatttaccgtaaatccgctatttgaatgcccctctctggtagaatgccccctccaattatttatttgtttattcataaaaaataaaaaagtcatcagaagggcgagaaccacttactctgacgactatcagataaatgtcgtagagtaagtgacaaaatatatggatgatcacaggaattaaaaaaagacaaaatatgtgaacataaataataaataaataaattgaggtcaaagtcaatgaggtcgaaataccaaatcacttagaaatttgttacattctagctttcccggtcttacagattaccctagtgaacttttaagttttattttaaattgatttaaagaatttattttaatgatttctttatcaagttgattccacaattttgttaccctcccagcaaagggaatgaattttttgcccagtttatattttgagttaaatctgtaaaaggggatgttaaagcgcgttgagggattaaaaatagaaaatagtttcagatctgttcggccataagcaattttatgcgccatgaacagatcaaacagctttcgcctattctcaagtgttggcagttgcaggtattctaatcgattttggtatggaattggcggaaggctgcatttaaaaaatacccttttggtgaaatatttttgacacttttcgatttttttaatatttttttgaagagacggattccaaacctccggagcgtattccaataaaggcctaatataagttttatataacgtaatccaaatcttagacgatttggatttaattattcgaaacaaggacgcatacgtaaatacgcattccttgttatttggttaatatgatcggaaaattgtaatttgttatcaatgtttactcctaaatccctaattgtatccacagcatttattgtatttccatcaaatttatatgtttcttttgggttttttgaacccaaatataatacaaaagttttttgaattgaaacttttatttgccagttatttgcccattcgaataaattatgcaatgctttatgcataatttccgtgtcggctcttgctttataacaaantatataatttaacatcatcagcat

SEQ ID NO: 24438 - DNA, 2095 bp, Heterodera glycines
ttgtcagttgaatgctttttggttaggagcagaatgaaattttggaaatgactgatttttcactgattggacagcgcttaaatgcggtggccgacagtgcccaaatgggcggtccctgcggcagaagcagcgcggctaatgggcgggaaccgcatacatcccactcgtcccccgtccccaacacaaccccatgggcgggatgggcgggcggtgggtggcgctgtgacacgtcgcgtaaattgtccaacccccccccccccccatgaaagccgagcaaaaagaaattcgaatcaacaattagctaaagggtaggggggtaaaaactgatcgctaatagcgataacagccaaattcattggatcggattggggatgaatcacttttggatgtgcattccatcaatggtggcggttggtgctaaacgatggtcagaaatgaatgaatttgtaatgagtttttttgatgatcaaaaaaaagcaaaaataaatttgatttgaataaattattattattattttcaaataataataagcattttgtgataaatgcactttaattgagggaaatggaagaggtactgtaaaaagattgaggaaaatacagtatgatgcaaatgattgaatgaattcaataaatagactacaataattgcaaatttgtgtgactttatggctttgataatctattgggtaggtataccgtaaattattcgatcagaaatacagtaagaataattcctctgctcgtatttgaacggctttccggcattttaaaattcaatctttgtcagtgcgcttcgcagtgtgtcgcaattcaaaattttctatcggcgaaagtgcgacatttggtgtgatctttgggctttggtctcacgaatgccaactctgatgagtaattgtggatgtattttgtttcatcggtctgacaataagcaaaaccgaagatccaagcttttgtctcattctccagactttcatctcaaaaaatttgtcttttcaatttttcgattgttcgatttgagactttttcctgattcgaaaagttattgatgaatgatcagaagaatcttttttttcttaaataccgcatttcttcatgtttgcttcaggtttcaattgcgtcagattagcaactgatggatcaattaattgtacttaaaatttataattataaaactgcttaattgtttaagaaattgtcaataagatttttgccagtaattaattaatgccattttttcaattattatgatgatttgcgctatttaccaccatttataattaccacaatttgcgaatatttttgattttcattaccgtttaagatccttaagaaattgactcaataactttttttaaattcttccattattttgaattattcttctcttgaattcgattcatttaagatttgagagttataacagaataaaagttaatcattaattaagtcaaactaaatttacaaaaaataatatcgaacattgtgccggtcctccatatccatatttcaaaaattggtcataattaattttataagtttattagttgtttttttttgaaatttcgttttggcacttacttccacaatctgacaaattttctcgtatcacatcaaaaaatgtcgtaacttttgtgtggatttggaattggttgaaatagatgtcaaattcctaattaacgacccgaatattcccgtcaacaagttttcatacttatgacaaaatttttcgggggcgccatactgtgaagaacaaattattttaacaaatttgtggcagatggaatgggacaatattgaaaaggatgtcaaaaaataatactccaaacattaattacttcattaattatttataaaatcttttcgtcgctaattgaaaaaaattgcttattaattgaaaggcgttggttgatcaatgaactatgatggatgaattacgtcattttactttcgtaaaagctaccctcaaaataattaatgagtctgtctggtggtgccgatggagaaaattaggaaaatttagttactatttattaaagattccatctgaaaattgactttttgattttagaaaataattttgaaaagtgcttaa

SEQ ID NO: 24439 - DNA, 1655 bp, Heterodera glycines
  unsure (1)..(1655): unsure at all n locations
ttttgcgtctgtttctgcccgccgatgtggtgacgacgagagcggcacttgcgaatacgacgcggaggagggtgggcatggaatggcattattgttagtcattgttttcgttttccggcattttcacggtccgaatgccaaagaagacacccggcgaacactttgcccgtttggaaatgcttaccgaactgctccgaccgcaggagccgaacgcgcaacggatggtggaggaattggacggcggagcggacgaattgggcgggggtattattaattactacgccgtttcataaaaatgaccccgtgttatacaaaaacagttaatacaatagaaattcgaacctataatttttagcttatttggtaacattcgatgcataatgaagagttggaaacaatgatttaattttatatctcaacagatagcgttattaaaagttatggccaaaaaattcgaaaattggccaaaccatcaaacttggatttctctgttaaacatttgttttttgaactttatcttgtcaatcatatcgaatttgattaactgaccaagtttcaagtcattccaaaaattacaccataagttatgcaattttggtctgaaaaagtgctaattttctttgcccatccaaatttatttaaaattcgcattttttaaacgacgagacaatttaatagcttattttaagacgcgtcatcagggctttcgatttcatttattacatcggtttttatttcattagcaatttttggaaaaaagaaaaatggatcttcttttatgatgcgaacctaaatacaaaaatgacccaattttatcctgcttttagacaatgatagcattgactgtttcgcgcaacagtctctgcccgaggatgggccaacaacttcgagcagtgcagcgacggcactgttcggctacggttttggttggcaacggcacggcgtgctgggccgtttgttggccgacattggccaaggcgagttgcccatcgaccttgaggacccggacggaacaccgatcgacgaccgattagagtgtcttcacgcgttcgacgccgaccattttcggcccgagcattacttgtgagccatgaacaaaatagggaacaaaagggaggaacgggagaaatttcgaaaatgcccttcttgggcggagtcatttctttcgggagtttcgaaaaatgccaaaatttaatcacaaaattcgaccgtcgcgcccaattcgttgcattttgtccaatttagagccgatttgcatgaatctgaccaggcccaacttgatgcgatggagtttgacccgttccaacacaaagacagcagcaatttcgcgctcagcgaccaggacagggccgacctcaaagatttgccacgacggaaattgccgcatttcgcgcgggaggccatcagacaaattgtgcgctcgttggttgacattctgttcggctttctgtacgacttcaggacaacattggtgaggagacggtggcattccatcnggtgggtcgttccccccaaaaatnattttgttttaaatagaaattcggaaaatggtttgagaaatttctaattaatttttttccggntttggacgagggtcgacccccccccaaattttttgtttgtcacaccatctcattatctatgccttcgaattg

SEQ ID NO: 24440 - DNA, 1666 bp, Heterodera glycines
  unsure (1)..(1666): unsure at all n locations
ctcgcaacccagaggagctgcgattcagcgctggcctctctcccagttctctcgtcgttactactgaaatcctcgttagtttcttttcctccgcttactgatatgcttaagttcagcggtagttcacgtctgagttcatgccgaaaaatcatagcacgaatgccagcaatccacgaactccgccacaacatgcaaagtattggtgcgtccgacttacggaccgtaaaacgttaattataaccacaagttcgcgccagcacaccaaaaccccacagccgagctaagcaagtaacggaagaacacgtacaagtacatgatcccacgaagtaacgcacaagcagtgcattttatggtaacgaccctgaaccaggcgtgccaatggatgtaactccaatggcgcaatgtgcattcgaatgttttgtgttcaaggtttctgcagttcgcactaattatcgcagttggccgcgttcttcatcgatccacgagccgagtgatccaccgataagactagaattcattcttcaacagaagtgtaaaaaaaaataatgaaaaaaaaagaaaaagctggcggtgcccgagctgacactcattgagtcttaagccacgtgctaggccaagcacgggccctaccgcgtcgtctcatcacggccacggacgtagcagcaagcacaaacacaccgctagttacggcacgtaagaccgggaacgaaaccaccatccccagtcagtgtgttatgtgcctgccacaacaaccgctcaacgacgcacagacgccagcacagccgttaggtcgccccacgagcgtgcatcccacattggcgcagcgaaccagccaagcgaggcggcccgccaccgacacattgccacgcagcagccatacacaggctttcacacgtgcagcactgagcggtataccacagctccaacgtatggaagcaccccaaaagcatggctcgtgaggcagctgccccgtaatgttgggcagcgtccacaagtcatctcgaacgacctgtgcccatcagcggacgggggcatttggtggtgccaacgctagcccaacaggacagcaggtaggtggtgaataggaatcacttgggtaatgatccagcagcaggttcacctacagctaccttgttacgacttttgcccggttcaagccactgcgattaaatcggttccagtctgcataccgaccgaagccggaacactaaccgtccccgaatttctcgaaatggctcagtcccgggcagcgacgggcggtgtgtacaaagggcagggacgtattcagagcgagttgatgactcgcccctacaaggaattcctcgttcacggacaataattgcaatgtccgatcccaatcacggcaaattttcaccggtttaccaaccccttttcggggaaggacaagcacgctgattttgccagtgtagcgcgcgtgcagccccggacatctaagggcatcacagacctgttattgctcaatttcgtgcggctgaacaccgaaaatccctctaagaagttgtgcccacagaagcaatgagccaactatttagtaggctagagtctcgctcgttatcggaataaaccagacaaatcgctccacgaactaagaacggccatgcaccaccatccaccgaatcatgaaaaagctatncatctgtcaatc

SEQ ID NO: 24441 - DNA, 488 bp, Heterodera glycines
agtgaagaatgggatttggattatccctcccgccgctctcatcccccctttcccttctgagtttccccgggttcatcttccaaattcccttccccattctttggctttctttcccttctcttctcattgagaggaaatcattgcggaaattaagtgaagtggaggccattttcttccccaaaattgcaataccccgaatttcgaccaagtttcgttttcgtttgctttgctcagagtgaccacagatgaatgaatccccttgggggtcatccgatgcgtccgagggccttaattgctttccaaattcgccgttttttgtttgagcccctccctttgctccgcccccttggcacacctctagtcattctcaataacgcgtatctgtgtcttatcgagcgtccaagctatactgtttgaaacttcgagagtaaacgaggtagaatatggttagacaagactttcacccccatacgcaagtcccacgatcg

SEQ ID NO: 24442 - DNA, 553 bp, Heterodera glycines
gtgagagaggaagagagagaatggagggcgccttagtgagaatggagagatatagatagagagggagagagagattggagagagggagagagagagtggagagagagagagagagagagggagagagagagagggaggggaaagaagggaaaaaagagggtaagggggagagagagagagggcgagatggaaacaaagagaggtcgaattgcctaatgttggaataatttattcattcaatgggtgaataacgaagaaatgattcataattgagatgagctaaaaataaattgcaaaaggtcaaaagagaaaagcggggaaagcattgcaatggcaaaagaatcgaaatgagtgaatgaataatgaatgatacgatcagatgtccggtcattagcacggggcgagaacaaacttagaaaaatgaaaccgtcaaatttttgctttggccctccccctttttctctcttctcggcccgtaccaaaagaacgaggtaaagttaccgggtaactttacctggtaaaagctacccgcagctgcgggttctagaaccga

SEQ ID NO: 24443 - DNA, 1823 bp, Heterodera glycines
tgataaaaactcggaaattttcggaattttttttcaaaaaattagcaaattttgtacaatttttgttaataattgcattgaaattttcaaaattttcccagcggcgccgaccggcacagccgattttgataaaagtcatgaataatttatcaagcagatacatatagaaatataccaaaatatttttgaaatcacctttcatttggtttagaattttaaaatttaatctaaaaatatttttaaaaattttaccatattttatatttttcaatccgatttccgacgttttggggtcagaattccgatttccgaaaatttttgtgccctcggaatgccatcctttgtttgtaaccaaagcatcggaacccgtcagcagttgggccttcagactataacttttttctttgtcaaccaatccaacaaactagtatttacatgctctattagccttacaaaaaacaaagattttctagcatttaaaaaatttatcaaaaaaaatcaaaaaatttgattttttttgcaattttcatgtataacttttttagtaattgtctaatcgctaagcaatacattagaaagagcatcaaacatgttaagctttcgaaggatatcaacaatgttggatttggttgacaaagaaaacttcttaccttttataaatgaagttgggtgaaaattatccgtcgaattgattatttgattgatttgggtggtagggggtaaggtaaattgcacggcaaatttcatcattttgcaaatattctcctctttagtgttcgttcctcttctgttgtggcactgccattggctctattccagtttacgcgtccattgattgaccacactcaattttttaggtcataacttttttcttatatatttggtcaatccaaacattcttggtgtcattcgaaagcttgaaatctacagaagtttttctattgcaaaattttgggataaaggcaacagacaacaaattattcttgattatacgcgaaaaatgatgaatttcgagttttctaattgcattttttttcgtaatgcaagtattaactattttcttatatttacaaattccataatctttaagctttcgaatgataccaataatgtttccatgccattccctttttctgctcgccggattttagaggttcaaaaaaatggaaaagtctgccgaaatgttagaggacggagttctcaattggggacaattgaatttttggagggcgggaaggaattggacccgaaaaagtcgaccactggtaaaaagaatggcaaaacgaacccgatcttcagaaattttggtggatcgtacaaggaattaggaaaagctgggcatcgaatttcggcaaattttcgacaaattggcaatgtaaacgaaaatcgagagaaaggaggcggatggaagagaaaaaccatctattatgcgactccatcggggccaatccctaaatttgttggatcgtcgacggcggacggcaatgtgtcagctgagaacccttcctttcgggccgaatcgaggaaattttgacggcagagacgccttttttgttgggggcgggatgtgataatgacgaatatttattttagttttaaatttattggcgttttgttcttattattgtttgtgaattgttttagttcttcttttttcagactttatgtttttgaattcatgaagatatttttatgtttattatcgtctctcctcctgaattttattgtggtgtttgattttaatttggaaataaattgtgtttgtatttgcttgtgtgttataatttgattgagcagcgaatattagagcccccgactctctc

SEQ ID NO: 24444 - DNA, 2338 bp, Heterodera glycines
tcagattctgaacacgcatttttctaccctcgaaaatgtgcttcttaaatttttattgtcaaattttcgcagaaaaatgcaccattgcctatgactcttcctgacgaattttttgaaaaaaaaaacaatttacataatttttaaaaacgaatttaatgccaaaattacacacaatttgccaacacgcacacatattggttgggaataaatatccagcagatacaaaatcagggtgggggagatcgggggcatcatcatccaatttttcgttgtttttttttttgaaaattttggtcacacaaacacattaccgtgaccaattaattttttattttctattgtattaccctatatttatttaccatcattctttttttcaccatcatccgcggaattgttcttcttttccttctcttcctcctcctcatcatcatcatcattgtcatcggccatcaccagtttggacgacgacgactgcttgtcctcctcctcttcctcttgtccatgtttgccaccaccatcgtcgttgtcatgctcatgatcatcaccgtcacactcagtgccactttttggtgccgtcaccgtttctggtggcacagcaattgccgccttctgttcctgctgctgctggtccgcttcaacattagccgccaccaccgtctccacctgctgctgttgctgctttggttcctccggttcagtcgtcgtccgatcattatcatcatccttttgatcagtttgctgttgctgaacaacagctggtgctgccgattcaacaatatccgctgctgctgcttctgcttgcttttctgtagttgtagttgatgatgatggcactgtatcaacaacaacatcagcaactgtagttgatgatgacggtagaggtggtactgtagcgattgttggtgttgttggcggtagaggtactgtaacggttggtattgtgggcgtcgtcgcaacactgctgttggtggtggctggtggagctgtactgcttgaacttgacgacgcattcaacttttccaacaccgcgttcagcttcagacccttgccggcgccaccaattgatgacatgccaagtttacgtgccggactttcggtggcacgatgctgctgttgttttagttgagttgttatgccgtccgtcattgaggtgaccagcgggagtgaaactgaaaaatgttaatttcgcaaatgactcgtaattttaaaaatttatagttggattaaatttcgggaattgatccaaaagttctctcatcctctatattttttgtgttgaaaaaatcgtttttaggggtacaaaatttaaaatttttttttttgaaaaaacggtaattacaataatttttttattaagcaagttttttattggatcattcatatactgatgtttttgcataagtaaggaaaagggccatcatgcatttgacacataaaccattatatatgacgcacaacacgacgcacttgtctttgccgtctccacctttgtgagcaccgtttttgttggcgtcgtgccaacagcagaaacggcgccggtggtagacgaaccaccggcactgaccactgatgatgaagcagtagcagtagcaccagcagcagatgaatgatggtggcgcatgtttgccgctgctgacgtcacaatacttttttgctggctgtggtgttgttggtgatgctgctgaagcgatgatgatggcgccgccggcttcggcggcggtgccgtcgccatgctaccgaggcccatcatcaacgcggagctgtccatgccagccgcttggaacagttgctccaacgccgcgttcatgctggccaacgaggcagaagaggtggatgatgaggacagcgctgttggggggaaacagggggataaaatgaggaaaagggatatagaagaggtggcgaagtatcaggagggtgcacttcattcccccccccctccccgcatcgtttccccccgaaatttttttttaaaaaaaatcttagagttttttcataagaaaattccaagaaaaaaattttcgagaaatttttatggtgaattactaagatttttcggctctaatgcactttatgagtccaatcgacttttatgagtccaaaagtattttatgagtccaatcgattgacaatcctgggtttttatacaataactttgttcatgttcgaacaaaccctatctttttggtatcattcgaaagcacaaaatctacgaagctaaaatatataaaatcgcagcgttcaggcaattaccaaaaaagatttgattaattaagtaattgctgattattttcgtttgttactttcttggaatgttagaattctcttgttttct

SEQ ID NO: 24445 - DNA, 1701 bp, Heterodera glycines
ctcccttctcccaggggtattattttgtaaagtcttcttttccccaataaacttttcaaaccccatttttcgcaccgtcaatgttatttttattgaattctgaaccgttttgagtagattagactagaaaaaattgaaaattttgaaatcatgtttcccactcccttctcccaggggtattattttgtaaagtctttttttcaaaataaacttttcaaaccccatttttcgcaccgtgaatgttatttttattgaattctgaaccggtttgagtagattagactagaaaaaattgaaaattttgaaatcatgtttcccactcccttctcccaggggtattattttgtaaagtctttttttccccaataaacttgtcaaaccccatttttcgcaccgtgaatgttatttttattgaattctgaaccgttttgagtagattagactaaaaaaatatgagtgatcaaactttcactaaaaagttaagcctaaactttttcccaaagttaaaaagcaattaaaattttattcacctccattattgatagaaaaagcatcagagtgcctaaactaacatgtaaataaaatttggtgcgtttcagaaccctttctgaaaaaatatttatgaattaattttgcaaataaataaaaacgaaagactcagattttcgaaaaatttttttgagccagctagctcggcgctcatttcagtgtaagttagtcctttaccggggagtatccctgcaaagtttggtacgcttctgctcaattagcaaaaaatatgagtgatcgaattttcactaaaaaagttaagcctacattttttggcatatttaaaaagcaattaaaaaatttttaaaatttaataattttcctgcaccgaaggtactcactcggcctcttcgcggcctcgtggtgggccttcgcccccccccccccctcccacgcccttcagagcacgacaaatatttcaacaaaaattttgaaaaattgactagagcaatcgaacgctaacggacgacctaatggaaaaaaatccccgaaggagagaatttaattaaatccattccttcgggggaccgtgccgggtgccgcggggtaagcagtgctggttcgtttcatcacggcaccgaaccttttggctagtcagcaatcgttgcttaacttgccagatcggacgggtgcgcatgattccactgttccaagcaccccaccaaaagcaaaacgatataaccaaaatataaggaaaaattttttaaaaaattttttctccatcttcctttttgatactaaagcatcagagtgctaaaattaagttgtaaataaaatttggtgcgctttagagcactttctgaaaaaaatatttatgaaacaaaaaaatcgattttttcaagtgtccgtttggggtactcaaacatttatggggagcaaaaatccaacgcagaattaaagtacaggctatagggaagctattcccgaaggattcggtctccccataaatctgggcgcatcggttcggggggactgccccgaaaacaaaaaaatcgattttttcaagtgtccgtttggggtactcaaacaattatggggagcaaaaatccaacgcagaattacagtacaggctatagggaagctattccggaaggattcggtctcccataaatctaggcgcatcggttcggggggactgccccgaaacaaaaa

SEQ ID NO: 24446 - DNA, 1619 bp, Heterodera glycines
tatgttgtcatttgctataattattgtgaattttttggtggttcaactccttgcctgcgtcccactgatcaacagtgatcactgatcagatgtttttctttacagcacaaatccagcctacgcataaataaaaaaaaaagtttatagagccccaaaaagttaataataatatttcttaatgagccatcatactaaaacaagcaacattgaattgaaacatggtcactaattgtttaaaaaggttctaacagcttttggaagccgccctcttcaagggcttctcaattattgtttttaattagttcggaaattaattggctaattaagcattcccatttgttaatttaatttgtttaatttacgctcttctccattagcggtggtgtacgaccacgcttttaagatgatagtgggagggagtagcaattatcgaggttggccaagtcaatgacttgaactattgctgaaaggcagcactaacgcatcagcagcagagcaagcggagtttgacaacgacatgatcgacgtctgaccaaagattttgtagagaggtcgtccggtcgaaaactttcgaaatcagaataacccaggtttaccatcggctgagctcaattttaaaagtaaaggacagactaatttgtattaacaaaaatttgcaacaaatttaatgacaattcaacaaaaaaagtgaattacaacataaaggagaagcaaaaaacttttgtttccacatctttttgcgacacacttttcattggaaaattgtcagcataccagaatggcccgccatgcgcggccccatatgttttcctggaagccgcagtacgtcaacaagaatgtcaaacaaaatgcgatgttgtcggtcttcgagagtgcagtgactaaatcatagttcataaaactttcaaaaattaacagtaaacaaaatatatacgatcataaaaaattgctcactggcgagcccgaactgtggccaaattcatgtgccaatgttaatgtggacatcagcagcgtgcttgtgttctttcgttgactagagttatgaaccccgtgttgtttcgttgacaaaccccgcggtcattgtctttaaagaaacaggcgaacttgtcctagtccaaccccatatttaagtattaatttatacatcattagggtggaaattttttttgattaattgataacaattggcacaccaaatataccagagggagcggcttgccacactcgaccccatatgttgtcaaggaggtcgcggtgagtcagcaggtaaaccaagcaaaatgtggtgctgttgctggtctgtgtgagtgcatggactaacccataggcgtccaattcctcagcacagaatggattgttgctgaacccaccaacgccaactacgcacgtgtctggtgcgtaaatctttgatggggttgaattcgaatcccgtttaaactccaaaaatacaaccccaactacaaactgtggtccgttggatggcaaaattaatgcccttaattccgtcgaagtcggtgttctcgtaaatgtcatttacgcccttgatcaattcactcatgaacattcgaatttcgctgcgcgttcaacaaaggcaacgaaagatcggaaaaccagccacc

SEQ ID NO: 24447 - DNA, 1019 bp, Heterodera glycines
atttgcatcaaccttccgtttcaatttgtacattgactttctcacagatgaacttagcccattgaaagtgacttattccgtacgtcccccgtcgggaccgtctaaattaggagcagaatttcatcataaactcaatggttaagtttttatttgatgggaaaatggctaacatttaaaatttgtgccattgacatttcgtaaattggcgtttcgtaattaccccccccccccaatttctcacctcggcaccgttgcgtcggcttttcccacccaatgtctgtgctcttacgcgccttttgggggtttcggagaaaaaatttatgaaaaaataaattttatggcgcacatttaatttcatcagtgtgtatttataatatgaaaagagaccaaatttcaatcatttccctcctccgccagcattttttgtgctccttttaaaagaggagacaacaaaaaatattttcagtcactccccgtcaaattcaaaaaaaaaaaaaattcaatttttattccgtcaaattgaattatcattttttaaattttgctaaaaatgaacgctttctgggtaattagttttatagaaaaaggaaaacaattaataattataattaatcaaatcaaatttaaattcgaaatatcattccgtttccttttggcgttcagtttcaacacgaccttggcctgatcaaccatttggtagtccaacagcagcagcaaaggatcaaaaaggagatggccgaggagcagcagcagcagcagcagcaacagtcgctgctgaacaatggccaagcgaagtgcggcgccgtggacggagccgcggcacagcacagaccgccccagcgcatcccatccgccacgtcgagcatttccagcggagggcactcggagacggaattggcacgcgcatctcccgcggcattggtgcgacgcttaaaagccatttgggggaaaacagacgaaattggagatggggagggaaattatggcgaaagaattggcattggattaatttaaaataa

SEQ ID NO: 24448 - DNA, 2325 bp, Heterodera glycines
cacctttcccatgtttttagccttccacgaagcgggacacgccatcgtcgcccatttctctgaccattcgaatcctttgcataaagtgaccatcattcccagaggcacttctctcggccatgtgagtgtttcgcgtttgatttggaaaaaaacggttcattaattgcagacatcgcaactgccggacaaggaccgtcaccaggaaacgaaagcacagcttctcgctcaattggacgtgacaatgggcggccgtgtggcggaagaattggtttttggccaggaacacatcagcacgggcgcaacttcggacttgcggcgcgccacaaaggcaaaaagggggaattggcatgaaagaaataaaagcatttcattttaaggtggcggaacgaatggtgaaattattcggaatgagtgaccgggccggacttcgcgacttcactgttggacaatcaaaagcattcccatcgcaatgttctctttaaggtggaaccgattgaatctgagcaaggcttttgtgtggaaaggggcccgagcaccagcgaaacgatcgaccgggaaattgaaaatctgttgcagcagagccacgaacgcgttaaggaactgttgacgaagcgaaaggtggggagggggacaatatgaaagggtgtttggacaacagaaacaaagagtgtacattttaaaaatggcaatttcagaaggagcatcatttgttggccgaggctctgttggagcacgaaaccctgtccaaaaatgacattgagaagttgctcaagggcgaaaaagttatgaaaccgccgccgaccccgccgaaagggcaaaagcataagggacggacattggcaatcggaaagaaggcgaaggacgagggggggcgggcgtaagtaaagaaaacgaagcgcggaaagaggaaaaatgtgaaatcgagaaataattttaaattgtttagtgctgtcgttgctttttatacatacaaataaattattttcaaatgcatctttttgtcgtttaacttttaccttttccaatttaaaaatgccattgatccctttggccattgcccccttttgccctgtcggaattgttaatttggcttgccaaagcacagagtgaatgctcaaaagcactgaatgaatgggacgaaactgcgggggtatttgaggagagatgaaaaatttatgggaaggcattgagtcaaatggcatttactgtaagccaaccaattctttttgggaattacggaaattggctaacatttgtgcccactctattaacaaaaacttcaaaaatgcgtcggggccctccggcgatgcccacagttccgacgagtgcctgcggctacgccgggggcgcatgggccattttcggtaagttcttcggatttggcccattggtttggctgacggattcggacactttccgctgccctttaggccaaatgccgggccattcgaatgtcgccactccgtccctttctgcccatcccgcgcatgcgttgttagccgcccatggcaccgcggggttcgccggcgccgccgctctgttcgccaccgtatcgacagcaccgtattgccagccgacgtcgcttttccagcggtacaatagggaaaggatcactgaactgtccacattcccttgttgtcctcctcccctcataatccgtccactttttctcccatgtcccctccccttccgaggcttatattttccgatttttttaccgctccccccgctcttcgctttctccctctctctccccttctctccctctctctccccttctctccctctctctccccttctctccctctctctccccttctctccctctctctccccttctctctccccttctctccctctctctccccttctctccctctctctccccttctctccctctctctccccttctctccctctctctccccttctctccctctctctccccttctctccctctctctcccatttctcccccttcctccgattgatgcgtttcctccactgccctatgggcgcacctgtcctccctcatttccaaattcgttcttatccagtgtcttcatttattcattctctccaccagccccacgcttttggccgataattggcggggtcgacgtcccccccccccccctccccccctgggggcgttctcttcggcccattaggcgattaatccgtggacattgggggacagattcggtcaaattgacaatgtgcctgtgagcggcacatccggaagaacagctgggggaagggcaccgattgaaggggggggggggggaaggtgggaaaatgtttttatgaaagagacttgacgga

SEQ ID NO: 24449 - DNA, 567 bp, Heterodera glycines
tgaccaaaaatgttaaaaaaggttttttgagtttctcaggtcataacttttttggaacttgatgatttttttttgaaattttgcatgataatagaaaacacttatggctaccgaatgatatcaaggttttaaaattttcttcattttgggcgaattcacacaaataaacaatgttaaattaccgtatcatccaattaccgcactatctcattttccaaaaatactactgcatagcagtgacgcatttttttcattggagctttttccacattttccaccgatgcatttccgggcacgcacccactcacgccttcttcttcttcgctggttatgggcctgctgcccatgccccaccccaattaaacgacgactaattaggcacccaattaataataatttagcccctcgcgcagaaagaaaaatgggaaaaaattggacaaaataataaaaaccgatgcggaagaggagaagccgaagaagcaaaaggacaaaaataatgggaggaaaaggaaggaaaaaaaggagaaatcggagatgggaaaaatgggaaaatttatgtgagtgaat

SEQ ID NO: 24450 - DNA, 1038 bp, Heterodera glycines
  unsure (1)..(1038): unsure at all n locations
taaaagcaatgcttccaagtgtcccggttctttcagatttgtcctgatttagaaaggggcaattntagaaattcagattttcnncaaaaatatttcacgggaaaattttttaatcagtttttagcaccaccaggtaaaaagtaccaaaaaaaacggaattttttttcgcattttgccaggacacagactttggcttcaccaccttcgttggtgggcctggcattttgggaggtggcgaatgcaatatgaaaaacgggaaattgaagtacatgttcaagttggctgacggtgtgacgattaaaaatgccattcttgacacgccgggcatgggcattttctgcagaggcacttgcacgctggagaacatttagtaaaaattttttttaattttcaatcatcctattaaaaggcatagctagctatacatcttctttcagtgggaggcggggcctttggcaaatttgttgatagatttgcacataaactgctgaattgtggctttttggaaaaattagtgaaattttctattgagaaatttggatggggggggataaggtaggggttaattccgtcccgccagttccgtcccaggcatgtttaaaacagcataacttttttcagttggccaaatgttataaatttggcttcattcgaaagctctacatgtttagaagctgttaataaactaatttctaagcgattgaacaatttattaaaaagttgcaccatgaaaactgcaaaaaagtccgaatttttgcatgtttttatttataactttttacattccggtctttcttttgggaaatttgggtgaggggggggggtcttggacgggtatcaaaatgaaaacagaaattcagcaaaaaaatatttattatatatatactttttgtttttatctaaatgtaacactgttgaaaaattggcacgattttttcccacccatatccaaattaatggttccgcgaaagtggcattttttctttaattaaattttaattcattttaaatttaaaaaagttattttcatttttgtat

SEQ ID NO: 24451 - DNA, 1345 bp, Heterodera glycines
tttcaaattttgttgggctcgggctggcgcttcgcgcccattttttaaatttgtttgggccagacgggcgcttcgcgcccgttttttaaatttgtttgggccagatgggcgcttcgcgcccgttttttaaatttgtttgggccagtcgggcgcttcacgcccgtttttcaaattttgttgggcttgggcgggcgcttcgcgaccgttttttaaatttgtttgggccagacgggcgcttcacgcccgtttttcaaattttgttgggcttgggcgggcgcttcgcgaccgttttttaaatttgtttgggccagacgggcgcttcgcgcccgttttttaaatttagttggggccagacgggcgcttcacgcccgtttttcaaatttagttggggccagacgggcgcttcacgcccgtttttcaaattttgttggggccagacgggcgcttcgcgcccgtttttcaaattttgttgggcttggacggacgcttcacgcccgtttttcaaattttgttggggccagacgggcgcttcgcgcccgtttttaaattttgttgggctaggacggactcttcgcgaccgtttttaaaatttgtttgggccagacgggcgcttcgcgcccgttttttaatttaatgatttttaggccgcacgcggcctcgtacgggcgcatcgcgcccgttttttaaatttagttggggccagacgggcgcttcgcgcccgtttgatcgttttttaaatttgtttggccagacgggcgcttcgcgcccgttttttaggggtacaacagtgattagaagaggtacaacagtgattcattaaattaaaatgaaaattttttttaacaaatttaattaaaaaaatacatgaaattctatcaattaaaaaaataattaatttaaacttataaaatttatttatcaaaaaaaaattaaatataatttttatttattaactcaacaaaatattttaaatttattaaaataattgaaaataacgtaaaaatgcacagaaaaataatgttacaccgtccggatccgaacctgccccctcccccctcaaaatgatgcctcagaatccccaatcacacagggattctgaggtcttgacgatgtcaaaagtaaaatctgatcacgtattcgtgatcagcgtcataaaatagccctaatgacatgtttttggaagatttttggtgaaaaaattttccacccaaaaatcctggtcacccccctttggtcccgaatcccaaaatcacttttatttttataacaattcgcaaaaaagtgataaaaatgccaaataaaatttatataatagagcaaaaaactgcggatttttgtagtattt

SEQ ID NO: 24452 - DNA, 1495 bp, Heterodera glycines
ctgaaatgagcgccgagctagctggctcaaaaaaaaattttcgaaaatctgagtctttcggtttaatttatttgcaaaattaattcataaatattttttcagaaagggttctgaaacgcaccaaattttatttacatgttagtttaggcactctgatgctttttctatcaataatggaggtgaataaaattttaattgctttttaactttgggaaaaagtttaggcttaactttttagtgaaagtttgatcactcatatttttttagtctaatctactcaaaacggttcagaattcaataaaaataacattcacggtgcgaaaaatggggtttgacaagtttattggggaaaaaaagactttacaaaataatacccctgggagaagggagtgggaaacatgatttcaaaattttcaattttttctagtctaatctactcaaaccggttcagaattcaataaaaataacattcacggtgcgaaaaatggggtttgaaaagtttattttgaaaaaaagactttacaaaataatacccctgggagaagggagtgggaaacatgatttcaaaattttcaattttttctagtctaatctactcaaaacggttcagaattcaataaaaataacattcacggtgcgaaaaatggggtttgaaaagtttattggggaaaaaaagactttacaaaataatacccctgggagaagggagtgggaaacatgatttcaaaatttttgttgaaatatttgtcgtgctctgaagggcgtgggagggggggggggcgagagaggccccacccagagccgcgaagaggccgagtgagtaccttcggtgcaggaaaattattaaattttaaaaattttttaattgctttttaaatatgccaaaaaatgtaggcttaacttttttagtgaaaattcgatcactcatattttttgctaattgagcagaagcgtaccaaactttgcagggatactccccggtaaaggactaacttacactgaaatgagcgccgagctagctggctcaaaaaaattttcgaaaatctgagtctttcgtttttatttattttttgcaaaattaattcttaaatattttttcagaaagggttctgaaacgcaccaaattttatttacatgttagtttaggcactctgatgctttttctatcaaaaagggagatgaataaaatttttaaaaatttttaattcctttttaaacaggccaaaaagtttaggcttaacttttttttcagaaactgatcagaagcgcaccaaactttgcagggatactgaaaggaagagaaataacctattttaaatattatctagtcagttcatttaaataatttttatccaaaaaatttttttttgggttttcggggcagtccccctgaaccgatgcgcccagatttatggggagaccgaatccttccggaatagcttcactatagcctaaacgttaattctgcgttggatttttgctcccccataattgt

SEQ ID NO: 24453 - DNA, 925 bp, Heterodera glycines
aaatttaaaaattctttttagaggcctggacaataatttacttccttaattataggcttggactaaactttcttgaaaaaaatgccgccttatcttcggttttttggtatttttagaaaaaataaacaattaaatattttttccaaatttacacattttttttgcctaccattttccactggttcgtctcgtgcattttcaactgccacaaccgctctccccagcattgtcatgtctcggcggagctcattttgatttttctgctgctgctcttgcttttcacccgccatttcaattgaaaaatttcgttttgtttttgttgtattttttctgaaaattttcattttaaaccatatttttttattatttgtacaatttattagataattaatatttaataagcaattttttatcttaaaaagtccaaaaagctattgctaattgagttgttctgtgaagtaattagccaattatgtactgtaaatttgctgctgaaaaagataaggtagcgtaagtaaatcattacggtaatttttagcaaattttgaattgtgcacagaagcaaagaatgaatgacacaccaagtttttattagcattaaataggattcgtaatttgcccaattgagagccaaaatccgaacagattcgcataacggaggatcagacaacgggcgaatgactgtgaatttgaattccaaattccacaattattctaattttcaccttcaaatggcaaaaaaccgctttttctgattgggttgttgcgtgaaataaatagctatactttactaattaattggttgctgaaaatgattttgagaaatggtacggtagcgtatgtaaatcattacggtaattttgagtcaaattttgaattgagaaaaagaagcaaatgacacaccaagcacttttattagaattaa

SEQ ID NO: 24454 - DNA, 1300 bp, Heterodera glycines
  unsure (1)..(1300): unsure at all n locations
catgaagaaatgcgcaanngatggaaaatttgggcagaaaagatgcttctcgcctacaggacaccccgannattcggcactcaacggactttcgcccgatcaattgttcttcggtcgaaggcttcgaactcagctgtctctcgtccatccgaaggaagaacaagccgaagtcatcgacccagccaaaatccgcaaatcacaagctgattatgcgcgaaaaatggcccgtcaatttgatcaacaccacggatcaaaatcggttgagtttttgccaaaggatcccgttctacttttgaacttcaaccgtggaaaacgattttggctaaatggaacgatcatcgaaagattggaaaagtccccgacgtatcgtgtccacgtcccggctctcggaagaaacgtccaccggcacgcaaaccaactgcgacgccgttatcctcttgaggaggacggtaatgatacgataaggatcccaccccaggctcaagaagagcaagaccgggacccatcgccgatccgcgagcctcctccgcaaccgccaccaattcgacggactcaggcaaagcgacgatctccgagtcctcctttggccccgcgtcgatcgcaacgccaacggaaagcgccgatccgcttctcgccaaacccctgagggttcagcttaaagaagggaggtgttggagtgttaaagaatttgaatttggcgcccatcgattattgattaatgttgtgacgtgtcaatccctccccttattcattttgtttatttaagcactccctccttccccacttggttccttctccattcattttgctattttacattttgtactgcatttgacctccgacataaattgtgtttattattttattgtgtgtccaaagttgagacacaacaatggtaaatcctcgacgctttcgcgaaagttgtgaaaacaccatatcctcggttgttgctttgctggtagattgtgccgagctaacggcatttgcattttcgtcgatgtcactgtcaccaatgaggtcgcatccgccacagatgacttttgatccgtatccttcaccatcgcttgagagtgagcatggtggaatggcgtgacaagacctggagcattttcgacatcggtgagcaccagacgtgggtttgttgtaaaagcaacagaccttaataaacattattcgagagcaaatgaataataaaaggatgctttactaatttgtcggcgtcgccacatttatttgatgggtccattttataaagaaatttatttaaataaatttgtatacctaggtaaatanattttat

SEQ ID NO: 24455 - DNA, 1453 bp, Heterodera glycines
tttttcagatcctaatccacaacaggcaaaggctgggggatcgcaattcgttccgagtaagagcaacaaccgcaacaactcggtccgggcaaagagcaatgtttttgtgttccatccaaatgcatttctgtccccattttcagtaaaagattcaaagtatcagacgcttgccggtttggatgcgaacatctttgtcaagaatgcaccaccagcagcagcgccaaaaccgcagcagtcaaaggcaccgcaacaactcggtaatgggcaagagaaaccgttcaaattttaaccaaattcatgtctgtgttcccctctttttcagtaaaagattcaaagtatcagacgcttgccggtttggatgcgaacatctttgtgaagaatgcaccagcaacaccagcgaaggcggcaccgcaagccccgggtaagagcaatggttttttgtgtttcatctccaaatgacatttctatcctccccttttcagtaaaagattccaagtatcagacgcttgccggcttggacataacatctttgtgaagaaatagttgccgaagtgcgtatatgatgagaatggatgattgaccgatgtatatatttatatatgtcatatgatgtatttctctctgtttttggttgtatattcgctgttgtacagtactatatatatacatatgtgttcctaactcataaatattattctcaagtgtacaatgtgcatttttgtttattaaacacggtaattggtaaacagacaaaaagtgatgtacctatctaatcatattccttaaattttcgaattccgatttgcaagccacaaaattttcgaaaattgattacctacttgcaaaatgcaaataagtagttcgttgattctacacagcgagtcaattttgggctcccagtgcaaatagaaattaacacacaacataaggaggactcgaacctgagaccccctttttggtgactaactcacagaccacttagacgaaaaatccaacttaatcagggttcgcagatctgaggctttagcctcattttgtggttttttgataggtcaatgaggctaaattttcaaaatgaggctttgaggctttttgtggttttttgagaaattttggtaatagtatggtttacaggtcccacaaaaaaaagaggcaaaaagggggttttatgcaattcttcaaagtcctttagggttctcgagggcgctgatcacgaatataatattcattccgaccaatttcgaaccccgaacccgaattcgaacaatttttttgttgcttgttttgacttaaaatcaacgtcaatattgaaaatttaaatatgaagaacaaagcaatgtctggcacccaacgcaatttgctgccgggttatatggacgaatacatgtggcgccaatttaatggcaaacaaagaagagcggcctatgaaaacattttgaacaaattgctcaat

SEQ ID NO: 24456 - DNA, 2366 bp, Heterodera glycines
ctctcattttcctcactctctcgcctccccccgcctttccacccgccccccccttctctctctcgctctgtcctttttccgtctgtttaattcgtttctctccctccccttccccctctttcccccattatgttgatccaatctcggattctcattttatggtagtgcgcggaccttttctgatggattaggtaaattctctcaaatggacacttttcttcctttcgtcgcccattgcctttttctctgtctaattgcccccccccactttttttggctggtgggttttatccaattatttttatgtctccaaaaaaccaatgccttttctgactcattaatccctccctccatgggccattccttcacggcgttatctttcaaaggatttctcttaatttcttttttctctctttcttctctctttctctctctcttaatggacaagcaactgaggaggagaagcaattcattggggaattcggcataaattttcggcttttgggaagattttttggaaaagcgggcggggaaaaagggggagggaaagacgcaaaagagaagtggaagagatggagtgaatgaagatgggaaaagggaaaaacaagaaagagagatactgggagataagagagagagagaggaaagaaggggaagaagagcgaggggtgagagagaaatagacaggaagagagaaagagagggggcggaggggggaaagaaaaatgccacgggaaatccctcgggcaaatcgccgcggtccgctttttctctgtgcgctttccgtctttgaattttgagttgtttctgtttgtccatttttagcttcttgcaagtccaaattagcctccaaactgtccctccataattcgcttcccaatttgcccctcccattgtcgtcagaagaggcatttcttggcccaatttgtctgtcttcctaattagggccttcccccaatgacccaataatttaagctcccccctccctctgcttgtcaaacgcacattcttccaagtcaagcccatatcggacttaaattcgatattttatttatttaaattttattttggtgacatttttaataacaaaaaaggcagaattttttcatttacatatctaaaatatttttaattaattttaattagtttctaattatttggtgcctttttctgatattatcaatggacaacgaaaaaagccgagaaaaagctgccgttgtaattccgcacaacagccgcaacagtttcacaaaaaaagtgagtgcgcctgagggttcagcggacagcggaatcggcggcttttcgtcgggagagaatagcggaggaagtggacctaatgagggtaattatcatcgcttatggatcaaggaggattttgaagaacaattgggtaaagagacccatcggcaaatcgaaacgacggcatccgatcattggcccaaggagaggggagagactgatcagacacaaagagtagacagaatcgagactagtcagaaaggaaggggaccgacagtcgagactttccaaggagaaagggcagagactgatcagacacaaagaggaaagaaggtcgagagtgatcaagcacgaagaggacatggaatcgatactgaccatagaggaatgggacagagagtcgagactgatcaagacgagagggccgagattgatcaaggcgagaggcccgagattgatcaaggaaagagggcagaaactgatcaagacgagagggccgggactgatcagaggttagagacagagccactaaaagagacaaaggaccgctcttcgcattcgacttccaaattttctttcaacaacttcgtcggatgtgcacatgctcggctttttgcccccaatgaccaattgcccctcgccggaggggtcagtttcaatttccgtttggaagggccgaagtgtacaaatctgagcatcctaaggcaaacattccttcgacggcgtattcccacaggacacaaaaccgtggagaacccgcggaaaggcaaaaacattcccttggcatcgaattgacatcactttacttcttcttccccttcttccaattgactcacttttggaattgattgatttagtttccagcagaagcaaaactaaaaggagcagaagaggcgaaagggctattaaaaggaggcaaaagcaaaggcaaaggaggaaaagcggggaaaagggggggagagagggcggcaagagtctcgagaatgtgttgatgcttttgtgcttttggtcacccccccccccctctcattggcttcttttggaattcattcccttccttttttaccaattaaatttgttgagtattgaattcctcgaccatttcaatcaaactctttttttattat

SEQ ID NO: 24457 - DNA, 2179 bp, Heterodera glycines
tttttaaaaattaattagatgatcatttttatggcatttgtcgtttttctaagaattttttacaaaaaaaatcaacatatcgggtttttaaatattcttatttatcaatttttgaggatttttgtaatttatttcattgccaaaaaaacggaatcacattttttcgtacatatttttaatttatttttaacagcttttcaggttttgagaatttattgatttctatgaagaatttaattttttttttataataatcctcttaaatcaatttttcaaaaattgaatatcgaaaattaatttaaaataaccaaaatattattctaacaataagactaaaaaagccgaaaatttagaatagtaaatcgaccattctcatcacaataaaagtggttttaaagtgatttgagcgttgacagctcagaattttccccgggattgcgggatttatacctgcgggatcccgtcccgcagaaattttgagttccaatcccgtagcaagacccacaaatttgaaatttcccggttttacagtggggcgccggtgccaaccaaagacgggccacagcaacagaagaagctgaagacgaaagcggaagaggaggaggagaagaaagagtgacaatgaaaagagggggcgagtgttgatgaaaaatgaaccgatcaaatgcgggggaaaggacggacaattaacaaaaaaaataattttcttaccattattattttaaataaaatttttgattaaaaattgtgtttaatccaagtttgtccttattttaaggggccgatttttaaattcaaaaaagctaaaaaatttgttaagaatttattcttttttggccaaatattataaaaacatttttttgaatttctgattaagagctttcaggtcggtcaataaaattttttgcttaatttggtcgctcatgcaaacaaattaggatgataattgaaattttgcataattatgaatattttttatataaatcattaattttgaacaatatgaaagaaatagttcaatatttatgctttaatcgaatgtacaaggcagaaaataattcataataatgggcaattaaattataagcgataaataatattcattaagagaataaaacaaacgaccgaaaatttttgttagaaataaaatttattttgatcgtataattttgaaaggttcaaaaattttttgtaaattttattcacaaagctttttcatcattttcttcataaaagaatctctcaaatatttttattaattaaatattgtttttaccaaaggctatttggattataaattgatgcaaaaatttaaatatacattttataaatttcattggtttccaaaattaccgttgattcaaaatttaaattataaatgaaaagaattttaaaaaatctttaaaacaatttcaaatcaatatttattatgcttcacaaattttgaataacataaaacacaacaaatatataaagaatttaaaaaaaagagtggaaaaacttcattaaatttaagtattatttaaatattttgtatttaaatataagaaaaaaaaattagtttggaaatgttgattgccgaatgacgcgcataattataagtaaacagcaagagaaaagccagaaattttcatctttcaatttgtgtatagataaccaaaatttgagtatgaatggcttaaattaattttccaaaaattgtaattgtgatttacattttgataaataataagttttaacttttccatttttggtgatgttgcgaattcgaaaatgctacccatctcaacgccggcggacacattgttggccatctcttcttcggacaccaattggaccactccgccctcacactgaatcagactaagatagtcgcacaagaagcgcagataatctataaaaatgatagcaaaattatttataaattgggttttggtcacaaaaaaaaggattttaaattcacaaatcagtccacatttttatacccgaatttgaagccaaaatggcatagactaagtcccgatcattaacaagtgcaaaaaaaaaagtttcacaattcttaggcattccgacattttttatcggagaagcttgaatctgaaatccttgtccaaaaattatcaaaaagaccattttttgcgtaaatcagttcgtgaatgaagaaaaaggtggactctag

SEQ ID NO: 24458 - DNA, 1508 bp, Heterodera glycines
ttgtccgtcaactcatagcaccgtgcgaagccgcccttgccgagaaaaatgcctttggtgtaagtccgttttgtgacgttattctgtacgatgaaaggcacttccttcagcacaggctttgtccgcttttgtgttgacatgaagcaaataattttcaactacaaaaaaaggaatttaaagcaggtaaaacaaaaaggatggataacaaatttagtcaacaattaataacataacgagttaagccaaataaaatacaaatcgtcattagaaagtacagatccgacccctaatttagtcaagaaatcagtcgctggaaaggaatttgctcaacgatcgtacaatccataatttaaatttaaattcaaaaatttcataaatttttcgtttcaaaattaattcattcaaaattgttgtgattggttcttcccatcctcataacttttcctattgttccttcgcccttctccacaactcttcacttatcactcaaccaaagtaatgtgcttaaaaagtaataacaattcagaggatattctgtatataattatctttttggttctttattaaattattaaaaaccacattaaaaataatcgaaattaaaaacgttaaataagtaaataatgaaaaagaaatcatttgggcgttcatttaagcgccgttcttcaggggcgtgatgagccggtgccgcgctttcgctgttcctccgcagaataacagtactgttgtgtttgttatacatattcattgtttgataggttaaaatgagctaactgaccaactcgcactcctgcttagtgcggggagaacgccaaaggttgaagtcgagttcaggacaataggggaaaatgtaaggctaaacggacggaagggtgaatgaatggaagggacggcacggggaatggcattttttgggcgggcgaggggttgactgacctcgcattggtcagtgttgctgaatctgttcaccttgggatggaagtgcattagccaatggcacttcttaagtgcaatgccttacccttctgaaccaccggtgcactttctgtgccgagtcgcgcgtgttcaccgtaatgtttgggcagccgttgacaattaaatcgtgccaaagaacaaatggcattgggtcgcagccgcgggcaggcgacccgattggacacgcacaaagctttgaatgaactgactttggcacgctttgaccaatgccttttacctggcatccgttgcgttccgttaccacggcacagtcgagccctgaacaatttgacaatcactcgtaagactttgagttgaaaagtcttggatggacttgcccgtgcaaagcattggcggacagttttccacaatgagacggcctaagtccgcgatgatttggtcctgtcctaaggttgagaggtggggggggggggtgaaaatcatttaaattactttgggcatccgacgaatggcaaatgaaaagagcgaaaaggacggaagagaaatataataaaaaattcatcgtttttttc

SEQ ID NO: 24459 - DNA, 1182 bp, Heterodera glycines
  unsure (1)..(1182): unsure at all n locations
agtagtgatttttgtactcaatgtatggcgctcagtcggccatatcgaaaagtgactgtccaccaacgcattgaaccgttggctgagccgtgcgatcagaaggcgagttngggcagggcgaaagaactcaaaaacatcgaaccaaatgtcgttgcaaataaaactaaatataaatttctaaaaacgacacattctgtcggattctttaactgttagagggaaagggttgcgaaataatatccaaattttcatatttttcaaatgaattttatgtgtgcatttgagatttggataggatcaaatgttctcccattttcaattacaattgctggattatcctagtgaatcactaattgctttgaatttcattttctgatcaatcatttaaaattgatcggcgataaacaaatccagtgataaagtgattccattaaaacatttgcttatcaaagttttgaccccccggcggtgattaatgctttacaaattggtcaatgatcttacctttgtctttgtgtcaagctcaatgtcttttcaatcactgatctgatactttcctttagggttgcaaccctgaccccgccccgaccccgaaccccgacatttttggccatttttcggggttatccccgacccgaaccctgacgcttccaaccccgacaaccccgaccccgacacttttaattaaaaaagaaatgacgccataagcacaacaaaaaatggcttttgcccttctgttgttgggcaagccttcgccgttttgccttggcactattaattcttttccccttttcacccgaggcgattaattctctccccgccctccgacatttcccccgaggcgttcctccgattcagtaaaaatgacataataatggatacttttaatggatgggaggaaaattggagataatggtgaagaaaagaacggacgattggcaagggaatgacaccaaaaaatgaaacaaaaatttgtgttattttggcggacaggggccgactgaacgcaaacagtaatttttcaagccaattaaattgaaaattttcaaattttatggaatgttttttcaaaattttcctcatttcggccacctcaaaattcgtactttactctcatttaactagtttttttttattgttgtttattgtacatatttctctatttttgtgcataaaacttaa

SEQ ID NO: 24460 - DNA, 2457 bp, Heterodera glycines
  unsure (1)..(2457): unsure at all n locations
gtgtaagatgatgccaaacaaagtgctcacggtggtgcaataagcgacaccacaannnggaagaaggcatctctcaaatcacgtgaccgtgcccttttcgttcgtcgtgacggcatcncattatgctgatcagataaagctgacgtttgatcagaggagacattttgtccactagcgaacaaagtcggtggtaatcgctcatctaaaagggttaaatgcttcattatataattaataaccatttttaattaacaataccggtgatgaattctcggaatattttcaacgcggcaatgcaatgtttgacaaatgttccaattgctgtttgattttcagggctcacaatttttaatttcgtcaattttcgaaatccttcttcgtatgtttgggggttcactttcacatttctcgccgctgttacaatggcattgcccgccgaactttccagcgcttcccaaatgttttggccctttttcaattgttggcaaaaattgcgctgatttgcttcaaattccccaattatttctgctaattcatcccttttcatggcatcctttttagctttgattgtaatacaacacaatgtgtcaaatgctttttctaaaaattttccatttttcatttgtgtttgagttccagcaaaaaatgccggtgccatttcttgcaaccggtggaccgttgcaaaaaagtctgaaaatgctaatgtttgatttgaaattttgaaaatttatattcaaacctttttgacactcgcccattaaaattttttgttcagtcgtaaaatccatcataattataaaaaggaatgaaaacatcaattttaacattgctgaagtcgctttcatttgaaaaatttaataacaaatattagtaataattttctgccttaattaggctgaagaagaaaatgccaacaaaaaatcaatgatttgcataagaattttccagaaagccacgaaaagataaaaaatcatttattaaaaaataataaatttataacaaatgtaatgcttgcggtctctagttttagaattaattatatttttccttgacgcaccttggtcaaaaagtacaaaaaattggtttatttaaattgtaattatgtctattttatatgaatggaagccctatttttttgttaacttatttcggcctaaaaatttttatgggttgcgaatttttcaaaaattcaaaccaattttcagaaatttttgtctatattttcgtactttttgtcaatacttaagcgtttttgttttgatttcgtcggtgtactctcaaaggacccacagacaagggacccacaaagacagaggacccacggacaaaggacccacagacaagggacccacaaagacagaggacccacggacaaaggacccccaaaaatataattaattaaaatgtattaaaagatttaaaataagctgtgagagaaatgccagttactaaatttattcaaattggactgagaaaaatgctatatgacaaaaaatcactaatcttaatgagaaaaatgttacatgaccaaatgctatatgatcaaaaatcactattcctattaatgagaaaattctatatgaccaaaaaccactaatcttaactaattagaattaaattttgccaatggatttgcccgaatagcctgaaatacaataagtgctataaaagctgaactaaatttacaaaattcattaaatataatggctacgtttttccttcacaaatgggcggctacaaactcgttttcgaaggccatatgtaccaaaaaaagaagcacgaagggaattaatttattggcgctgtgaccaaaacaaaacaatgaactgcaccgcgacagcaaaaactatcgggatgagagctggagttgaagtccaactaggaaagccgcacaatcatgacccttctccaacacgatgtgaagccgctaagatcaacagaagcgtccgcaacacagcattgtcatcacgtggaaatatgccacgcacagttgtgaatgaatgcctcgctggtgcgtcaaatgaagttattgcaagccttcccctaattctgtcaatggaaaaagctgttagtagagtccgtcatgcagccgggggtcaatttcaaataccaaaaacactcgcagatatcgagataccagcggtacaatctatttccgaccaaacttatttttataataggatttacgggtcaccgatcgtggggaaaattttttgatttacgaaagcgaacgtgaagatcctcatcgcatgatcatctttggcactcaaattgactgtacacgtttgtctcaatgtacaacttggtcagctgacggcactttccgttcggctccttcgatgttttttcaattgtgggttattcatggcttgtacagaagccgtgttctttccgtttattttttgccttctgcctgataagcaacaaacacttatctgaatgctttgcgggtgattt

SEQ ID NO: 24461 - DNA, 2129 bp, Heterodera glycines
ggcacatttgagggatggcacatttgagggaatggcacatttgagggaatggcacattttgtgtgattggcacattttgagggaatggcacatttgagggaatggcacatttgagggaatggcacatttgagggaatggcacatttgagggaatggcacattttgtgtgattggcacattttgagggaaggcacatttgagggaatggcacatttgagggaatggcacatttgagggaatggcacattttgtgtgattggcacattttgagggaatggcacatttgagggaatggcacatttgagggaatggcacatttgagggaatggcacctttgagggaatggcacatttgagggaatggcacatttgagggaatggcacattttgtgtgattggcacattttgagggaaggcacatttgagggaatggcacatttgagggaatggcacctttgagggaatggcacattttgtgtgattggcacattttgagggaaggcacatttgagggaatggcacatttgagggaatggcacctttgagggaatggcacatttgaggtaatggcacattttgtgtgattggcacattttgagggaaggcacatttgagggaatggcacatttgagggaatggcacattttgtgtgattggcacattttgagggaaggcacatttgagggaatggcacatttgagggaatggcacatttgagggaatggcacattttgtgtgattggcacattttgagggaaggcacatttgagggaatggcacatttgagggaatggcacatttgagggaatggcacattttgtgtgattggcacattttgagggaatggcacatttgagggaatggcacatttgagggaatggcacattttgagggaatggcacattttttcacttccaattccctgccgtttaatctctttttcccctttttcacctccaaaaggtgtgccatgcttcccgacccgtttctctgtaaatttagcgatgaaattgctgcgagatcgctgagaaccgacggcgaatcggacgagaattttcgactgtttgacgcatttgccaaattaattacatttttctgctctttttgttgcatttctcgcggcgtcgtcggggcggacactgcgaaaattgggaaaatgccaaaataaatgtgcgaaagttcggcacaattttttttcaccaattaaataatttttggtgttttaactcccagcttttaattgaagtccatgtgaaaatcgcaaatttacctttgcttttgcgttcttttctcttaccggtggacactttttggggtgtcggcgtaagcgccgccgtcgccacgggcactgacaattctctttcattggtggcccttttctgcggctgtcttctgccaattagacattccgactgtttgctggtcaaatcatttgtcctatacgtcgaatggctttttccttccttcgtccgttcattctctccgttctgtccaattagttttttggtgtcattggccggcggaaggaaggcattgccattggacgggggagttgcgaatgtgccaatgccaggggtcgtggcggtcagcgaagagacggcgcggcacaatttggccgaattgacagcggagttgtcggtctccagctattgctgttggcgcggagcggggggcagaccgccagggacctgccattgccgggtgagtgccattcgcgatgatcgcccgccgaagcgatattaatgataagaaaaccgcgagacagggattgcaacaatgaagagaaatgtttcgcgcagttctgttcaacgcaaaatggtaagatgaaaataattataattataataataacactaaaaataacaataataatataatagagataaataataaatacaataataaccagggcttcttctttttttatgtaaatacatgtttttttcctggattctccatagcctaattagtaggaaaaacactttcttttttgtgtttgcgaacaaaaattgcgacttttatttacatattttgagatttttctacatattacatatgtacatatttttatacatatgtaggactttttgcatatttgcgtacatattttgcattttttgagaattttta

SEQ ID NO: 24462 - DNA, 1368 bp, Heterodera glycines
catttttggtttaaaaacggcgtaaatgatctcttaatgaagggttggtggcttttagttagtttctgtgtatttaaaccggttttgaaccaaaaatgctgatttcgaaaatttgaaccttcgactttttgttcgaattcgggtccgggtttcggaattctgaatgatgttcttatagaattttacttttatactcggggacccgacaaggaactatgattagatcaggatctcgtgggaagccctagggtaatcattgaatttaaatattattaatctgacggtatccttcccgggatgcccccctgatcagtcgtaattttgttcgaatcaatgataggaatgtcatcgatttgtgccatcggcttaaggcacatgatcgaagatctcgaccgagttgaatttgggacattcctatcgccagctttcgattcggacttttaacttttgatttttgccacacttacaatcacttgtgccggactcatgtagggcagctgtgcgtttgttggcacaacaatttttttgacaatgaatgtgatgttgccacggagttcggtctcttgaaaaattggcccaccaatttttttgagtgccaaaaaatgttcggccgttaaaatgccgtcaaaatcaatttgcgaagtaatcacgtcatagtcatggttgcctttacaaaattttaatgcagtgatcagacggcccaaaatgttggcaattattttggccggcacttttccattaaaatgatccaaaatggcatgccaatagcgcgggaacggcacataattatcagtctttacaaaacattagtgtataattgttagagcccggatttttaggtttttacctattttttttgcggcttagttatgatgagagaaggccaaaaatagcattttctccgaacaattttcgatttagagcgactttttagcacctaaaaacacctattttggcgttttgccacctaaaatagtttacaacctattttggcatttttcgaatttttagcaactatatttcttaatttattcaaatgccgaaaataacaaaaagtatgcgccggtgacttcttgtgacgttgaaggcagtttttcaatttacaaaacaattttatcagaaaaaaaaccagttttacccccgaacacctcgaaatgtatttatttgcaattgttctggcgaaatgaataaagaatgagacttaaataggattttttgcataaatacacttggtttttcctatttttaacacctattttcgcacctattttggccttttttcgggtttttggcacctattttgcacttttttggcaccttttttagcacctattttggaatttttagcacctaaaaatcctagctcta

SEQ ID NO: 24463 - DNA, 1735 bp, Heterodera glycines
  unsure (1)..(1735): unsure at all n locations
ggcaaagaaatcatttaaatttcaaatgagagaaaaaatggccgaattttaaggtaaaaatgacaaatcgacaacacgcttataacatgcgccaattgccatctcttgaaatttgattatttttaattatgccaaaattttcaatcgtctttctgatggttccgattttaaatttaaattattgggcggagattgcgtttaaataagcaaatggtttcaattttatgaccattgtcttcgaagcggtgccgaccagggacgggcgaaacttcgagcttcgtgcttcgagcttcgaaaacttcgggttttttgggcttcgaacttcgtgcttcgagcttcgtgaaaatgctcgaagtttcgggaaaaatgcacccctaaagattgagttttcgaagtaaaaatactcccctaattattgatcttaatgtgagtaatggtgatgatgtttatgaattttataaattaaatatttcttcaatattacctattttatattctacatattgtatatctctttttaaatgatttttaacacattttacatttttagcttgaaaatgccaccacaaagcaaatatattaaatattttaaaatttattgtgacagatttgagaaaaaatttagcaggagaaacgttgaaagaactcctttttcttcaacagaatttgcctctttatggatttaaattcgaaatttaattgagttttactatctggataaattttttggattaaaaaattgaaaaacttcgtgcttcgagcttcgaaagcttcgaaacttcgcggtttttgggcttcgaacttcgaacttcgtgcttcgaaaaaaattgggcttcgccttcggcttcggtttcgagtgccgagccgagcttcgcccgtccctgttcccgattctctctcaccttttccatcaaattcttcactctaagccatttatgtagagtaacggcgaccgtttgaattttttgaaattttgcaggataacaagaaaacacttagggctatcgaataatatcaagattataaaaattgatttattttgctctaagttatgaataattttctttcaaaaattttttattttgatagttttttgagtaacgcccattttgatgggttttgagcaacgacccggcacatttccgctcagtgctttctgttccagttgggctgcggagcggcgccctcgcggagacgcgaaaaaatttgtgccatttgttggttgttagaaatgtgccggttgcaaaaaagtttgtttgaagcgaacgattttaaaaaatcctgggtaatgatggcagcaatcagattgttccctcgtgtggcaatcaaaaatttggcctaagagaaattgaccacgattcttgcaattacgaaaagtctcaaacttttattcagtcaagactagagagaccgagagcactatctgctacaaatataaaataattatacaaatataacataattcatggaaatatatgtatataaaatccatattaatcaattcatgcacatgcatgcaaaattttatgccatattaatgttatagcatctaaaaattttctatactcattacgaggtatggcaaagaatttcgtaattttccttanaatttatatnatttgtgtatgtattcaatgctgtaaattgtggccaaaacaaattgattctttgactatcgccaagttttccagaaatagtcaaattttggaggtanataatttcatgcatttaatac

SEQ ID NO: 24464 - DNA, 1433 bp, Heterodera glycines
  unsure (1)..(1433): unsure at all n locations
gtttttcntgggaaaattcgtttaaaaattcnttaaaattcaaaaaacccggaaaaccgtttnnttaggcctagctcgaaaaattttgaaaattttcgaaattttaaaatttggaaaaatcgggcttttaaagctctacaataagtctgctggccaccctgcgctcagttcaaagcctaatgagttattcgcctggtactgaagtgggaaaaaaaaattaactgagtctccgtgtctgtacaggtccgggatttggtctgatcaaaaaataaaaaataccggattatagaggacacttctgcggagtgccctctcagcgggaattttttggtcagggttttagaaaaaaagttaggggccctcaaatgcacgaaaaaatgagaaattagccgctgggactcagttggccgcgctgaatttttctctatagttttcccggatgcgcctcaaaaagttgtaagacccttccactactttcaggacgctcccggccttcggccgggagaaaatggttttagcaacgaaactccttgtcaatataacatatatagtaactaaatgcaacattcttggcatcattcgttagctctaacaaataagtgtcctcagatatcatgagagtcaaaggtaattgaaaacggcattgaatacgtaaaattggtccaaggctgaggaagtgccggttttttgcaagtaagcagtctcatttcgccgatagtggagcattttgcaacgaaaacacacccaacttaaattttaaaattagttaaaggacatttagaaaaaccccaacgattgctgatgattttcaccatcagtttgcagaaatgatgttgcggtcggcggaggaaatatgttttttgtcactttatatttatggggcccaaccacatttcaaatgctgacttataagccaaaatgttgctaaacaaaaacaaaaaaatgcaaaaatgttggggtgatctgggaattgaacccaggacctctcgcacccgaagcgagaatcataccactagaccaatcacccatgtcaatccaagcttattagtgtgcttaaccattctacacggtgctgcagtgttttccagcaggggaaagcatttcgattttaattcatttctcccaaatgttaaaaaacataaaaatttattgtacaatttgaaaaaaatttaaagtccgagcctagggctgggtcttcattaatttctgctaatgatcacttaaagaatcgctttcgtctccccaatttggcatcgtttcattagtagagcccggatttttaggtttaacaattttttacggatagtacttgatgagagaagcacgaaaatcacattttctccgcacagtttttgagttagagcgactttttagcacctaaaaatacctaaaacggggattagcacctatttttgcctttttccagaaatttc

SEQ ID NO: 24465 - DNA, 2339 bp, Heterodera glycines
  unsure (1)..(2339): unsure at all n locations
ggatttccgatgctcccccattttagtgcgttgttcaatttgcgatagaggcgcatataaaagaccagaanctgcgcttcttcctgaaaagcgtctccactcactttgccgcctttccgtggcaattcttccaaaattttggcactaaatttggcattttcctcgaaaatntcgtccaaaattcggcccaataatcgacaatatttcagtttttctcccatatctttgatcagttttgttacgctgaatttgcctttgctggcattgatctcattggcgagtttttctccatttttagctttgaatgtcaatttgaacacttcgtttgccatgaagccaaaatcgatggcattttgcccaaacgcgcgaatactttccgtgcacactgtgccaacaacgtcttcaattaacatctgctgctgtacggcatttgaggaatgaccaacacacatttttaaggcatgcacttcgctggcttttgacactgcattggcattttgtccagtacttgaacttggcatcactgagctttctctttctgtttgtggtcttttggcactctgttgttggttgtgatttgccttctcaacttgtgctgctgattttggcgttgactttgaatttgagggcattccctttatttcgtctgcttttggcattaaaacattgacattttcccttccatttgaatttgttttactcgtccgttttgcttgtgcggcattggcattctgttgtctgatcaattttagtgcgtccattttaccaatttggttttcaccagactttggcactgtttttgcatctttttttggcactgtttttgcatcttttttctgtttgctttttgaatccgttttttctgattgtttacttggcatggaatttatcggaatcggtgcttcactgtttcccattatcattaactgattataactgttatcatttttatcagtttgattcgctgtttcgtcgtcgtcttcgatatcaatcacttccttatcattgttatcatttttaatgttggcatttgacgggccgtccgtttccttttgggttttttcattttgttgaattggtggaaaaagttcttcgtcccaaaatgtcgggtccgtatttaacacttccaacaaatcgtccccaaaattgaacggcacaattgccatggcatttccgtcctccgtcgccctcggcgtttgatcattcgtttttgcctgttgatccaccatttcttcatcgtcgtcatcgtcgtccaaattgatcactattttttgtttgtcctccatttcgtcgtcatcgtccaacagaataatctccggctgtttgccatttccgttcttccgccgatcacttccaatcgcttctgtgttccttccaattgtttcttgccttcttggctcgtgcctctgatcagtccttgcctttttcactgatatttccactgattttgccaacatttttttatcaaattcagtcgttgggttttccttcgatttgtcaccaatttgaatttgctgaattaattcggcatcaattggagcttttccaattacgttcggtaaaatttgaccaattgccttcttcaaatttttaacaatggtcaaattctttagttagggtgtgcaaaataaactctgtcggtctcagtttttacttttttttaattcataactttcggtgatttttggatttatttttcttttttaaattttgttgtcatttattttgttggctcaccagcaggctataaaccccggggcttcaatttaacaagcccacttatgagggggaggggcttctaatggaggggcttttattttgaaccctttttattaaagaataacaaaaagttttaaaaataaacttctcgtttttactttttattgccgaatttttgtttggttcccagccatttttattaaaatatttttaatttcttgttttttgtgaacttttattgaaaattggggaatgatttgagaacaaaaatctcgcgctttggtaaaactcaggccaaactattttattatgcaactcaaaatgcaaaaaaaaagtgagaatttttatatttctttttacagttcgacattccaaaaagttaaaaaaaaattaaagtcgtcaagaactttcgaatgataataagaatttaaaaaattaattaacattgccataaccacagggctcggatttaattttttatatgtttttttttgttgttgctaatattttatcgcatgaaaagctcaaacttagctttttacgagttttcttttcaatcagagcgattttttataaaataaaaaacatattttggacattctattaataaaatattttgg

SEQ ID NO: 24466 - DNA, 1620 bp, Heterodera glycines
  unsure (1)..(1620): unsure at all n locations
cccccccccccccccccccccgccccccccccccccccccccctcctctcttttttttcttcttttttnttttctttttttttttttttattttttatttattattaataaaaataataaataaaaaaaaaaaaaaaaaaaaaaaaaaaaaaaaaagaaaagagtgtgaaagttgcctccgccccgccctctcccacccctccctcccccctcccccccctccccctcctccctccctctcttctttttttttttttgtttttttcttttttttttttttttctcttttctcccccctcaaccccctctccccacccacacacccattttaaaaaaaattcccaccccaactcccccccccccccgccttttttttttttttttttttttttttttttttttttttttttttttttaaaaaataaaaaaaaaaaaaaaaaaaaaaaacaaaacaaaagaaacaaaaaaaaagaaaagaagaaagagggggggggggggggggggggagaaaaaaaaaataaaaaataaataaaataaataaaaataaaatattgggtggtggggggggggggggcgggggggcgggggggggagagaaaaaaaaaaaaaaaaaaccacccccccccccccccccccccccccccccccaaaaaaaaggggggggggggggggttttttttttttttttttttttttttttttttaaaaaaaaaaaaaaaaaattttttttttttaagcgagagggtttttttttttttatttgtgggggggtttgttttttttatttttaatttttttttgggggggggggggggggggggggggttttttttggcgccccccattttttggggagaccccccaaaaaagggggggggggggggggggggtttttttcaacccaccttttttaaaaaaatttttttattttttaaaagggttttttttttttttttaaaaaaaaaaaaaaagggggggcaaaaatttttttggaaaaaggaaattccggcccccccgggggggatttttaaggggggggaaaggggaaaattttaaaaggggaaaactttggggaaaaacctttggggggggcggatttaaccaggtttttgggtttcgggccaagtttttccagtgaaattcggacctgccttttcgggttcccacttgctggacaaattagatcaattgttgtttcaatgatccattattntncttcgggggaagctttttctctttatctcaccactgaaaactcancattacnganctgnaaaaattgctttncctctacatggaaattgcgctcgacgagnncctaccnggaaatacggtatgtgttattttgtcatttttccaattgttaattaatattcaaaaatagaaaaaaaaagataaacatgttttccaatcagtgacgctaattgagtcatttgccgcatttttggcttatttttgagaacctcgcgacacacttttagccacagctcaaaccttcatgaagaaaacaacagcagctgcaacaggtgctttttgtttcaaaataatcaactgctgttctgttgtggtatttatcatttttgttttcanaagttttaattagtttttttctattttagt

SEQ ID NO: 24467 - DNA, 284 bp, Heterodera glycines
cccttccactactttcagggcgctcccggccttcggccgggagattttgttttttaagacgaactgcaacgtttctctatagtagtataaactagggtgcccagttggctatggtgtgcatacgtggcttggtaatatatggccctcatttgttattttaaaacatacaaaacattaattccattagtgtgatgttttaaagcgctatcgcgctatgggacgcggcttcgccgcgtcgctagaaagtgatgtaatttagcaattcatcgcagcctcaggacggg

SEQ ID NO: 24468 - DNA, 1305 bp, Heterodera glycines
tggacatttgcgcttttttgtccatatttcgggtatttttagtccatattttatgtccatatttggtgttttttagtccatattttttgtccatatttcgggtatttttagtccatattttatgtccatatttggtgttttttagtccatataatttataaaattttttgaaatttaacaaaataatagagaaatcttaggtctatctaatcatatcaagaaaattaaactttgttgtttctcaaagttactaaggaataaaatgctttatatgtttatggtcatacaaaaatgtgagatcgtttaaatgcttaattcatatcatccttaaatgattagactggcgaaagatttctctattattctattaaatttcaaaagattttattgagtttaaaaaagttaatgacaaaattagtgagtctaaatttttcggaattttttgcttataaatagggctgggaatttaagtcactattcaaaaagtcgactaaaacagttataaaaaatcgccaaaaggtcataaaaaatgcaaaaaagttagcctaaaagtcacaaaaaatccaaaaaagtacgaaaaaatgcaaaaaattttgtgaatgttaaaaaaaaatcccatttttaacaatttatagaataacatcttataaatagagatcggatttttaggcacttaattttacaaatatgtacctaaaacatacataaaaaagttattcttccaacaattacgaaaaatttcatccagatttcattgccttttcaccgatggaaattttattttttggagttttctttgtatttttcggcattttcattggttaatttaaaacttggcctcaaaaagtcaaaaaagtcacgaaaaaagtcataaaagtgtaaaaaagtcataaaaatcccaaaaagtgtaaaaaagtaaaaaaaaaagttacaaaaaaatcatgttagaagcttcaaacaaagtttagaacactttttaagccattttaatgccatttagaatcagcaaaaaaaagtcatttgacttaaattcccaaccctagttatgtataactttgtaatttttttatggtcgtgtaaactgcaattgagcccgaatttcggcaatctttcagaattgcggtcccgaaaaaaagattttttttaattcgtaaggcactttttcgagccttaaaaatacgctaatcacgaatatgaactcggattttgaaaatctttgattattgtctatgattttttatcgcaaactttatttttggaattttttaaatcgattttctggggtaaaaaatacgttgatcacga

SEQ ID NO: 24469 - DNA, 478 bp, Heterodera glycines
cccccccccccccccccccccccccccccccctttttttttttggggggggggggggggggggaaaaaaaaaaaaaaaaaaaaaaaaaaaatgggggggggttggttgtttctttttccccccccccccccccccccccccttttttttttatttattataaaaaaaaaaagtggggggggggaagaaagaaaaacccccccccctttcttttattgggggggggggggggggggggggcgattttttttttttttttcccccccccccccccccccccccccaaggggggggggggggggggggggggggggggggttttttttttttttttttttttttcctcttctcccctcccccgcgcgggggggggggccgcgccgcccccaaaaaaaaaaaaaaaaaaaaacaaaaaaacacacccccaccccccccccccccacaaaataatattattttttttttttttttttttaggg

SEQ ID NO: 24470 - DNA, 1695 bp, Heterodera glycines
tgccaaatttgggctttattccatagccttcgggggggaaatgaatgtctgacatttcgagacggaaatgcccatttttggggattttctgagatcaatactttcgaaaatttggattacgatttcgataattttcataaatttcttttacagtttggctcatctgccaattcacagccggaaaaggatgggttcggttggatcaccggtgtgctgattcggtgcattttgtgcatttttggcgccactgtataaatatataatattttttatttttaaatattttacaaaaattatttttagctttttcttcgtatgtcctggattgctggccaagccgggctaagtcgggatttttttttaaattttaaacttcgcaaacaaaaaatccagacaatcaatgtggaattcaaaaaaaataaggaaaatttttgaacctgtccaacattgaatttgtaacgtactcattccaattaaatccttcgctaattgcttggcaacaaaatgccaaaaaaacgattgataaattaattaaaatgccaaaatatttggacagttttgggtggtgttgttgtgctgctttcatttctggtggttgtggtcaccgccatttcaatgtccgccattgcgaccaatggtgaagtgaagaacgggggctgctattatttggttggacattttgaaccttggttttttaaatcattttataatttcaagatttctcgctccttgggtcccgaatttggcggtagcattggcctcatactgtacattgcgaatacggtcaatgcggtatatcatttttgattaataatggctgaaaagcagcagccgattcaattattgattgagattgattagcttccacctgatcggaactgataaagcttagttttttaaatctgatcttgatctgttagatcgatttaattactgatcgagttcatcgaagctaatggctgggaagcagccgtttaagttattgattgatattgattagctttcttctgattggattgataagagttagttgttcgcatcatttaaatctgatattgttcaatatatttaaatttgatcactgatcaagttattaatagctattctaatctggctcaatgacctttcatttgattattttgtaatcattaatcaattttcagactatgaactgtgttgagccgcccgaagccatagttcgtaatgctgcatacataccatacggatgactgatgaaacaaagatgcgaccaaggacatgatcagcaaccctcctcaataacggcagaactgctgccgttgtcattcgatgaaaagaccataaagttgattttgatggtggtgcggctgctgctgctgctactgctggtatagtttgaactactactgctactactgctgctgctgctgcccattattgaattcagagaaaagaaaagttggtaaatttgcttcataattataagatgcggaaaattacgagtatgatacttcgggattaataagcagatcggacgagataatccaccaaaattaacgaaagggcatttcaaagattttaactttgaattcgaaaatactaatatgctaataaataaattactgcatttttataatacaaccattttaacaaaaaattctaatttgattataaaattgttactgaattcttagacttatgaagggaggggctttt

SEQ ID NO: 24471 - DNA, 1316 bp, Heterodera glycines
  unsure (1)..(1316): unsure at all n locations
tttattcgttgtccatttcatcaaaaataattggaattatctcgtctttttttatgggataagttccggcggtggatctttagaatgacgataaatataatgatcgcatttaaagtgataaatctatcttctaaatgacctaggggtaacaaaattggcacttttggagttcccgcccatttccgtcgattcattaccaaaaataaaggttcaaaattaacacttttttattttaaaatgaattttgcctggcaacggtccgtccgtcgtttttagacatattccattttattagcagacagagacaaacatcaaattccatcttgctaattggcgtcttattgtgtatatctgttgaggtttaatataatgatatttcattcgaagttcactttttttcattatcccaccgtatgacactttttttccattttatctgttaaaaatgagacattcgctgttttatggcatctgtctgatttacttcttggcatttagtacttttatttgcggcaggtgtgatgttnncgccggacccccttgttccccaaaagtttttggaaaaagcgctgaaaaaaaaaatcaatttcgatttttcatactcagattttcacaaaatgcttatttcaaataaaaaattgctcaaattgatcatggacagtcaaaaatacaacatttgaacattttaaacgtgttttgaataaatttgtaaaaatgaggctttttgacccaaaatgaggctttttggcttgccgaatgaggtttttgaaaattttcatctgcgagccctggttatttatgctcaatatatcgaaactagtgcgctgaaaaaaaggcatatgcctcaaaatgcggtctctacttatatatcaaaatcaatagaaaattaaaaataaagttttagttttataaacaattttttgataaatcattttaacataaaagcaaaaataaaaataaaaacattttatgcctcaaaagtgaatatgcgtcaagtaaatggaaccgcgctgggatgaagtccgaattgttttaatgtacaaatgtcatatgtttacgaccgtaactttgtcaaatgacggtcaacctgaacgatcttgatttcaaaaaaaaacattaatccaaatcacagtcgacttattttggcattttttggaaaattcaattaaaccgggttttaaactggtttaaaacgtatgccgtttttcttaccgaaggaaaaattttttaggtataaaaatatatatgttgtttctacactgagttctctacaagatgcatcaaccgcgtatcccaatcggtcattaggagccgag

SEQ ID NO: 24472 - DNA, 906 bp, Heterodera glycines
tggcaattgggagaaagtgcaaaatgcattcgtcctgcgttctcgtcccaacatgatcagcaacctttaaaacgaaaaccatttggtaaaattagcctcccatccacctgattccaatcatctttgaacatttcaagcccctccaacaacaacaaagtctcttgcggggaccaatcacgggtcggcgcagcgcccttcgtcttcattgcggccaattgctttctgtactggtccaacttgaggcccggttggtgcatcattttcctgtcatttgccgctttcgtttccctttggtccgccgatttttccctttcgtttggctgttgctgtttctgctcctccttctgttgttgctccgattgctgctgctctttgtcattgtcttgcggtggttgtgacaccgctgggtgtgggtacacgcgttggctgggcttttccgcgtttgacatagaatggagtggctgcccccccccccccacacgcctctcccctctcagcccacgccaagggattttcggcctaaggcatcgcgaggacgcattcataattttgtggaggactttcggccgcttcacggcctcaggacgggcgcttcgcgcccgttttcaaactttgtagggaaattaggacgcttcgcggcctcaggacggggcttcgcgcccgttttttaattttttaatggacattcgaccgctcgctgccgcaggccgggcgcttcgcgcccgtttttagactttgtggggccagacgggcgcttcgcgcctgtttctaaattttgttgggcttggacgggcgcttcgcacccgttttgtaattttttaaggcattcgaccgcttcgcggcctcaggacgggcgcttcgcgcccgttttcaaactttatagggaaattaggacgcttcgcggcc

SEQ ID NO: 24473 - DNA, 1765 bp, Heterodera glycines
aatattgtagtcaaactctatctgattaattaaaatttcaaacacagatttctacattacagaatatattggataaaactttgatggaattgataaagaaagttttttaaattttttctgtcagaaatagataaaatgaacgatgcctttattgataaaaaatggcacttttgtgtttgtacaatattagttgattccattgaaatatgaacacggttttaaaaagaaaatttctcccgacggaattaattttcgaattaattaattttctgccacccaaaaggcgttgggcaacaataagggtttcggcaaaattcgacaattttgtcttacgaaggcaagccaactggcacacaatgtgtttatttatagtatgcgattaatttaaatattttacttaaatataaattggatcgtccataatttattttgagtgtccgttcaatttatttaaaattaatttaggcgggtcaatttgatgttgctgttgagcatctcatgaaacatgttttcagagttaaaggcgtgtttctttttcaagacatacggggtaatatttcatcataattaattgatgtggggggtgggattaaaaaactttcaaaagtaaaagcggggcctttgtcccttcattttgacttttttatttgaataaataaaataaaaaaaattatcagattaataatttttaattttattttcaaaaaaaaaaccaaaaaatcggctttagcctagagcaaacttcaaagttcgtgagtcagttttaattgcaaaatgaaattgcaaatttaataaaaatataaggcggctggattgagtagttgctaaaaaataaaatgatataaaattatcagtttgtaaattccactaaacttttagaaaatttctcgccattaccggcaccgacgggacaaaatattctttaaaatttcttaggctcaaaatcctaaattttaattttggacaaatttgataacaaatgcaaccaattttccaaaattttccacaaaggtttttgaaaaagagcgccgcgaaattagtgtgaaaagcacctgccacagtatttcatatatacatacactctcttaaatttctataatttaatttaaaaatataaattgaaaatccaaatccctaccatgctgactccgttaaactccgaccccgacatttcacaacccagacatcggggtttcagccttaatgcaaaggattggttatcattgcttgataagaatttgacccggattaatattgcaattatttgctcctatgcagtttatgccccacatatattttttatgtttatatgtaaaagtacggcacaaataatgccaatttataggtttctggctcgctaaacacgaatccggcatccatttgaacccaagaagccgaacaacaaatcgaaaggccattttccaaattcactttatcgctcaaaattaattcaaataacacgaatacgtgttgagttagtggaaaattcgttcaaaatgcagaacaatggacaataatagctaataggttttgaatcgaagaagcgaatgacgcccaatgaattggctatttcatgcatttgaattgattttgagcattacaataaatgtgaattttggaaaaataggatttcgattttttcttcgggttcgggattgttcaacaacgacccataaaatctataaattggcattatttgtaccggtacttttatatgtttttttataaatatatatttggcctacaatccctttggtttttgcat

SEQ ID NO: 24474 - DNA, 2171 bp, Heterodera glycines
caaactgaattaaattttctgaaattgtatttaagaaaatttatgatgactttttctcgaaaaatttgcaaactttgaagttttaggaaacgcccaagcacgaagtctttcctcgtatctactgtcatgctctttttgatgaatgaataagctttttgtcaagtctaaccagagttatggttatcttatcttttcctggtcttttaagccatgttgaaatttaatttcaaaaattcaaaaaaactttttacgcgttttatgcgagaaaccagtgcatattgtgtgcttttgaaaatccctataaaattcaaaatcgctttagcatatcacgctccaactgatcttcctggacggggaggaagcgttccacgagtggtcccacttggattccatttacggggcaagacatttggcggacacgtgggagcgcaagtggtacccgagcaccgatggcagtgcgtttgagctcagccgagaaattgatcgaattgtaagggataatcggatgccaaatcagctattttgagaggatttggaagggggggggggataatcctaaattttattatgaattttactgacctctaactcagcccccacccccctaattctgtgcggttatttacctctgtcactttcttcgttggggtatataatctctttttttcatggttactggaaattttgatgaaattcatcaactaaaagagctcaaaaaaattaatttgaaaatcgttgaaaaaataaaataaaaatataatttaacaattttaattcgtcttaagaatgtaggatgtcttggtgcattaacttcccatctttcttcactttttgcctgagatcaatttcctttttattagtttcatttttttaattatgagcggagttttactattataattttttaaattttttctcaaagccgccttttcgggggagcaggtgctaattgcactttataatgataattagtagggttcgaagttgtatgcactaaaaaatgccaaatatgcttataaaatatgcactaaaaaccggaaaaatgcccaaatgtgcactaaaatatgccttaaaaattacccaaaatagcttttaaccctcaaaaaaatgccaaaaattgtgtataaatagagaattgactttgaaaagaagacaagggctgggagcatttttttgacaattgcaaaaatattgaatttctaaatttttgaatttttattatatgctaaaacaaaattacatttttatataaataattttttttccaaaagttcttacagaaaattaaaaaattttcgatttttatttaaaatttccaaaaagtcgatccttaggggtgtatttttcgcttttttcgcatttttcttgtgaaaatttgctaaaaatgaccgaaatatgctctaaaagcccaaaaattgcgaaatatgcatttattctgaaaaccccaaaaatatgcttttatatttcaccaaatcaaaaaattttaacgtagaaatgctttttttgagtccctttcttcatagcatatgcgcagaaaaaatatgcaaaatcatacaatttataaccctaaaaattagtaattagcctcttaaattcaaaggatgtctttgtgctgctggatttgttgggtgccaaaaacccgcacattcaaagcgtgccgggccatggtgcggcctcactgtttgaacaactaccgtacactggtgagaaaggggcttcagctactgtaaggtgatgataataattttttaaaattatacagagggacagttggcctaagctgaacttgctgaaccggatcccgagaatattttatccgggcacttcatactttggagcagttgaagatgatcacctcgctttcatgcggaagggtaatggaaagcataagcagaaatttattgaaatttgttaattttttgagaaaatttaccaaatgcagatattgggaatcgtcctaataagataaaaaacgggcgcgaagcgcccgtcttgagcctcgatgtggactaaaaacccctaataattttttaaaaattcaaaaaaacctctctcaaccaattcgataaatttgaatcgctttacagcctaggtagcgaagctcccaaagcgcgaagcgctttttcccacaataaaatgccaacggttcacgcacccgctagttatatata

SEQ ID NO: 24475 - DNA, 1077 bp, Heterodera glycines
aatttagaaacgggcgcgaagcgcccgttagaggccgcgaagcggccgaatgaccctataaaattttttgattaatctcaaatatcttttggaccaacaattactctacaacccatagcttatctaggtagcgaagctcccaaagcgcgaagcgctttttcccagctaaatagccgacggttcacgcacccgctagttaatatatacgttatattgacaaggagtttcgtttcaaaaactaatttgagcttaacggctaatgggacgggtctgaaagtagtggaagggtcttacaactttttgaggagcatccgggaaaactatagagaaaaattcagcgcggacgactgagtcccggggaccgatttctcactttttcttgcagtttagggcccctaactttttttctaaaacccgaatcaaaaagtgcccgctgtgagggcactccccacaactgtcctctacatgctggtattttttatttttttattagagccaccccctggcctgcacgcttggctaactgaagtgtgctcaaaatgtacacttcagtaccaggcgaataactcgccaggggttgctttgaccgaaaaattgtttctgagcaaaaatgtgtagtatttgaaaggctatccaaccaagttttaaaatttcgaaaattttgaaaatttttcgagctaggcctaaaaaacggttttcgggtttttgaattttaggattttttaacgatttttcccagagaaacggagaccacttccaaaacatagtttttcgagctctatcgactggtatttttttcggaaaaatttcgattttttcccggaaatagaaaaaatttttggcctgagcgggacatttgagtcccgggtccataactcgttaggggttggttttatcgaaaaaactccatagggcaaaattgtagagttttttaagctctatcgaatggtgtgccatattgccggaaattttcaaaaattttcgagctaggccccctagaaattttcgaaatttttttttgggttgaaaatgggggacaaaaatatttttctggggtaaattagggtcctgagcaca

SEQ ID NO: 24476 - DNA, 1925 bp, Heterodera glycines
  unsure (1)..(1925): unsure at all n locations
ttttaaaaattctttatttttttggcaattttttgcccctcggattttggggcgaatattgaaaatttcatatctagcctaaggggtgaccaattttgagcaaataaagcttaaaaatagagaaaaatcaggagaattttatgggatttatttaggttttctaacatcaatatgaaaaaagttattccagaaattctggaaattttagatttttcagaaaaaaattcgttactgccttctgaaaagctatttgagaaaagtaaaatactacaaaaatccgcaattttttgctctattatataaattttatttggcatttctatcacatttttaataaaagatacaaaaataaaagtgattttgggattcgggaccaaaggggggtgcacatggtttttgagtgaaaaaattttttcgacaaaaatcttccaaaaacatgtctttaggggttatttgggccgctgatcacgaatacgtgatcagattttacgtttgacatcgttaagccctcagaatccctgtgtgattggggattctgggacatgttctgagggggggggggccgcaggttcgaatccggacggtgtaacattatttttctttgtatttttggcttattttacaatgtttttaattaatttttgaagatttcttttaaattatttaaatttattttttttaaattaaagaatttcattatttatttttgaatttgtaaaaaaaaattcatttaatttcaaattaaataaatattcaattaataatttccaaggttgtttttaattaataaaagagtattttattattaaaaaatttttaaattaaaatgcactcgatttttaacttttaataaaaacgtttccttatttatttaattttaaacaatattgtacctctcctaacaatgttgtaccacttctaatcacagttgtacctcttctcatcactgttctacctcttctgatcactgtttacctcttctaatcactgttgtaccacttctaatcacagttgcacctcttctaatcactgctgtacctcttataatcacttttgtacctcttctaatcaccattgtacctcttctaatcactgttgtacctcttataatcacttttgtacctcttctaatcaccattgtacctcttctaatcactgttgtacctcttataatcacttttgtacctcttctaatcaccattgtacctcttctaatcactggtgtacctcttataatcacttttgtacctcttctaatcaccattgtacctcttctaatcacttttgtacctcttctaatcaccattgtacctcttctaatcacttttttacctcttctaatcacttttatacttcttttatcactgttgtacctctttaaatcacatttgtacctcttcatcaaatttgtacctcttctaatctctgttgtacctcttctaatcacttttgtacctcttctaatcacttttgtacctcttttatcacttttgtacctctttaaatcacttttgtacctctttaaatcacatttgtacctcttcatcaaatgtgtacctcttctaatcacttttgcaatcccaaattgcttcggatcgaaactccacaacccataaatatcgggcgcgaagcgcccgtccgactcaacacaatttaaaaaacggccgcgaagcggccgaaaagcacaacaaaaattagaaacgggcgcgaagcgcccgttcgaggacgcgaagggcgcgaagcgcccgtcttgagcctcgatgtggactaaaaacccctaataattttttaaaaattcaaaaaatctctccaaccattcgatcaatttgaatcgcttcacagcctaggtagcgaagctcccaaagcgcgaagcgctttttcccagctaaatagccgancgttcacgcacccgctagttatatata

SEQ ID NO: 24477 - DNA, 1130 bp, Heterodera glycines
tcatcaccatcattcgtctcccaattacaaatttatctttcaccagcagaattaaaattgtacgatcatatacacatttcggcactacttgcaaagtgggacggggacacgttttagcgattccccctttggtttctaataaaatcattgcaatatccaaggaaaatttaaaataaatttcaaaacgccaaaataattataaactaagattttcttaaaattcaaaaaattagtatttcgaaatttcatttctaactaagaatccatcagtcgttgcgggcggagattaaccaaaagtttaatttaagaaggattcattaagaaggattctctacttattcccgtcattcgtctttttacaaattatcttttctttcacaggcaatacgtatttcatttacctaatttgaatcccaaaattccttaattaatttgaaaaattttctttactgtttagccatacatattttattcaatttcatgacgactcagaacagtgacgaagaaattggtgcggaggctttgcaaaacggacagaacaatggtggaggaggggaagaagcaggagcaacagcagttaatgatggagaaacaattgctggagaagttgaaggcaacaaagtgaaggaattgaaggcgaaggaaggggaggaggaaaaggcagttgacaatggggatgagtcggttgaggacgaccgcgcattcggcacaaaaacgccgccggcgtcgcaactgcgccaaacgccgcctctctcggccagcattcgggctccgaccgtgcgcaagcgttgctccgcagtctttggtgcaaggacgaggtaaatttaaattgttgtcttggagtttttcaatggaccctaaaaaattaaagatttcatcgatttttttcaaatcgactgcaattttgtccaaaatttttgctacaaaaacagattttcttaattatgtttagccacacttccactagtggcggcggtggtggtgggctgtccgcgttgaccagtgcgatgttgggcaagaagccacgcaagcagtccgtgctggacaacgcccagtccggctggcgctcatttgtgcaggaggaacagttggagcaggagatggagtcgcacatgcgcagcaaggacgcc

SEQ ID NO: 24478 - DNA, 1519 bp, Heterodera glycines
  unsure (1)..(1519): unsure at all n locations
gataattcaaagagttgttccatacacccctttcatnttggccatgttgnagacacatcacaactgggaatacgcatacggacaatcgacaaatctcaaatacgctcttaagtacccgttcaagggagcaagtttttcctatttgcgttgtgcaaatgaaaacaaaacgaatgtcgacgaaccggcttactatgccagaatgctttatcgttcacctgttgaggcctttagtcgcatcatgtcattccgctacgcaataatgtcacataatgtaatccctttatcaatccatttgccaggtcaacagaaaatttatacacgtcctggacttgaggcccaacaaattgcagaaatgttacaaaatggacaacttcaacttcctgatacagccctcacagcatattggaagcattggcgagcagatccaacattgaaaaatatcttatttgagaatatgcctgagaaattttcgtttaacaaaaaaaacaaaatctggaaaccacgcatcatttctaaggatccgaaaaggatggcaaaccgcagaccatgcattggacgaatttatcctatcttgcctcgggcccaagaactttttgccctttatctgttgacaaggcattttcccggtgaccctgatcatttgaagaaagtgggagaacatcaatgcgaaacgtttttggaatcagctcgacttcggggacttatcaaagactcggatgtttggatccgaacattgcaggaaggagccaactctttgactccagctcagatgcgacaactccttgcaagcatactcatttttggaaacacggaaaactgtgttcttgatggatcaatgctatggaatcgctttcttacgcacatgtacgactcaagatgcagtgagacagagaaagcgcggcgaatcgatcaagcactttcattgcttgagcgattgttggttcgccttggaaaacaatgctccgattttggactcccaacgccgttaaattcgattgtcaacgacccagatcgaggcgtaaacgacttcttctttcctgaaaatattgctgacgatgaacaagacgaatcagtggacacaagtgcatttgaacacgccaaacttaatgatgaacaacaacacttcttcaaccgaatacgcgatgtcgccgcaacaatgccgagtaattcaagcaagcgcttattctttttatctggtgatggtggaaccggcaagacattcctgcttaactatgtgctgtaccacatgcgaagattgcgtaagaaagtcattgcaactgcctcaacaggaatggcttcgactcgcttctattcaggcggcacaacagtccattcagcgtttcgattcggcataaatgttgaagttggccaacttcctacaataccttttgacagctattttggacggcgcattaccgaggcagacattatcattattgacgaaattacaatgcttgaaaaggttgttctggaaaatattgataaactctgccgaacatgacaccgcgctatgcgcatc

SEQ ID NO: 24479 - DNA, 975 bp, Heterodera glycines
cggggatctctagagtcctccttttcttcattctgggggaacagagacacatcgaccgactcctctttcgacaaaactcttgttttctttccgccctcccctcaactccttttcttctttctggggggacaccgactcctctttcgacaaaacttttgttttctttcctccctcccttcaattccttttcttcctcctgtgggggactagttcgactcctctttctcctctctgtctcccatttcctccttcttcctcctccttttccaccatgagcaattttttgtttttttcctcatcactatcatcgtccatcaacctccgtctccgaaaccgcgaaaaaacgggtggaaaagaggccctcttctcgatgattttgtgtttacattgccgctattcttcgcttccttcatcctcgcgaacagctcgtcccggttgctgggcaattcttcggtcacagttgccggcacgttcggtgccacagatggcacaacaacgggcccatcatcggctgctgagccatcgccatgttcggcatcagcagcaacaattgggtccggtggtggtggtggtggtgcagtgcgatctggcgacacttcataggcgggcggatgattgatgggacggcctttgaaaaaaagttgttaaaaaatttaaaattttcccagaggcgcacctctaggcctcaaagtgcacatgaatgctttaaaatatgactaattgtaaataaattaagtagtaaatttaaccatttttgaaggaaaaaaaaacaaatggaccaaaaagatgtcaatgaataaacagaaaaaatatagaaatttatattgaaaatgaggagaaaaagcatgagtgaggcgcgcaaaaaaaaactcaaaaaattttgttttaggaagaattcctttttttgtaactctttttgcgacgcttttttaaaaattttggcgaaggaaaacgggaaaattttagtgaaattct

SEQ ID NO: 24480 - DNA, 1939 bp, Heterodera glycines
  unsure (1)..(1939): unsure at all n locations
tttgttaattaatattaaagcaattatttgtttatttacttttaaaaaaagcaannangnannannaaagcnaaggaanactttgagagcaccgnnaanaacagnnaannccnaccnaacgggagcgccgngcggannagaaccccaaagcannnaancaaaagcgnnaaccacaangcnacggcgcncccanncgcncncancnnannnnncanananaacacaaaacaannnngcaaaaaagncncancaaanaangannngncanngaannannaaaannnnngacangaannnnnnaaanaaanangngcacnccnnnancnaannannannannnnngcanaagacaaanngannnaagcancagagncaagcacaaaacggcgcanacaaagggcacaacgannnnggngcanaagccaancccnagcgcaggacaaagganaaagaagnnnacangggagnncggnagcanncaaggaccccaagncaaancccannnggcaaanaacacatcgctcatcannncggaccanngccncgnncacntccagaangggaagnanacnatcgcantgttccgtgttaaaccttggccatgttgaaccactgatggagaaagtatttggaccgtttggggttgggacgactgaattcgttcgctttggggctgttgacgagcattctttatttaaaaataaacaaataataataattcacaaaatgttttttttaatcttcattcattcatgcgtctcaccgctctgcgtctggttcctcctcctcttcctcggccacgtccggcattggcattggcattgtttcggcgccgagatgaagaaatttgtgggttctaaacaaaatgcaatattaaacaaataggcaaaaccaaaaatcgttaacaaccatattgttgttgttgctgttgtccaaagcgataggttccatttcagctgtagtggtgagatcctgtaattgatatgtctatttttttttacatttttactaccaaaaaaatttggttcaaaagctgatcgtcattgtcgtggtcaagtgccaaaaactgatgactttgctgctgctgctgctgcgcttgaaccacgtttggttgcaagatggcgtttgcccggatttgtggatgttcaccctgcgttggttgtacactctgttggcgctcgttcagcggactcggtacagttggttgttgctgctgtacattgtttgtttgtggcgacagtggtggcggatgttgctcagcttgaagtgtcggcattgtgtctctaccttgcattggttgctgattatatggacgatcattgtgcgaaatcgttccactgtgctgctgatgttgagggggtagggaatttttttgaccatcgactatttaattttatttagtttttggacaaacaaattgaggaacccggtcgctcggacttcgaagagttaatggattaaatgctactgtcggtcgcttaaactcatcaaattcaaaatgacaaataaataaaacaggataacccgaatcaagtgaactgaacttccaaatgcgaaagataaagtgtagttcacagattgtccaaaatcgcgcttcggtctcacattcaaatgcatgaaccggtaagtgcctccaaccaagagagtgtttgataaaagtgtagccctggcctctttagcacaaatatgaacacgtaaatgttgttcattttccaacaaaatatttatgccgggcgcggttgtgccattgcgaaaaggaactctctccgcgtaatcaaactcaagcactttaagggttaatccactaagcaaaaaaaaagctttctactcagactttaatgaaagggtttacgggatgtatgatccaatttgccaatcgaagacgaaaaaatcaattgttgtagtgccatcctgataaaattgctccagaaatggtcga

SEQ ID NO: 24481 - DNA, 1565 bp, Heterodera glycines
  unsure (1)..(1565): unsure at all n locations
aacataaaatcacaaattnttggcctttntggcacataaaaacatcgcacatatttcggggttttggcacatatttagcaaatattttggcattttatgacaaaattgtaagaaaaatacgagaaaattgaaaaatacacccctaaaaatcaaatttattgccatttcttacagcatttgcaaaatttcttaatatttcgaatgctgaaagtattcaaatcgaaacataattggtcattggatttcagggttctttgctggagctttcaatttacaataagttgtaagggaccgggacatgttactgaaaaacacgtacaactgagtaccaaagtccaggttttgaccgggaccgggaaaagtctcgggtttttcccgtttcccaaccaaaaaagtcccgtttcgaacaccttgaaatgtatttgttttgcaattgtgcgggcgggcgaaaatgataaagaatgtgattttttgggatttttatgcaaaaatacacttgatttttccaatttttaacacatattttagcacatattttgccattttttggggtttttagcacatatttcagcattttttagcacatattttattacgtatttcaggatttttagcacataaaaatccggcgaaagtatcggtcatatggcccggagctcaaaatggccgaaatatataacaatcgatagctctcggtctgtaatgtaagaatccgaaagaatttttttcggcaaccaatccctgaggggttacagagcctggattgaaatggccatatgactttgggactgaactgtccaatacttaaaacgcatgaattgcgacaaaatagataccaatcgaccggactcgctcagttcggtcgtcacggttcgaccgtcacgatcgccccctcacggttcggccccaacgtgtttttccactatagcttttttatttgtaatccaaatccaataatcttggtatcattcgaaagctcttaatatgctctattagccttaaaaaacaaaaaaattttcaagcctggaaaaaatttattaagaaaaaacttgaaaattttgactttttgcaattttcatgtataacttttttgagaattgtctaatcgcgaagcaatagctgattaagcttctaacattttaagctttcgaatgataccaacaatgttggatttggttgataaagaaaaaagttatagaaagttatagtggaaaaacacgctggggccgaaccgtgagggccgaactgaggtaaaccgcaatcgactcctctcggtacgataagcagaacaataataattatggaatttaattaaatgaaaaagaaaaaacaaattaaaaagagaacaaatattttggaaaagaataaaatgttggaaaaataaataaataattaaataaatattaattgagtgatataaagtgagaaagcacgaaaataccacccgtttgacaaccaaacgattttcattgcttgcacaacgtgccccgacaaaagggctgccgcacgggtccaccaaaacgcgattttctcatcccgaatcacttccaaaccatttttgacct

SEQ ID NO: 24482 - DNA, 2154 bp, Heterodera glycines
acacatttacaaattaagaaccaggattagtgtaccttttttttggtcgctaataagtggtttatcatttttttttttgtaattataaatatgttctataaaacaaaaacaaataatgttaactttaatttaatgattgcctaaatatagccgacttaatatttgtttataattgcaaataattaaattaattaaatattcctttagattttatcattttgagttattattttagctttatatatatatatatattttgcattagcactatttaaaattgttttattttttatttttaaacattcaattatttgctaatttattctgtttgttaattaaattttacttttatgtaatttactcgatctgttgcgattcaatatgtacaattcatcatcgaatatatatatttcacgaaattattttttgaaatttataatattcccttattttataattgatttattctttttgatgtatcaaaaagtctatttttctgttaaattgttttttctatggtcatttcaatatcatttttgtgttaattcttttatttacaattttaattcttttttttcttttaattatgaaaaaatttagtttttttattagttcatagttctacaaattatatatatttatttgtcattgcacttttattttttgttatttttatattttattttcattttataacatattatgtatcatttaacatattacttttttcttgccttcaatttttatcactgaatatattactactaattttttatattcttataataattaagaatgaaattttacttttattttattaaattgaaaaaaaataaattttaaatttcataaatataaataattctgagatggttttaaattttttcactattttaatgacttttatttgcagcaacaatttaattatgcttatctttcttctttacttttttgatgcttttgagtttttggttaaattctttttgtttttattccattgtttcaatagtcaaatgctgattttaatgcaaatgattttctaaatagtaattatctttcaaaataaatataaaatgacttcattccatggttaataattaatttatttgactattaatttttaactcaatcattcattttttctcttaagttgcttgaacaaattcacataaactatttaataaaatccttttctgtttcataattttgtgtgcatttcttttcaatttcataattaatttaaaaaaatgcgtaatttattttttttttaaatttggttcattattcatatataataaatgatgagatgtcacgaaaaatgaatattttaaatcaaattttaaaatgccttctcttgctaatgtccataaatttggcgccgtttgtcatttgtgccacccatggaaatgaataaatgagtgaatattcggcacaatcagtcaaattaactacacaatgaatgtcgtgcatttaattaattattacagaattttaaaaaaaattcatataagcataaattttttagaacaatgattcattaaaattgtcatttgataccgtattttatcagttagttcgtagaatttaagacataaaaataaaactttaattgttaaacattgacagttaaagacagaagcatcattttgtgtatgctacttagtgtactgccttccttattacggtatttcttatacggtgccagtaacttcaaatgcccacgatcgttactcggcttccaccgtaagaatgccattgggggacatgtgcgacttcaccgatgccggactcactccgtccggcagacggtactgacgacggagctcgcgtttgacgccatcttaacttgttaattctttgtttgtaataaggatgaattgcttttcagctattacattttaattggtgctatgtcattacttaaaaaccatcataatgggcgttacttaattttttgcttataactttgctctaaaaagaccaaatttttaatccttgctatcattcaatagatctaaatgttctttatgagccttttaaatttcaaaaaattttatcaagtttaaaaaaagtatggacaaaaatgttcgaaaatcaaggtttttgagttctcgagctataatgtttttaaaattaacgaaatttttgaaattt

SEQ ID NO: 24483 - DNA, 1120 bp, Heterodera glycines
  unsure (1)..(1120): unsure at all n locations
aaaattggggcccaaacgaccctggggcccaaaaacgggggcccaaacgcggggcccaaaaacgggggcccaaacgcgggggcccaaaaacgggggcccaaacgaccccggggcccaaaaacgggggcccaaacgcgggggcccaaaaacgggggcccaaacgcgggggcccaaaaacgggggcccaaacgaccccggggcccaaaaacgggggcccaaacgaccccggggcccaaaaacgggggcccaaacgaccccggggcccaaaaacgggggcccaaacgcgggggcccaaaaacgggggcccaaacgaccacggggcccaaaaacgggggcccaaacgaccccggggcccaaaaacgggggcccaaacgaccccggggcccaaaaacgggggcccaaacgaccccggggcccaaaaacgggggcccaaacgagggggcccaaaaacgggggtccaaacgaccccggggtccaaaaacgggggccctaacgaccactgttcccaaaaacggttgcccaaacgaccacggtgtccataaacgttgggccaaattatcccgttgctctatattttaagattatactatttcgttgtccataattgggggttaaaactattatttttgatatactcttctactgttaattatctcatttccctcataaggtatgtctttacttttttctgtactccattgagcgcattacataattctcttcgggtggacccatgaattgtttcaataatttttgtcgttttttagggtctttttacatttattttattattttacttttttgtaatatttttacaaatttttttttgttgtttcatttcacgttttgtttttttttcttttattttttttatttttgaaaatccatttttttgtatctaatttgggctttttatttttttttttttccaaaattttttttttaagattttttattttcaaattttttattttttttttttttttttttttacgacaaatttttataaaattttttttttttttttttttcatccccccccctttttttttttttttttttttatttttttttttttttttttttttnnccccctgcttttttttttttttttattttt

SEQ ID NO: 24484 - DNA, 1805 bp, Heterodera glycines
  unsure (1)..(1805): unsure at all n locations
cccctcccaccattcgcctcgcgcctttctccgttatccatcggcggcagtcatcagtcgtgcaaaaaatgcgcttaattgtttcatttaaacgcgaagaaagaaaagatccttcaaattgcaatatttatttgtgtgcgaaagagtctctgcagaaatttagcctaaggcattttntagaaaattacaaatataagggaaaccgagaaaaaacgagaaaggaggagagaatgggggtgagagagggtgaaagagagagagagagagagagagagagagagaggggaggagagagaacggaaggaagagagagagatgcattaaataatggatagccaaaatcattaaggtaagggacttttgggcttccaatcgtggtaaaggggaatcccgaaggaggggtacgatgggatggataatcagtcccaggaatccctcccactcggttagacacaaagaaaataagtgactttattggctttattccaggggagaatgattgtgagacaattaccatagaaattaattaaatacaaatgaaagtaaagtgatcaatcaatcaaattattagtctcaaaaggggcggtacaataaaagaaaataaatacgaaataaaattaaatgtaaaaatgccattcctaatagtttcggcaagacaaaaagcgaatttaggccatctctttcaatctcaaacgaacaaaatatggccactgttggacgaactgcgtctgatcagaatttgttctcccaacattcccaaatctttggaagccgcgcgagactctcgacgccgtgaggcaaaattgacactgatgccagtggtgctgtggtgcccgacaagtccgccgctgacccacccgccgggacggcccaattggtgggtgcggctggtgcgcaccaacgaaagctgacttactgaaccgatcggacggaagtgactgatcgaaaaacacaacagaggattgatcggcggccgatcagggtaatttttcaacattttaaatggttaaaaatcatttgactaattttggtgtcattgggtcaaaaataaatgtcaaacggacggagttcgctgagtcccgggatcactcgcgttctttccaatggtgaggaaaagcgacggaaaaaggtggtgatctccagccaaacgcacaattgcattggcaggaaactcaaagcggcagacaaaaaggagagacctttgggggatggaaaaaagagaaagcgatcagacaaaatgatcactgattttgatcaacaaaaagtgatcataatagccaaaaaagtttttgcctataatttatactactgtagaattgtcattggtcataccgtaatggaagctaaacgctgaaggctctccggcggcatttggcttcatccgaggagccatttcatcgtcgacgatgcaaatgacctgcagcactccgaccaaaacaaccaaaccttaaggaatcataatttgattttgattttgaatgccaaaaatgggggaaataccgccgaaaacgtatagaattgcggcacaaacgcttttccaactctgctcagaatgaccgacgagtgaacacaaaaggccaaaggcggtgagaagggagccggaacagtgcaaaatggtggggatgagaagacggactttggcaaaaatggaaacgaaatgaaaaagattagaaaaataggaaaaaaagaaaagaaaatcaccggtgacggcattcgtcgcgacactgaaaagggaaggcaattcaaaaacagaatgaggccaaaaacggaccttttcaatttttcaaaattttttacttacaaat

SEQ ID NO: 24485 - DNA, 1800 bp, Heterodera glycines
  unsure (1)..(1800): unsure at all n locations
cctcagacctnagcctcacccaaattttccaagaaatgtcgctaattttttcaaaaaatccacaaatttttaatgaaaatctgctaaaaatggctcaaaatcacaaaatttggtcacttttttggacaaaatctgttaacaaaccgcatttaaaaccgcaaaaattttcccggcggcgccgcgcctatcggcaccgccggccccctgtccccaaaaattgttttggaaaaaccgcgccacataaaaaacgggtgtgaaaagcaaacaaaaaaaaaaggtcgtcgcccggggggaggtgccccccccccaagccaaaatcctgggaacgtccctgattcctacatgacgctttttcagatatttggaggcttgtcgtcgtcgggttgtggacgacttgcgcctcgtcagaacgtcgctttctgcgtgttttccacccgagtacaacatttacgatcgatacgtcaaatattatcatgacagtatatcacttcatgtaaaaatggtatttttaaacccaattttttaaattgaattttagatcaagaaattagcttccgatgcgcttgaaaagaatgaacttgtgcaattgctcagttggatccaaagctatacgtgagtgagattacttttgacaatttacattaaaccggacacgccgaagttcttggataataatcggaattgttgatgaaatttttttattttctgagatttctttgtcattatcttgtagttttttaaatttataaaattgccttttcttctcgtacgaattggtccctcttcattctatgatttacaacataattttagaggggagcaaatgttgggccatcccaaattgggaatccaagcgcaagcacttgtccacgagtttccattgctacccaaatcgaccaccaatcatttgcacgaccgattcatcgaaatgactcggagagatatgcacgaatggctggacaagacaatgatgcaggaaaaagacgtagtgaaaaaaaaaatctgtggtttaatttctgtatttttaggattggtataaacaggtgccacccgagacggacagcaacaaattcttttacactcagttgcccagcattttatttggaatggtcgaggatacggtgagttcgctgttcgtttttgagtttaattccgcgtaattttaaggtgtctctttccaaagaaatttcccaagaaattgttccgcgagtgattgatgttgccgtcgatgagtttattattttttcaaacaaatacaaagaggcggcaacggcgtacaaaggcaaacactttgaggatcggtcgcatttccaaagttacacttcgacagtggtgggcattggcattgattaaaactcactaattgtagaataaaagtgcagattgcaattgccaataatttggacatttgtgtggactccactgacaaactcgaaaagcacattcgtcttaccatggaaagcggctccatcgacggcctttcctcgcccgaaccgaccattgcctatggccccccttcagcacgttccgtcggattttctgtgattaatcgccaggagttgattggaaaaatggagcagctgaagaaaaaatggcaatttggcattcaatttgcgtaagtcgtaaaatttgtcaatttttatatgcaaatgtgattaattaatgaaagtgtatcagcattgcttgaagaagtggtggaggatgttcaaaagcatatggagcagttgatgactctgatctatggcgaagtcattctcggaaattaagcagttttaaaagttaaatagaaatggcgcgttt

SEQ ID NO: 24486 - DNA, 1411 bp, Heterodera glycines
  unsure (1)..(1411): unsure at all n locations
ttaggcccgaaatttttgaatggaatttgattgaaataagagaattcaacaaaggtatgccaatactattcctctcgtccgttttgatgttcttcagaacagaaaagactgattcacaaaacgcattagaagggaaaattgacagaattgcagagactatgtaaaaatcaccccaaattcatcactcgagacagaaacggctaaatctgaaattgcttcctcagcgctggaaatttgagttgaagatgattgttgaaatgtaactttggaaatgaaatcagaaatagatttttgggacattctgcagactagaaaatgaagatcaaaaatgaataaaataaacctgaacattaacgaaaactatatttggctcttaattttggcaaaatattgagttggccagacggagttggccagacggagttggccagacggagttggcccgttccgcatttggcatactttttaatttttttacatttaactttgatttgttgagaagtgatcgatcaatttagaattatggaattattggcatactcataaaaattgttcttttactgttattggaatgatcaacttgtgttttttttctctattattagaacttgcaaaaaactgattttgaaaaataaagcgattctctttgggttgccgttgtacgccaaaaggtgcgaatcaaaatttacgctttcaaggagtttaataaatccattaggattaagtaaatcgtccaattctgggtatgccaaacggtcaagtttgggggattcttttgtggcctgatcatttttcgataaatacgtcttatttttctctgatcattatttatcttttccttgaccaattcttccggtagttttggcaattctaaaccttacccatccgatcattttcatttttccctgctgatcagtgttaatttttgtaagagatgacccgtgaaaatatggttagtttatttgagtaattattaaaatataggcaattagcaaaaattttcccttttatttatgccgatgaaattgcctcgtacctcattaaaagccccccagagatgagataagagcatgggattattttattgtagttggagtaaatcttttcgatgacaattttaccatccaaaaattgtggcccaccaaaaaatgcccgttgaattcgtctttaagttgtgaaataaaacaattgcatttaaaccatcatattagtaatgttaaattatgctttttaatgttttgaccaaattaggtttttaataactacaaaaatcaacagcaagtaattaaaacaanattgaaacattagcggacggcacttttgcattaacgccgccgcttnttcagccaatctatgtgtttttggctaagtaagtctgaaaaacgtatacgctgntgtcccccaatgatca

SEQ ID NO: 24487 - DNA, 2032 bp, Heterodera glycines
  unsure (1)..(2032): unsure at all n locations
ttttgggaagtgtcattcatttgtggctttccaaacgtatncgctgagggaatggcacattcgggacaaaatatgccnnnancaatgccaattgggtggcactttcaaaatgcgcagggttntattttatgttntattttattattttgaatattcatttcagacttctgaatcgttttgcatgtttctgctccaaaacagcgtcaacaaaatgctattttctgctgaaaagctccaaattcgcactgattttcctcgtggtttcgagaaacagtacgccattcttggccaaataatgagggtattaattaattaattcaaaaactaaaatttttccggttttcatttatttttagaatgctctccacgtcgattccgaaaagagaacttttgacggaaatggacaattgctgaaattggctgccaacttaatctcccattaattaacaataaatattgcttttatagtaacttagtcatcataatttgtttagacaatttaattctgaagaaatgttcgtgtttaatgctaatatttatccatccttcaaaaaaacgaaataaattcaatgtatttcaaataaaaatgtaaaatatgcattttaattttgctttcaatcacttctttttcctttccttttatttctttagtgcagcaattaacctgagcagctgacacctgcaattaaattctgtcttaattagccaaattagcaaaaaaaaaaattgccgttgctttgcttcttgtagtaagcttggatcagttttcctgaagttgtccagtaggaagacgaaccgacctaaacaaaatttacaaaaatttagcattttccatttcgaggaatgcaatttgccaacacagacagtctcggccattggttaccgttttttgaaattcacaattcatttttcctcacattgctcgccgatgcgctggtggtcaatgccgaacacgactcgcccttgttacagacggaccagttacaataggagattttgtagccgtccaagaaggaccaccatgcgctcatggagctggtcgcaattgtgccgtcgccggacgattcgcacgcgccgtactcagtcacaaaaatgggcagacctgacaattagtgcaaatattcatttttaaaccaattatgaccccaaaaaccactttttgtgtaggcagtcttgagttttgccccgaggccagaaactgtgtgagtgccggcgtaaaagtggaaagtgtacctttgtggaatgtgtcaaaaaagattaactaatgaaatcccaaaatatatcacatcgtagcatttacaattctattcacattaaattcgagtagccactaattggattggcagcggcaacgtccacgtcctttcaaatgttcgttttacaataaattgtatgcaattattgtttatttttacttgtgaccagttgggtgtgcccagaatgatcacattctttgtgtcatatttacgaattgcagcaattacctgcaacacataagcatcaattaattagctaatttgcacaaaatattactattttttacttttttgtggtatgggacaagatcacttgtccacgacaatgccaaaggctcgttgtacgtctcgtaaaggatgtgcgggtaactgccatatgctttggcgatttttgtaaagaaagcaacctcaaaaatatattaataaaattttattattattattattattatattttaaattttaatattaattttccaatttatcttaccgcttgtgttgtgtacgtcgcgctaacatgccaatcaacaatcacgtacatgcctaagctgatcgcagcttcaatcaccgtggtgaccaacttgtattgggtgctttcggtggtaaggtagccgccctggtcaacgcccatcgcggcgcggacgacattggcattccaggtacatttgagtgcctaattgattgagtagaatanatgatttagagcctgaattaattccttnatttgagtattnattaacttgaacagcctaattagtttaatggatttaattaat

SEQ ID NO: 24488 - DNA, 1574 bp, Heterodera glycines
  unsure (1)..(1574): unsure at all n locations
agaacaacttcgaaancagtgccaaatgtacgttgaagtgacctctgcacagacgatgctgagtttttccggaacaacgatgaacaattggaagacgattttgttggggactttgggcgaagtcggtttttggcaggaaaaggattaattgtttttttttgtagtcaacacgaacaattatcagcagccatttcgacggcgcagaagagaggcgacttcggcaattcgcaacaaatacaaataaagaacagaagattaattggataattatttaaatcaactttttgtgtttgaaagtttttctttgacttctgatgtctaaatgttattttctttaaaattcaccgcaatttatttgctgattaaaattggtttgttccataaatatccatataaatgtgaatgcttgaaatagtcgctgcttaaaatctttgttttagatgatggccaacataaatgaagataatacggagtctgaattggtgtccattttgccatcacttggaccgttcgactcgtcttttggcattttgtctgattgttgttatggtcaactgatcctgcttgggttcgtttaaatggtctatggaacgaatgcatttaaaaatttatttaattatctttacgcgtattttatttgtcctttttgggtcaatagtagttcgtataatggcagttcgtacaataggatggatgtccgtacaatgtattgttattttgatgaaaagtatgtgtcactatcggaacccgttagtttgaccttcacggttcggccccagcacttcttcccactatagctttttatttttttattgagaaaaattgaaaatttcgactttttttcttgtgtaacttttttggtaattgtctaatctcggagcaatagcttagaaaaagcttctaaacatgttaagctttcaaataataccaacaatgttggatttgcttgataacgaaaaaagttatagccagaaacttgggctcgtacgaaaccgaccccgacctggggccgaaccgtgggggctaaactgacgtagactggtcactatatcacatatcttttaaaatttgattattgtacgaaacgccaaattgaaacattgtacgaactgcctttgtacgaactgcccattgtacgaactgccatgaccccgtcctttttggttaaaggtacggcggtgtctccgaaacatacagtaaccaccggagcactacgaacggtaatttatcaccaaaaaagcgaaaaatattattggcagccacagactcttcaggtcgaaaacattttgtcaaaatgtttttcaaacgacggaaggaaccaaatggaattcgaaaggggtcggcgatgacattgagcagaggagcgaacgaagcgccggcagtaaaggacgccacacggcacaccgtttcatattcatacggaaaatcgggcacagtactggtggaatatttgcctgactcgagtcgcgacatgtttcaagtgggcccatggggggagaacggagagagtaaaccaaagaatggacaatcatttcgccaaatgtcctctttgaggagggatatttactaaataa

SEQ ID NO: 24489 - DNA, 350 bp, Heterodera glycines
tataataacgctgcggacatctacatttttgaattgaccataattggtaattactctttctttttctccatattgaccatcatactcatactccccccacccttttcttcttccgccacccacctcccccgctacgcgccgctcccctcccctttgtgctcctctcggagccgatgaatagggcgaggaaatgggcctaagaggacgctactcctccgatccttcagagacacgtgacctttcttctcttgatagttcaaactgaaggcgggaaacgacgatctgatccccatcaagctagagttcggcagggcctgctcgagcggccgcccggggatcgatccccgatc

SEQ ID NO: 24490 - DNA, 877 bp, Heterodera glycines
gtcctggtgtaacccaacattttgcgctaaatgtccaaggtgcaatttgtcctagacacgccgtcaatagacagacattttgtcaacaaaaaaaattttttttttgatcaatgatcaaaaatttcaaaaatatttgttccaatgaaaaatccaagaatttattatatttcgaaaaaaaaattgcaaagatttttatgtacattgatggtaatgcctgttgaatttgtaaatttgataacaaaaattctttaaaatttcatttccgctgtcctaaaaattaaaaaaaaaattcgcttttcccaacaaaattccatcaattttgcatatgtgtacacatagttagttaatcatcatcatcatttccatttcgcttatcagcagcagcagcagtggtttgttgttgactttgttgggtacgttcgttgtgtttattgctcattcattttccgtccattttcccatttcccccccattagtaatgggtgaaaatgtaaaaacccttcccccccccctttttacggctgatttcaaattgcgataattgaattaaattaatttaaattggataaattgaaaaacaaaatttttcactcatcgctcacaaattttcgccacattgagtagacgactctcacttctctttgttcatttcttcaatttttttgtaacctttttcctttgatataattttgtgaatttcacctttttataaatatacagtatgctacaaaagtataagctaaagagcaggcatactgtaagtgttgaaattctaaaaactgcttaaatataaaaaattcgtacttttctgatttttccaagattagtgtctctatttttaggcccattttcccatattttttattggtgttttttt

SEQ ID NO: 24491 - DNA, 2384 bp, Heterodera glycines
aactcgttttgcatagtccccaaatttaccaaaataaaattttaattttcccattacggtacttatttatttttgaactggttttttaacaattcaataaattttttttaacttttgggaaagtattaaaacccaatacgaattcactgatcggaaagtacagaaaattggcagagagtgcatgtgtggaaactgattgttaaatcgttaccaaaaaggataaaattgacaagtgaattgtggtcagagtgatcacgatcaagagaaaaacagtaaaaattgtgcggaaaagtgagtgtgcccgttggattgtgagtaatcacggcattatttggcaaacaaattggtgttagacagagagtgtaccgtcccgactgatcagagagtgatcagggtttatcatacaaaagaggccgagagggcgatacaatacataactttggcttaacatattactaaccaaaatcaaaatacatcacactcctgactacctcgaaaggcgtttcaagcataagccaataagcgaccttgagcgggaaagacgtaagcttgagagagaccgaaaaagaaaaagtggaaaaaacttaggagaaaaccgaaatatggccgatgatgatttagaagataaatatgtggcattaaaggcaaaggtccaagacttagaggatcgcttggccaatcgggtcccgaattatcttccccctggagttaaaatcccgaaatatgatgcgagcggtgattttttcaagtttttaaaggaatttaatgtgcttgcgacagcgagcaactggcatccgccggattgtgtccgctttttacctctgtttttggaaggggaagctaaggaaatttaccagaatatttcggcagataagaaaacaaattggaggacccttaccagtgaaatagcggaactgaccaagaaacttgatggaccaatgtgggcgagaaaaatgctgaataagacgaaaatgggaataaatggatcagtaactgagtttgcgaataaaattcgtgagttagttgagcaggcaagcccggacccgaactatacagttgaggcaagagaaagtgagagcgtacactattttttgaatggattaccaaccaaactaaaacggaaattattttttatggaaaagcccgatagtttaattgaggcaattgcgcaagcaaaaaaagttatccaagtgaatgaggaaattgagaaagatgaaaaaggggatgaaatgaaacaataaatagctgagctaacggaacaagtcaatgcaatttcgttccagaataaagtgaataatgagagaaatgatcgagaaaatggtcgtgaatttgtgaattcagcatggagaagggacgacagaaactcaggaaaaggaaatttcagaggaaatagaggaaataattggagaggcaaccaaaattcttttagaggcagacaatttggaggatacgtgcaaaggaatccaaattttattccattgggacaaaatcggacttggaatgggaattttggaaataatacggggagatttgagaatttccgacctcaaaggggaaattttgggaatttccgagggaattcaagaggaagaggaagtgaaaggcaaaaatacaaaataaatgcgatttcggatgaggcggctcagccttcggtatccaactctcgaaggtccctgaccccgacaatgacatttttgacaatttcaatgtttctgtgctcatttttcgggactatttctggtcaataccaattatgttctgatcgagttcccaccacacccatttggttaccaaacgtaacagaatgttcagtaccggagtaccaaaaagctgacgagagaaaagttacactctttttaccggtccaaatcccaaagcaattcccagtttataactgctatcagaaaatgatgaaaatttgtacgggaaattttctttttttctggaaagacataaaaagtcaggattcgtacgtgaagggagtaagtcaccgagcttgtcagggatttaaagataacatgggacatacaatgaagagattgacagagaatttatggacaactgagaggccttcaaaagttgaatatgcatggattggtgaaagatgtgagacaacagtgaatgatttcattgaaaaaggacaaggcggtattctggatttttatttggtaacatcgtttggacataactttaatccgtacaacggatgggaagaaggacaaaaatggacatttatttgggaaattccggaaccaagtgaggcttattgggcaactcatttcccggtcggtgattttgtggcagaagtaacggagaacgcaattgtgttagaaagcgaacaaagcgtgttttattttgaaaaagaaaagggcgatgaaagagag

SEQ ID NO: 24492 - DNA, 2034 bp, Heterodera glycines
cctccgactgtctggccccgttaaggttggactatagtaaagtttttataaaaattgttcttggcaatgccaaattctttccgttttcgtacgaattctgctttttagcatgcaagcattgccagctgagcccgagtctttgatggtgatggaaacgtcgagcgaggagacgggcacgacgagcattgtccacctgaacattgggctgcagaatggctgtctgctgaggacaacattggaccagggcaagcaaagggcgggggtggggatgggaggttgaccaattaatggttgaactttttagtgaccggcgatttgacggacaatcggacgaggtatttgggcactaagccggtgaagctgttccgtgtcagcattcagaagagagaggcggtgagttttcgatgggggaatcctaaagttacgtgaaaaagggttctgacttttcggaaaatggggaagggactagcgataattaagccactgatccgaaaagctttgaaaattcatcttaattttgtaaattattttctaatgaattttacgaaactcacaatcaatcgaatattttatcaacaaatcgtcattgcaaaaatgaactttaattttgctaaaatgttttttgcttaccattagctcttcgcctgctccagccgtgcctggctgttctacagttaccagagccgtttccacctgactccgctcagttacagttcgctcgagtacgcttcgagtttctcttccgagcaatgccccgagggtattgtggcaatttcagaaaacactctcaggtttttttctgtaactattttttggtattgcccattacatttttttagaattttggcgctggaaaaacttggcgttgtgttcaatcaggtggtgcacaaactcaaatacacgccacggaaggcgattgtgcacgccccgtcacaaaacatggtcatcatcgaaacggaccacgcggcattcactgagaaggccaaacggcgaaggcgcgaggaaatggccaatgttggcattttcaatgacaataatagcaatgttgttgtaactgattctaccctatccttaggacctaattgaaatggcaaaggattcggaggagaaagcgcttgcagaagaaatggcacattcgctgcgcaattatgagccggacgaatccatttttggcgctcctcgggcacaatacggtgaattctttgacagactgacattttggcacttcattttcactacttttttttaggaaaatgggcttctgcagttcgtttgttggtcccaaagacgggccaaacactttgccaatacgaattgcccgagggagaggcggcattttggtattttttacataatgccaaaataacttttattcaattatagcattgaactggtccaattccgttctcaatccgactccacctttgtgcttgtcggctgtgccgttgggttggagttgcgaccaaaacggtcccacgggggttgtgtttacacctttttactcaccgccaatgggactcgattcgaatttattcatcggacggcaacgagtgcggtaagtttttagatttaaatattacatttacattaattgaagaaaactgcttttggctataggaagtgtacgcaatccacgactttcgcggcatggcgttgatcggagttggcaatttggtgcgcatgtacgactttggcaagaagaaactactggccaaatgtgaaaatcgggtacattttgaataaataattacagaaaaagtaaagcaaatttatatgcccaaaactttttgcgctttggaatgtgaattcataaggctgaaattggcaatagacaaaaaatcaaaatgaaatcaaatccaacaaaaataggaataaaaatgtatgggcattctgttgccagtgttctgacaatgagtgagttgagttttttgtgtgttttggctgagatcgttcggcttggctttttgttattagccctcttccgattgttccccgggctggcgcctgaccatcgcgtcgttgccaattcgcagt

SEQ ID NO: 24493 - DNA, 885 bp, Heterodera glycines
gggggggggggggtggttttttttttttttttcctcctccccctccctccccccccccccccccttttttttttttttttttttgggtggggggggggggggggcggcccccccccccccccttttttgaaggagggggggggggggggggccttctaagaaaagaaaaacacccccccccccccccccccccccccccccccccttttttttttgtgggtgggggggggcgcccccccccacccaaaaacacccccccccctttttttttttttttttttttttcccccccccccccacaaaaaaaaaaaaaaaaacttttttttttttttttttttttttttttttttggggggggggggggggtttttttttttttttttttttttttttttttttttgggggggggggggaggaggtaggggggggagaaaaaaacaaaagggggcggggggggtggtggtgtttttttttttttttttttttttttttttttttttaaacaaaaaaaaaagggggggggcgggggggggggggggcgggggggcggggtgggggttttttatttataaaaaataaaaacaccccctcttttttttttttttttttttcttttttttttttttttttttggtggggggggggggggggcggcggcgcggcgcccacaaaaaataaaaaaagaagggagaagagggggggtggtttttttttttttttttttttttttttttttttttatgtttttttttttttttgtttaaatatacatctaaatctatgtggggggggggggggtggggggggtgttgttttttttgttttttttttttttttttttttttgtgtttttttttttttgttgtttgtttttttttgttttt

SEQ ID NO: 24494 - DNA, 1532 bp, Heterodera glycines
ttttgggcaccagggtttttctgggcctagattcttctagcattgtatttcaaattacgaaaaaatgattaaataaattaaaaaaaataaatcactaaattattctcaataatatttttaaattactttatgaatgcttccgaatatgtttgatcaatttgcattccaatgttcatttttatgctgctgatcggctcaaagtcatcgctgtttgacagtttctcaagcacaaattttaaatgatcagatgagcgactgatcaattggcaatgatatttgaaaaaggttttatcgtcctgatttagagcctcctccattttgtccatctccgttttttccagttcaattttttcaacttttccaccacaagcggcagcagttttttgttgaattttatttagttttttcttgtttttctcttttttatttaggtatttgtgcttggcaagttcctcatcaatttttattttcaaattttcaatttcatttttgtacaaatttttgatttcggttggcatttcgtcaagaaattctttgacaaccgaaaaaaatgccttggcatcattatcaatgacaatccaatgacgcatataaattttcacaaatttttcttttcgtctcaacaaaaaatagatttgttcaagcagttctgcattttgttgagggtgcgcaatttttggtcttttattgcttgtacttggctaaaaaatattttaaaattattaattaaaattaatttctgacgaaaaaaaaatttgcgcatttattaaaaatgacttagtgaaaggatttaatttttttttaatttaaaattataaattccataatttagagcaatgttttttagatcaaagcagcagaaaaaatatttaaaaaatctcagcccctagtaatcatgatatttgagagaatttcgtaaaaaaaaaccctaagaggttgccaaattggattggtgttaaaattagggttgaccccccgactagggtgggggggggagaacttcggcttcgaaaacttcgcatttttgtacatcgagcttcggcttccgataaattaaccgaagttttaggaacacccttattacagagttttcatattgaaaaaccggcgtaaagagcgcttttaatgtgaatgacttttgttttcattttttttttttttgaaattttattctgaaacagcttgccaaaaacggggtagaggagcaggtacaaaaatgtcgggaaccggacggacgctcgagctcgaggaccaacccttgttcaattcatacatacattaacaattaaaaaaatgaatttcgtccatttttcaataaaaaaatctattaaaaaaaatccgtttttggcatcgagctatggtaatctggggagataaatgttttctgtggtggtaagcttgttctacaagggatggcttaatcctttttttcctagaataattttcatcccctaaagtttcgaaaatcatcacgatttttaggcgtttcctaaatgccattaaatgatcaatcgaatcaacatggtgatgat

SEQ ID NO: 24495 - DNA, 2041 bp, Heterodera glycines
attaattttcagcgaacttattactaagtgatcaatgattaactgaattttcaaactttttcgttttttaactcacttagcaacgatttttggtccatccatttgaccgggttcacatttttgtacttggcaaacactttggcatcttcatcagacaattcaactttccatataaattcatagttcggaaaatgggcaaatgcttccaaaaatgccattttcatttcccttttcattgagttaatatcggcaaatgtgccgaaggaaacgatcactgcgccatccctggaattgtccacgatacttttttttcttatgatttttaaaattgaatatatgaaaacattgaaattatcgaaatagaccttctctattttctaaattataattaaccaaattgattaaattaattaattaaatgtcttccccctttgttggcacattcctcatttgtcacgtaactgctcagcgttgggatgccaaagggacggacaaccgtttgatacaacggcaccgctaaagtgccaagttttgttttggcgccaattcgatggaaaagtgccgagggacactggttgtaaagttcgcaagtacaacatcaaattattctgcttgaagacggcggagcaactcatcgtcatttacgagttcgaaaagtggtggaaaggaacaattaaattactaatttaattaaataattagtattgccactaattacctcggcaaatttcgcttgtaattttagcaaattgttcgtttaatttctataatttttatttaattacaatttagcttttccaaggcttaacacaaaaataaaagttaaaaaattactgtatgattcattaatcatttacttctcacgcgggatcattcataatttagggttcagcgttctttagcctatagacttgatctaccggcaaaatcttccacaatttatttcccggcccaagtaaccattatttaaaaaaaaaacttaaattttttacgaaattgctactgtataaacaggctccgaattgcggagattcaagaataattactaaattatttatcaataaaaatgagaaaatgcaatatttgattcggtaaaaataccttacttatatttcacacatgttaatttttttcaataaattaccgaaataataatttgagactccattttaagcataaatatctgtgccgaactctgatgatgtcgtcaattttttgatgaattaccggttttgtgccgattactaaatcaatcattttattgtttctgtcaattcatcggatttagacaaatatgttaataatttgaaattatggaaaaatttattgcaaaattttgacaaacggagtttaattgtgcattgattgtttaaattaattaacataattaatattaaatttaaatatttaaaaagagaattttttttattcgtttaattttaaaaatggtataaaaatccgatgaaattaatttaaaaaattattattttcacttttccttctttgcccattttgcacttttctttttttttgctttgtatttgccggtgttcaatattcaaaaaatcatttttgtattcgttaattttaattaaaaaatttttgactgtctgaaaataaaaatgcctatagaaattttcgttccttcgttgttcaatttaaatttcaaaatatattgcttattcatcatttttaatttataattaaaaatatgaaaatccgtctcgtatttaagcggtgaaaaaataaaactattttatttttcattgaaaaactgggccttcctaaccattggggaggttagtgaaaattttaatttttaaatgtttttatgcttttatttcgatcccatagagccctaaatactgtgatatgtgagcattcatccgaaatcattaaaaaagcaaaacaaccaagcactttttccgataagacaagctttcatgtgccattttaaggatgtccttggaaaaagcatttctttactgagttttttgttgcgacggctttttcgtcatttgaataaattttgaaataaaat

SEQ ID NO: 24496 - DNA, 1176 bp, Heterodera glycines
taatattcggcgaaacaatgcgcaattccttcgggattgcatatggtaacagatgtttgtaatcaatcgataattttcgacgccttttcaaaatttccttaatagggtatatcattcctttctccgtctataagcaatccctaaaagcattcattcgttcacattcatttcctacacactaaaaattcccaaaatgaacaagcgcttgccgaatgagcttatttgggaaattgttgctgcaattccgataatgtacattttcggaggtgttgcaaaaaagccaggtaattttttaaaagtatttttaaaaaattcaaaattaaaggagctacgcgtccaccatctggcatcaccgttgtcaaccgggcgttcgagattttccgttccaagcgccatttttacttcttaaaaatagttggtaatatttaaaataacaataaatctaaatttttagatcgatcttgctcgaaattttgagaggctctgcgcactgaggaagttaccgtgcggagaattgttcatacagttcggcttcattcaatttggattcgaaaatgaactggaagacgccaagtgtttcgccgactttttggtgtacctatattatggacgatctggccctaccgttacgacgagagtcgtgacttactcggcggtaagaaaaaaatataataataatattaatattatttagccgattaaaattggagagctattcggtgccattctgacgcatgtgttgggaagcgcaaatccgctgaccatgaagaagcggactgcaggcggttatttgctgcgtcaacactttccgcggcttctccaactctcggcaacagaaatggcatcaggtggcattggtcaactggtccgctccgatgggatggaaatgtaccggctgatgaatccgcaccacaaaggagatgttggtcaattgattattattgaaacgtctcaacaccccggctcgtactattttaatttttcaatcgaataagtgttttttgtaattgaataaacgatttaaaacttataaaattttgtttatttattaattattttattaaatatgagcatcgcgtacatatcgggacacgtactggtattaagcaaattaagaaatcggtcaaatgaatgtcctagcgaaaggggtaaaggaacacaatacaatgggcgcca

SEQ ID NO: 24497 - DNA, 1755 bp, Heterodera glycines
agggggggggaaagattgagtcgagacgagagaggaagagacgacgagggaaaggggtggggacaaatacaaattcaaaaaaaagtgtaatcaaatcaaatttgaactttatagcctcattgcgcgcaaaggagcggcgagaaatcgagcgactagaggaggaggagcgagagcggcagcgacaggacgaggagagacgagagagggaaaggcgcgagagggagcgactggaggcgatggaacgcgagcggcagcgacaattagaaggtcttaactcgacaatggcggaaaaagctcttacataaatcactgtagaacagcgcgaacgcgaccgaatcgctgctctcgaggcgtccgccattgaaaggcgagcgctccgtgcgcgtgaagagcagcgggcgcgggagcgcgcggatttggacagacgcgcggaagagttgcgggagcaggaaaagcgtgaacgcgagcgcagggatcgcgaacgggcagaagaggagcgacggctggccgaactccgtgaggcggaacagcgcaatgcggggcaacgcgaaagggagcggcgcgaggcacaggagcgcgaggagcgtcgtcgaaatgagggctggcgcagtcgcgaccgcttggagcaattggcacgcgagcgggacgagcgagagcgctgggaggcggagaagcggcgattgctggtgcggcattccgcccaatggcacataatgcataatcaccattccttcagtctgactacgagcagggagcccgcaagcggcaagaactgacttccaaagagacgcttgagcgtctgacgcgcaagccatactattcgcgcgaaaatctgacccaactcggcacgggcggagagccgactgagtaccgcggcaaaggcattgagccgccggaattcaccacgaaggtcggcgaagcttcgtcttggcacttaccatttgtccattctgtgccaggtagaacgacaagtgatcgaacgcgtcgaccgcactttgtggacagagccggagacgacgcgcgtctccgccggattgcctccggcgagctccgcctatttcggcaacaccggcggcatttttccgtctctgttggacgcatcggaagaaagcacgcgcgagcgcatgtacaacccacgcgacgaggactttctgcgccgcgggggttcacaacggacgtcgaaataccgcgcacgaatggaaaaagcacggaaggattttctgcagggaacgggcggaggcgcggaacaatatcagccaagtgcaggtgaatgaatcgctggaaagcttttccctgccgaccgacacggcagtgaatgccgttcattcccccccccccctcacttttcccccgtttagaccccgtctcggaacgtttccgcaaatcgacggaagagttggcacggcgtcgcgtcgaataccgcgggccattgctgcaacgctttaacagtggcgaattcgctcacccgccaattgagccgcagcttacgcattacgcgaccggacttggccgcagtccctacgagcaggtgaccgacccccaggggaaaggggcctaacggagagaccatcagacaaaacacccctgggggggggggggaagggttatctctgctgctatctctattttacccttttgagttccttctctctctctccctctctctgtctcgttctcttcctttctctaactctttcccataccaatgattttatttctttccttcctttctttttcctttactttttgtccctt

SEQ ID NO: 24498 - DNA, 2022 bp, Heterodera glycines
  unsure (1)..(2022): unsure at all n locations
gcaatcgttttctttttcagtgaaatcggtganngttaaaacnncaaaaattgtagccaatttggtctgaaatttttattttttgcacataacgatcgtccagtttcaacgaaaatctgttcgttgcactgtcaaaatgcagaaaacatgcagagtacgctgattggaaaacttttatccatgctgtcatgcctaattctttggtttgatcgagaatcttcctttcttcgtcatccatcagtgcaatttccgcattcaacttttctgttatcagtccctctaagtgttctaaattacggccacgtagacgcaaaaaatatttatcaagctttttctgatattcctcttcagtgtcatcccaattccgcagggggaccttgcttgttgctgcacgtttttctctctcaagtagaccaccactggttgctccgtaaaggtcaagcaacgtgtcaacccccgctaaaagggcgtttaataattgttcttcgttttcgtcatcatcatcatcatcatcatcattaacatttcttttgtctctttgttgttgttgttgtttattgatgtactcggctctgcccaattgacgtgctgtattggccgcttcagtgaattttttctgtacgccttccactttaactgcgaacggtttgttgccttcttcaagcagtttgtaaagacttttccaaagctcaacggggtttgtcacgttagaggatggaattggtatttgaacattctctccaattttccattcaatttgaacaaattggtcctctgttgtgccgagtgagggccacgaatgggggtatatgatcacacctaagcccacatcccattccgaattaaattgaagttttcttggtagtcgaactcgaaaagagtttgtgcgatttccttcaacatttgtgttggaaggaacgatcacatagaatgagtttgatgaaggcattctcatttgaaatttaaaaaaaaaagagcccctttatatatttttccatgtcatcgagcttgcaggaatccagctgttgtgccgttgactgtagcctttccatttcaccaaaacgtattcaacaccttgctttttcctctttcggacgaccttttcaatgtcatatagggtatcatcatcatcatcatcatcatcatcatttttgcgcactagcacacgacagagatcgttggcatagaaacggcccttgatcagggaaccgtcgtcatcacgtattcggtacgtgaccggaaaacggtcagtgtgcacttcggcaacagtgaacacttcgttggtgaagcgtccggtgtagcccttttggaacacgtgtttgtacttctcaatgcgcacacggtcacccaccttaaaacgtggttgtggttgtttccgttttgctgctgctgcttccgctgtcccaccaatagcgttctgcttgagttttttcctgagcttttcggcattctcaaaattcacatcaactgggcgcatttttatgcttgagttgtacgagtggtttattccatgcacaatttgctgtatcacatcaacccatttttgggtaccccgttccgtgaaatagcgataaaggcgttctttgatggttcggttggcccgctctgccatccctgcgtgaattcgcggcgaggtgtacataaaaaagtttttcacgttcttatatttggagcgtttaaaaaagcgttcaaaagcagcaaccatgtcggagctctttttgcttttctccggctcaacaaagagctgtctgctcagtgtgtcgatgcagataagaaggtacttgtagccgtgattctctcgcgacaatttgtcaaagacagacaggtctgcttgccattcggtgtgcagtccagaagcgagtgttggtagttgtttgtagcgcctcttcgcttgtctatgaatggtgtatgtgcgctgtgtggccaaatactcaacaacatcctttctactcatttgattgttcacctttttcgcctcgcgtaaaagcggctcaacgctggtaaagctgaccgatgagttaa

SEQ ID NO: 24499 - DNA, 1591 bp, Heterodera glycines
aaaaaagttaggtactaggaaactgaggggtggtcatccattggacgcctaaagtacaatagagccaacccgaaactcgggccaataggaaaaataagcggacatgcagtgtaaaacataccattcgcccagcattgtgtcaattagatttattgtgcgttggaatccagccttagccgttttgagttgagcggcaatggcactgtttcggtgtgaattgatcaatttaatttcgtcagccacaaaaaaagcatcaaattcgctctctgaaattttattgcagattggtaaaaattgaaaattttaaagtacgaaacttataaactgtttaaatgcgaaatggtttcaaaaacaaataatgaaattttttaccataccgtcttgcaatgcaaaacgagtccagaaacaaaaactcaatctaacagcccgaggattaaatcaaattacctttaatttgtgattcagtgcgaatcttggctaaagatatgtgcgtgaaggaagcagtcaggtaaacgtaaataacaaaaagtgctaacatgctgactggaggcggcgtgtgcaactgagttaaatgataaagattagttaaatataattatgctaatgtcttgtacattttgagaaattttttcgctttgatggccgttggggatgacgataacaaacaggccgggattgacgttatacaaatatattaagctaacggcataaaacctgttatgatactcaaaagctttaaacaaaattttagctttaactaatatttttttaaattgaattattgtgtgtaaaatcgtttaaatattatttaatgcaatgactaaaaaccgagaaaaaaaggcaaaattttggtgtataaatgattcattgcctaaccggatgaacatttacatttcaaatagcagcctttacagcagcaaaatgtcagttagtcaaaattaaaaagggtactaaaagaacaaaggttgggaaggagtccaaggtgggataatgttaactatgccggttaaaaaattgcttcgtggaaggggaaaacaaaaaaaaacagtacgatattccttttttccgatttgccttaaaattccattatttcgggaatcccgcagggacggtaggggcagttgcgtctgagccaagtttagggcattgaatcagaatttttgcagatttttatttataatttttacatgtctaggtatatctttatgatttttggaaattcgagcccatagtttattaacagatttcagcatttaggtttttgcctattttttctgagctcccaaggccttaaacacattttgaaaaacctatttttgcctatttggcgttatgtccaaaatttattaataaaaatgcaaaataacaaaaaagatacattcctctcctaagaagcccaagtttttttgccgaatcccgaataaatttaaatacttttttctgttccacagttaaaattaaaattaattatggatttcttgcgcctttttccatcttcgtcatcttcaactttgtcggcaacaaatgaacagtcacaaattgcgccatcacaacagttgctcttcagcgcttacagaaatttgggtcttct

SEQ ID NO: 24500 - DNA, 1803 bp, Heterodera glycines
gaatccggcatctatttcggccaattctgaaccccggaacccgaattcgaacaaaattcgaaagtccaaattttcgaatttagctattttatttcaaaacggcttaaatgatctcttattgcaggattgatggatttcagtttgttttcatatatttatttattaagccgattttgaacccaaaaatgctaattgcgaaatttgaactttcaaattttttttgagttcgggtccgaggttttcaattcagaagggtcttcttatagaattttacttttatactataatatttaaatctgccaattattttgaagatttgtatctctaatttctgaaactcaaaattttgggccttaaaaaatgttgactactaaaaaccgcgaaatttcaacatcctcaatttttaagacaaaaattttgagaagcaaggatggataaacaaaatttaaaaaaaacaaatgcgtcataatcttttgaaaaaaacgcgccgtaaaaaatgcaacagttggtattcaaaaaaatggaacaaaataattcaaaatgctaaaaaacatttagcaacaatgaaaaacatgaaaatgcacataataattggccttctcaaaaaccatttaatgtaccatatttctttatccacactttcagtggttccataacaaattgataatttaatagaaattttcagtcgctatttttggtaatttatcttccttaatttgtcttcattattataaatttttgccaaaaaaaaaatccgccattccaaaaaatgcaaaaaatcaggttcttctccggcaacttaattgccatgtcggaaaaatctctcaatttttagctaaattacaaaacattttcaagaacatttgccaatttgaaaccaattgttgggaacttatttttttgatttattcaattaacatttttaacttttataataaataaaatttataaataattggtttgaaaatttttctttaaaaataaaataggattatttatattattgaattataaaatattataaaaaattaacttaaaaaatagattaatttgtaattcaaaaatgatcaaataaattaaatgcctatttttgacctttacggacgatttacaaagtaatgactgacttatttgccaaaaaaggacaattggataaatcgaattgactaaatttgaattgtacaaataacacacaaaaaacttatcaaaccaataatataaactccttcaaaaaatcattttcccaaaattgaagcaaattcttttttccatctgagcaatgtgcgaagtccaattcccaattcagttgcaattattttatcattaatttttgaatttccttttttaattttaaatattgcttcatcttttgcaatttgtcctcatttgtgttatgctcttaaataatatttttttgtatattttcgaattaattaaaaaatcccttacttttataatattttgttgccaacatttctcttttccattttcgaaatgtcattgcagaaatgcccaattccttctgaaattctttctgtttgccttggccatataaacacttaagttcgtcaaatcgttgaacaaattctttctttttgtcctcgtaataatctttttcattttgtttttatttaaatttaattcatttttccatttctgtattagatgtagtcatgtgcctaataattttccaattttccacacaatttttgtcctatctttgttttgtaattttcctttttccttcaacttttctttaattgtttcaaattttaattgtttctcttttttgttgatcatttg

SEQ ID NO: 24501 - DNA, 1149 bp, Heterodera glycines
agtccaatcaattaccaacccgggtttttatacaataactttgttcatgtttgaacaaaccctatctttttggtatcattcgaaagcacaaaatctaacgaagctaaaatatataaaatcgcagcgttcaggcaattaccaaaaaagaattggttaattaagtaattgctgattattttcgtttgtaactttcttggaatgttagaattctcttgttttctcgtataattacattattcagactttgtgcattcgaatgataccaaaaagatagggtttgttcgaacatgaacaaagttattgtataaaaacccgggattgtcaattgattggactcataaaagtcgattggactcataaagtgcattagagcccaaaagacaactcgtattatacaaaataaagcttaagcgctattttccctaaactgttgcaaaaaaaaagaggatggacctattagcattgatctgagagatgtgctttattgttgttgttgattcaaaattccataaaaatctgtcctaaattgtgttttgcgatttttgaaacaaaaaatttgaaattctaaaatcgaatttataatgtgtataaatattatataatgaatagagaccgacttttgaggcatatgccttttttctgcgcactagtctatctatctatatattaattttgccgtgtgtgtcacaaagtaaacaaaaaatttaaataaagttttgacgcgattgactttatttggatggaagaaatgaagtgaaaaaacagagataatagagataagttgtattgtaagaaagagtgaagaagagagagagatgaagacagttaggaacaaagagtggagagtaaaggagagaaatgattagagaaacaggaaaaaagagagagaaagtatgggagtgaatgagacagagacaaataagagagagagagataaaaataagagaagcgagagagaggggggggggagagatagaaaagaggagagagagagagagatagaacagaggagagagagaagagaaagaaagagaggagagagagaaaagaggagggagagaagaggagagagagagagaaagaaaaaaggagagagatagaaaagaggaaagagagagagaagaggaagagaaaggagagagaaaaaga

SEQ ID NO: 24502 - DNA, 1510 bp, Heterodera glycines
caaaagggcgcggagcaccctttgaggccgcgaagcggtctaattaaaccttaaatataaaaaatgcgcggagcgcccttttcctgaggccgcgaagcggccaaatgagtccacaatatttagaagcgcaaagcgcccgtctgaggccgcgaagcggccgaatgcacttgctcatcacttaacaaacgcgcatgcactagcaacgaagtcctttgcgcgaagcgctcatgtcagcgcccgcccatatataccaaaagtatactgtctacaccgagcaaatactgtgcaaagcatactgtctacaccgagcaaccactgcgccacacgctagtttatatatatatagaataatgttgcagttcgtagaaaaaattataagtccccgtggtttgctcggagggggctgaaattttgcaggcaggggtaacttttgattgcgcatctgggaaaaataaggaaattccggtccggaagccaactgagcgccagcggcgctgaaacggccaactttgaaaaacgagctcggttttcgggctgtaacttttctcagggaaccgggagcggaaaaagtctgctgagagggcacaccccagacatgttggctacaactttgtcattgatcactttttgatcagatcaaatgccgagcctgtagaaattggcgactgaacggcgctcaaaatgccggttttggcttttcgtgaataactcgctgggggttaagcggagcgggttggcgccgcttgagcatttgtgtagtttttaaagctgcatccgatggcgttttcagattttgaaaattttcaaaatttttcgagctaggccccctcgaaaatttttcgtttttgaattttattattttttgccgatttttcccaggaaaacggagaccactttcaagcaaccgtttttcgagctctatcgattggtggcatttttgaaaaaatttcaaaattttccggaaatagaaaaattttccggaactgagctccccatttccgttcaaggcttataactcgtcaggcgttgattttagcggaaatttgtcttagagcatttttgtagagaattttaagctctatcttatgtgctttatctcatgtttttaccatgagtttaaaaaaagttataaaattaattgtgattttgaaactcaaaaccataggggggaccccatggttttgcatttcatgaaaaaattttttactcttaaattagccaaaatgcatttttatggcataattttaggtgctgaatacgtatatacgctttattttgcgtttcagatttttttgaaggtgtttaaaattttttgaaaaatcgtcaaaatttgagccccggaaaatccagtgaaatttcgaaaattcataactcaatgaaggactgctcaatttaagtgaattaaagctataaaaatagagaaaaattgggagaattttatgggatttatttgggacttctatcttccaaaataaaaaagttattccagaatttctggaaaaattcgatt

SEQ ID NO: 24503 - DNA, 1466 bp, Heterodera glycines
ggggggggggtcgcaaattttggaaattttcttaacaattcattaaaaatccaaaaaaaaatttcccggtggcgcctagcggcaccgccgaaccccaaaaatctcatttttcttaaaaaattggcttaaaatcgaaaaaattggccatttttttgacaaaatttgttaacaaatcgcattaaaaatgtcaaagttttcccggcggcgcctatcggcaccgccggcgccccccccgttctccaaaatttttttttttggaaaaaccgcgccgaaaaaaaggtttttttggccgacccccccccccacctttttttatgtatgttattcattaaaattattttttgattaattagttttattatttaattaaaaattcattgaataattaattaattaattaaaatttgaaaataataaatcaaaacttcgaaaatgcgaatcgtttaattaacggattattagtaagcaccaatttctttgctgtggaacaaagtccggcgggcattggcacattcgttggacgcacgtggcaccgccgtcacaaaagtcgcgcgccccgcagggccggcccgggttcacaattgggttggcaacttacaaattagttattagatagatcaaattaaatctcgattttaatttcaaaagtgaaattttgtaaaaaaaattaatttaataaaagctaataaagaataattttttagaatttaaaaacagacaaaataattattttgttaaaattttatttaaaaaaaaaaattttgcataattattttaaattaaattttttttaatattatttaattaatttctttttaaattcactggaataaatattttttttatataaaaatctttttgattattacaaaaaaatattatttaagaaaaaaaaagattaaatatttattatttcgaaaaattttatatgtttttttgcttatttttaaaatattaatttatataaattatttttcaaatttgactcgaaagacatattaatttttaaattaaaatattttgattatgcatttaattgctttttctgtttaacttattaaatttaattttcatttcctaacaattaaaaaataatagttaaaaaggccaattattattaatttttttttaattttaaaatttttcacttttatttttttggatgcaaattgatgtgccagcttgcacaaattcgtccaaacatcggcaaatgccgtcccggcactgcgcatttccgttggcacacggtgcgccctcctcggcacacggtaggcccaactctcgggccatcgccgatggtactgtattcctattgttgttgttggcatcggcattctgttgcattagcacggcgtcatttggtgacgacgattttttgctgttttaaaatttggcgctgaacagaaaattgtgcataatacaattaagggcagaaattttcgcagttacagtatacctatgaaaat

SEQ ID NO: 24504 - DNA, 1398 bp, Heterodera glycines
aaaaaaatcgcttcgataaacagtcgtccatgtgccgtgccgattctccagccccacctgatgagcgcggacgaccaattcgatgttgagctttttgcaaacactggcgacgacatcggcaccgaacaggatgctcactccacgcgggttgggtgccgtgccttccacagcggttgatggatcagcccacagcaggtcgagctccagggacggaactggcgggtcgatgtacggacggcgcagcatgcggagttgctgaatgttggtcatctccggcgcgattccaccatgcatgccttaaaaaagggtggggggattagagttcgtccgatcgatcagacagccgatcaacggcaaaaaactcacacagaatacagtcgctgaccaatccgacgaacggaagccaggcgaatgtcatgttgaaccgctcccacagaggccgcacattgtggtgtccataacgctcgtttatttcgtcatagaacccatatctgaaaatgggggaaaattttttgttttttgctgaaattgagagttaaaatgtgacacatgggacggcaccacagcactcacgttctgttgatgctggcacattcgtggttgccgcgcagtacatagaatttggttgggtagcgcaccttaaaattgggggggggggaggtaaattggccctgcaaaatgatcaaattctccctcccgcggcacggcatttccacccaccttgtagagcagcagcaggacaatcgtctccacactttgattgccacggtcgaccatgtcacccaggaacatgtatttggtgaacgacgggtagcccatcttgttgaaaatcctcttcaagtcctcaaattggccatggatgtcgccgcacatgaccagcggtggtttcgtctcgacaagtgatccctgttcccgcagcacatggctggcttcctcgcacagttgacaaatggtcccaatgctcacctgtgccgttgaaaacacaattagaaatgtgacaaaaatgccaaaagaatttgcggcgcctcacatcatggacgaactgttcaggggacgggcaatgaagagttgtcgcgatcaacgtatccaattgattggtcgtcaacggcgttgaagtcgtcggcgcaattgatgaaacagccctcaatgacgacgcgccgtgttgctgctcgccaccgtccgccatttcttgttgatgatgttgcatgacgatgaataaacagaagcagcgccggagagcaataggagaaataagaaggacgaaattatggattaatgagtgtgaggagagaaaagccagcacttatatagctatatttttttgcctcttctaccaaaagtttgaaaatttcgaaagtaagagaaacattatgccaaagcttctctattttcaaaaaa

SEQ ID NO: 24505 - DNA, 749 bp, Heterodera glycines
aaaatttcaattaaatttaaaaaatttccaaaacgataaataagtgttccgatatattttttgacaaaaactggtgaaaattaatatgaaaaattgacatcaggaatagaatgaacaagcgcgtcctcatacctaatccatatgtatggcgcccccacaaagtgtccaagccacgaaatgtccaaaagagtaaaaacccacgaaatgtccaaaatttttcaaaatttataaaaacaaaatgagtctaatttaggatttttagggttttcggggtcgctaaatacgaatataccctttatattaccccttgcctaaccttaggcccatctgaataataaaaaactcaaattcgagacttggacatttcgtgggctggacattttgtgggtcagcgatatgtatattataaaaacaaagtttctgtatatttggcattctgtcttagaaatttttttaaaaaatcaataaaatcccgcataatcctgcacaaaaattcaaatttgcgtatcctgttgcaggattggaattcaaaaatgtttgcaggaccggatccggccggattaatcctgcaaaatataggcaattttcgtaacaaaatgcactcaaatttttaaatttttttcaaaaaattttctcttgggaaaagtcccggtcctggcttttctcgtggtcccagtcccgacttttctggtcccggtaagtcccggtcccggtttttgtcaaaattcccggtcccgctcaactctact

SEQ ID NO: 24506 - DNA, 1187 bp, Heterodera glycines
ctttttttttggaaattaagtcaagggcacccgaacaaaacatttgtgggattaaaaaatgtgattacagactttggggtgatcagaagaacatattggtaaaaatattaagaaaaattaaacaaatttatttatataaatttatattgttttacatatctcttaaaaaatttaaattctctaaattcattttattaaactttaaaaagcttttatttaagaacttcaaaaaaactttatttaaaattcctattatattaatagaattgttttttatttaaatttattatttatttcaaaatttttaattagtttggaaatataacaaaatgatattgaaggaagtatttaaaactttttttaaaatattttcgaaatattaagattagttgaaaatatttgtggattttacaaaataatctatttctttatggcaaatcaaaaaacttgaaccatgttacagaacattacactaaaaagattttgtatatattaaatggggcataaaaatgctttacttttttaaacaattttaattaattttagcaaatccaaaaacggtggcatttgtgtcccattgtgggatgaacagtgtgttggagggcatttacaatggtgtgccgatggtttgtgtgccattctttggtgaccaattttacaacgccgaatcattggcacgccaaaacattggcctggtggttgaccgtgaacaggacaagaaagctgtacaacagcagcttactgtagcactggccaaagcattgggacaaaacgaattgctggacgacaaattgaacaaagaattgtgaaataaaatttaaaaattttaattatttttgaattaatttttttttaagcaatcatccggaagacaaaattgatttggtcaaacttgaaaaggtcacgtatgaatttcgtcataaagacattgcaaaaacactgtctgacgtgatgaaagtgattgacgaagaattaaaggaagaaagagcagcttaaaaacggatttaggattggattgttggatttgaactaggattttcaaaaaaaaaaatttggaaccaatttaaataaagctagaacccttttatatgatattttattgtatgttttggcttatgcttttgaacatttcttctcctcaaaattttttgtttattgtcaaaatttctgcaaaaaacctttttttt

SEQ ID NO: 24507 - DNA, 1618 bp, Heterodera glycines
  unsure (1)..(1618): unsure at all n locations
attcttttttttgttttaaatttttattttataaaataggtaactatgatgcccaaattcgggtgccgaaaagcttccccctgcgactgctacccgaattaatataaataaaattttttggatagaagaagccttaaaccaagtaggaaattatataatacaattatccagagtaaaaatttaattgataaattctttcgttctaattctccctgatttatatgaattgaagacaatacaatacatatagtacctagtaaaataaattaataacagaaattataaactggaagaaaacaatttccatttttgccatttttaggagtttgtgccgaaaattgtgaccgaacaaaacgccaaggcgcggagaaccaatgggccggcattgcagggacaatcagcgaacggagcgcaaaattggaagtggaactaagccaaataaaagaacgattatcaaagctcgaaaaagcggaggaaattccaaatgagtgatgctaatgaatgataatgatggcacttatactcataatggaattgaatattcatttgatcacaaaaagacaatcgtttacataatttgattggagtctccaattattttttgttccgacttacagagttacgtaccggaaaaatttcctaggggctggataaattcttcgtggaagtcgaaaagagggacagaaaggggagcagctcgttcccccccgagaaattttttttttaaatttgctaacagaactttttcaagaaaaaaaatcttagaaagttttttcataagaaacttctaagaaaaaaaattttcgaaaatttttccaaaaaatcgctgagaatttctcgaaaacgacaatcttttgaatgatccgacttccgaaaagtttgagggctcagaatgccatccctgcgctataaacttaaaataaacattcatcccgttcaaacattttattgagtggactataaacgacctaatatattatcagagagaataaattgcaaattgcatcatctaaaggcataattaggtaatttacataatttattttgaaaacacatcaaataaaatgattgattccttcgttcgtttgtccattttcaataggtcgtcctaattctcgtcgcctgagcatgggcaaagagcagctcaaccagcagccgcacttccaagtgcgctttggcgtcgttgagccaatcgctgaaaatccgagccgactcgcctctgaaaatgaggagggtttttaaaatttttcgaaattgcaaatcctataattccagggggggacgggacgaaatctcgctggccgaaatctcgccggctgaaatctcgccggccgaaatctcgccgcagaaatttcaaaaaaaaatttcaaacttagaaatttttcaaggaaaaaattttagaaaatttttttataagaaaattccaaaaaaaaaaaaaactatttgctaagtttttttgaaaacttttcaaaaaaacagtaaattttcataaaatttcaaaaaaaaattgctgaaaaatttttcaacaatttttactttaaattttcttataaaaaaaattttctaagaacttaggagatgaaaaatttctaaatgactcanaaattagtcatttttt

SEQ ID NO: 24508 - DNA, 1298 bp, Heterodera glycines
taatgtgtgcaaatatgtacaaaatcacttgcgacgggcgccggcattcacacagacgctacaaaaaaaagaactgtgtgtgctgtgccgtccgtgccgagtgcaaaatatgccgacaaattacttcgttcagaacaaactaattaatgccaatttgtttccagacaaatgggcaatgctaattattgtcaagatgagcaaaatgacttttttgtggccttgtttggctggtccttaaaatttgctgaattaggtatcctaaattttggcttcgtgggaaaaatgtgaaatttttagccattttcgccaaatttggcattttgagacaaatggcactgaccaataaaggtcctggacttatatttgttgccaaccgctatttaataaagctggggaaccattgaaaggtgcctgacaagctttattattctcaaaaaattcaaaatttttcaatggatacaaaaaaaatcggccaaaaattaaaaaaaattaatcccatcttattaataagtaataaaatatttattatcgctcaacaatttgtttgtggaaactgaatatcaaccaaccggaaacattggcatgagaaaatgttttaaccatatttggtgccaaatattttgattaaatttattttggcatattaaagagagagagagtgccttaggcaaagaaatgaattcaaagaattagcccgaggcacatcaaaccaaattctttaaactctcacgcacagccaacgcttttcttcacaatgaaactcaaacaaaatgccaaacaaaaattttctaattttggattttgtgccggaaatgtttatgtgaacaattttacaaaaaaaaacaatgagaaatattccaaaaataataggcattttcatgaaattacaaatgtaaaatttagagattttcgaaattttaaaagccaatatttttgatcaattgattaatcagtcaatgaacaacactatgaatgccacaatggcagtggccaaattgtacgcaattttggcacggcaaaaatcgtcgtcggactatgatggggaggacggacaactgatggacgacattgactacgagaaagtggccacaaatcccatgatcgatgcggcagcgaagcaattcatggtaaggaggacaaaatgccagaattaaagtgccaaaacatggattttaaataattttttgatcaaaaataattaatttagattaattttatataaaatgtttttattttggattttaaaccattatatttttttggttgaatgttcttatattggaatttttgatcgcatc

SEQ ID NO: 24509 - DNA, 1241 bp, Heterodera glycines
  unsure (1)..(1241): unsure at all n locations
atgatcaaagaccaaatccttgatttaatccaatccgagatcagccattactgtaactatcttttcatcgcgagaagtgaatgccaatatttgctggagaaaattgtcttaggctctttggttagaaaaaaaattccgctattttctattctagctaggaaatttgggcaaatttcatcctgcagtgctttgtaaacgacattttaacatttgcacagccttgagcggtgggttcgaaaaacggaatttgttatcagcatcaccatcaccgtcaccatcatcatgatcattcaatcattgaatgctcccagacaaagattcaccatacttcaagcaaatgatggagatgttcaacctcctggctctttgcttgttttaaacgaaataacatatgaaattcttgtccaagaattcatggagaggatggaccggctggttaaaaatatttttattttgaatctatttaattgttaagggaatggaatgctaattaaatggttggctcggtatggtttgattgcaaatgcgctaacttgtcctgaatgccaaaaccaccgagcatcgattgttaaatatgaccaaaatccggagggttatactgtaagcaaattcacttatcatgcatcaagtgctcaaagttgcatatttttgggccgtccacccgacaagtacaatggacatggtgatgcgtgaaactggatggagtgtcgtcaaagcattcaattatagatttctataattatttatagatctttgccaagcatgggcttattcgggtggaaacggataaaaaattaggaggggttggttggtacggtggtcgagattgatgagaccaaggtgtatagggcaaaataccatcggggtcgaatgttaaatcgcccatacgaatgggtctttggcatgattcaaagagggtctaataaggtccggggcttccctgtgcccgacctgtttgatttgaattaactccaaaaattttacaaaaaattaattttttatgaatgatgtgatggctccacattcctttagtcaatgtatcgcctcaattcaattccttttggcataaattacacagattttgtctaaagaattaccaaattttagagatttttggctaattttttaagaaaaaataggtttttggggggccncgcggtgccggataggccgcctaggcagattttgaaatttaagctcgatttctaacagatgtttacaaaaaaaaataagatttttac

SEQ ID NO: 24510 - DNA, 1130 bp, Heterodera glycines
atagcgccaaccctaactcttcgcgaatttcgtttctgggcgagatcgatagggaaaatctgggaagcacgcttatcttattttgtgcatcatcactgtagacaattccaagcgcatatacggaatgatagcgccgaacgtaatgtttacggaatttcgtttctggggcgagtttgattgtgaaaattttggaaagtcgcctatatgtctttttctgctcaacactctagacaattccaaccccatttacggaatgatagcgccaaccctaatttttccggaacggaatttctttctgggcgagtttgattttgaaaattttggaaaaacgcctatctctttttctgctcaacactctagacaattccaaccccatttacggaatgatagcgccaaccctaatttttccggaatttctttctgggcgagtttgattgtgaaaattttggaaaaacgcctatctctttttctgctcaacactctagacaattccaaccccatttacggaataatagcgccaaccctaatttttccggaatttctttctgggcgagtttgattgtgaaaattttggaaaaacgcctatctctttttctgctcaacactctagacaattccaaccccatttacggaatgatagcgccaaccctaatttttccggaatttctttctgggcgagtttgattgtgaaaattttggaaaaacgcctatctctttttctgctcaacactctagacaattccaaccccatttacggaataatagcgccaaccctaatttttccggaatttctttctgggcgagtttgattgtgaaaattttggaaaaacgcctatctctttttctgctcaacactctagacaattccaaccccatttacggaatgatagcgccaaccctaatttttccggaatttctttctgggcgagtttgattgtgaaaattttggaaaaacgcctatctctttttctgctcaacactctacacaattccaaccccatttacggaatgatagcgccaaccctaatttttccggaatttctttctgggcgagtttgattgtgaaaattttggaaaaacgcctatctctttttctgctctacactctagaccattccaaccccatttac

SEQ ID NO: 24511 - DNA, 1638 bp, Heterodera glycines
  unsure (1)..(1638): unsure at all n locations
gagggagttttaaaagacgctgggattcgagcactaaaagcgtggctttttacccaatcnccgtttccaggggataaggctttgaatatccgcactgtaaagtccgtcatccaaaagccctctacgagtattctgggtgaccccaagaagatccgcattcggcttcgtcatttttggttttatcttttttctcaatgtgaattaaatttaaacacttatggcgcgcggtgctagaaaggccagttaaaagtcacagaagttttttggctattttttaatattttgctttcaaccaattaattacttcccaataaatcaatgtaatttcatcaaaaaatttttatcaaagataaaaaaggagagaaagaaacagaaaagacacacaagaaaaaagagaagagagaaaaagagacagaagagacacaaacatatactcccactgaaaaatttgatcagaaaattgattagaaaattaaatagtcgagcaatgatgactgacatataaaattatcaaaatatgtcatcatcatccagcaatccaaccttgggaaaacgttaccatggcttcgcttgaaataggagacaattcgcaataaaattatcacaaaaaaccaaaaaaattatgtgaaaaaataattgatcagttcgatgaaaatggatcaaatagaacatcaccatagtataagcgattaaaaggatgcacgtggtgaccaaatcaacgtcaagcataagctgatcagctggagaagaatcgacggcacgttttgatcgttgtttattgtaaggtatgccatggcctgtaaataaaatacattgtttaattaaattattttcattttttaattttaattcaaaaaaatttaaataaaaattatgacgaaacatttaaaaataaattttttaaacctttcatttgctttgccatttcgccaaacttcaaataaacaatattcttgagttgatcctttgttaatttcttgaaatttgaagaatttttgtttttttcgataatttcttttaattttgtaatattttttgcattttcacttaattgcacatttctattagcttccatcttcttcattagtccaatggcttgtttctccgccatttttactgcttgtacaattaattccatgtccttttttaaaattttggcagaattcgtccaacaatttttgtccaaattttattgtctcagtttcgtcattttttgtatttgtttcacttttttcaaattttgtgcaacataaaatgccagcagtgaatttgttcagccatttttcgaatagaatgccatcgaaaacattagaaggtagcttcttttgtctccaattgctaatttaatattattataaaatagaaaaaatataaataattttttggacaaattcatttgacccatcaataaggtgaatttataaaatttagtgtttattgaaatagttttaaaataaataataatattataaattaaatcaatgatatgtatgtaaatatacgtcataacatttttatttaacatattgaaattatatataatataatacacagaacctgcggaatacttctgctgttgaatgcgaccccgaggcgctttcaaattgncgcccagcaagaaagtcttgctaagctcca

SEQ ID NO: 24512 - DNA, 2188 bp, Heterodera glycines
  unsure (1)..(2188): unsure at all n locations
aaaggatcgaagcggaaagccagtttttgnatcgcagataaaggctgatcgacaataatttttgaaacgattgcccctcccattatttgcaatggttgcgccaaagcaggcgaaagggggggggcaaaggatggttgcgcatatccgccacctaagcccattcctggcaaggcgactctcggggaaagtgatcgaaacacaatcgacacattctgatttgtaagcacatggcaccgatcactccgtaaacttccgatcacccgtcctttgccaatctcggccaaccaatccaaaatctctactgcttgatgatcaccgctgttcatctgtcccagctgatcagcaccgaccatccttcctgccccgatcacttccgctgatcagggcgaaccgctgaatgattactttttgccacctttcctcaaaatgatctgtcctccgctttcacttcggccttttttgcgatttttgttgctgtttttgatgcaaatgcgtccctttacattttttgtcggctctttgaacaaacgaaatgtcccccacggccccaacagaacactaattgttctcgcagcgccctcaatttggtaatggcaaaatgaattcatttctctacacggaattgcaatttttaagggatttaaattatgcggaagatttcgttccaattgtccaattccaagtgagaaggaaatttaattgtctaattaatctgtgccctttcatttcaattagtttaattactccccataaaaacagattaaattggtccgtcttctgaatggtcagttggttggccattctccgccattttgttcacttttccctcgtcatttgctcaacagaattcgaaagtgcccttctgatcgccgaccgacacacaattcccttcataaacgggcaaaacaaattactcagtgacaagttgccagccgaacatttattaggtgcgcagattgaacagtagaaaaggcgaaatggctaattacgtaattaatttgcagaagcgaccatttacggcataaatttgcacgacttcgccccgttgggcaatgttcggcgggtgaaattcgtttatcggtacggagggggggggggggacgagcagcagatgagagagaagggaaagaggggagagagagaaagagaggagacagaaaagagagatagcagaagtgaattggtcggcatttgtgccagaaatgaaaattgggcgtcggtggcctcgcgacaaatcgacgacagcatcaatcgctttctgatcaaaagtcggctgagagtggacaaacgagagccgaacattgtgctgatgggaaagtcagtcagcgaacggacggagggacaattaaatggcgattaatgaattaattaccattgccatttagggacgttgtggacaacggcgttaatcgggcactgatttccaacgttgaaataatgaaaataaatgacaagcaaaaaacatcattctcaccatttcccctccttttgcacagataacttttgccaaaaatattcgcaaaattccgagacaatcgctgatgatcaaattgcaaaatgccttccgaaaagtgcgtttggtcatttgcctttttagtcataaattagtgcaagaaatcggtttgattagcccaagtcagtcaatttcaattaattagggagcgatcatcccccacaatgtcattaaccgatcactcactccccgcccccatatatttttgccccgtcccttaggttatcgtcgtccctccgcccgcccctttcgtcggtcggcgccatcagttgcgtctcgacgacgttctgtgcttcattgacgatgctgtgttggttatgtccgctctgagcccgtcaattgcgaacaaagttcatatggaagtgttcaagcggcagaaaaaagaagtacggtaccaaaggcattaccgtatttatcgtaattgggcgttactgtatctttcactttccgagacttttgactaacagtgccaataaacattgtatattttcatacatctgttcacaaaaggtgacagtcgtcgaattgcccgtcgatggcatgccagaaaatggcccatcggccagcggtgagcctccctaccatagtgactatggaaactgtgggctgtacagtgccattttggtcactgatcggtaaaggtccaattaaactagattgcagaaagtcgatttt

SEQ ID NO: 24513 - DNA, 1152 bp, Heterodera glycines
  unsure (1)..(1152): unsure at all n locations
tcttttggtcatgccattctccattttattgtttgatcaaaattgcgcgcaatccttctaattatttacatcctttcccaaatttatttttgatcagtcccaccctgaggggcccacaaatggcacctttcggtcaatcagtgccatgcctttttctgatcaaatgtgcacattctcttttgatcagtgccatttccccattcttctcttcatcaaattgccccaatttattttggtcaatcgtcttttggctatttcttttgatcagtgtcacccctccccatttatattgatcaattgacgcatatttcggctgatcagtcccatcgccatttttgatcaaattgtgcaaatttatttgatctgtcccattttccccatttccatttgatcatttgtaccatttttcattgctcaaattgcgcacatttcttttgatcagtgccacgtctccccatctttcattgatcaggtacattgatcagtgccatttccccttttgatcaattggcacatattatctgttgatcagtgccattcctcaatttaattggcacatactatcttttgatcaataccattccccaatttttctttgatcattaggcacacattctcttttgatcagtgccattctccttttagtcaattggcacacatttttttttttgatgctcgtcttacccatgccaattgtcaatcatgagtctatcgtgtatggcctctccattcattcattagtcaacaaacattcattcaattacgtattaattcattcatacatgtagaaaagcacgcatgttcactcatgcttgccacattcatttacttattcatgccatgtgctttcatagagtcatgtgttcataaattattcatccattatttatatatgtgttaatattataaaatggtccaaaataagtttatctcattcagatgagaaccaaaaatctgccttctaagctttccaatccgaagttttaacaagtgatgagagttcagcaagttttgaaagcccctgcgggaccatttatgaatcattcgagggcgtgagcattgatagctcaaaagtagctttcaacctcgaggggtacactaatngtgnggctgaaatcgttattgaagggactgaatccaaatgaaaaccct

SEQ ID NO: 24514 - DNA, 953 bp, Heterodera glycines
ttattaaaaaatcattgggactcataaagtgtcatataggactcataaatatatgattggactcataaaactctgattggactcataaagtgcattagagccaaatatttttcgccagcaaaaaaaggtcttaggattccgccctccgaaattttttttttggctacgggcttccatttaaatgcctatctttaagatttttgttgcctgaaaaccagaagctttatttatgcctttgataaaaaaaaatcagatgctcattaagctaccatttgttattttagaatcggatgcgcaacaattcctttccttttgcttcacttttgcttgagtcacaaagttcgtccagtcaaacattgccaagggtgccggagaacggtaattgtgataatattctaacagttcttttcttttttcgcagacaccgtttcggggaaaaccggcgaaagtgacaatctctccaaaagaggggccaattttttgcacacgaaagtgcattcggcccaggaattgacaatgcggcggaactcatccctttccatggacactttcggggatttaagcaccaaaatcgcttcaactcaaagtggtaaaactaggcatttattaaacaatgcaaaacaataatagaaattgttgactcatcccattcttaatttttttttcctttttcaattattctattttaaaatgcaaatttgacctttttttagccgagaaagttcattttgcttgtggcgaacaggaccaacggttggaaaatgaaggagaagccataagtcggggggaggaggaggaagacgaagaggaagtggagggcggacagtccagcgacagttcgtacgtcaaggtcattgcctttgcggacggagtcagcagcgatgaattgggcacggatctcagcgaatttgtcaaaggagtcaaattgggcaccggacgatttgcgctccttt

SEQ ID NO: 24515 - DNA, 1077 bp, Heterodera glycines
tcttgtgcactttatgagtccaatcaattgaaaatactcggtttttatacaataactttgttcatgttcgaacaaaccctatctttttggtatcatttgaaagtacaaagtctaacgaagctaaaatatataaaatcgcagcgtttaggcaattaccaaaaaagattcgattaattaagtaaatacttattattttcgtttgtaactttcttgaaatattagaattttcttgttttctcatattattacattatttagactttgtactttcgaatgataccaaaaagatagggtttgttcgagcatgaacaatgttattgtataaaaaccattgattggactcataaagtgcactagagccgaaaaaaatgccaaagcaaaaaaacgtcccaaaatattccataacaatttagttcacgcaagacgaacacggcactggcctagcttatttgacgatgattgacaacgatgcgccctgttgcatttgcaatggtaagcaagtttggattcacaactgccggcttgcaattagcgcgaaaaattggcgcatttgtgcgtaagaactcaaaaggaggtggccctttcaaaaaaatttttacatgttgttcacaaattttctgattattttggataaggcgttcgaggggcgatatgttagaaatgtgccgaaaaatacaatcaaattccggtaaacaaaatcgcattttctttttttttgaaattgaccccttggggtttgaaaattattttttttttaaattaaatttattctttgctaaaaaattgttcactttgttttcttcataattcgtgtttagacggcgaggacagcaatgccaatcagatcattttttgcgatatttgcaacattgctgtgcatcaggttttctggcacttttcccacgctcaactttctgtacgattttttttttgttgccaggaatgttatggcgtgccgtacattccggagggccaatggctttgccgtaggtgtcaaatgtcgccgtcaatccccgtcaattgtgccctctgtccgtgcagttcgggcgcattcaaacaaacatcggatggtcgctg

SEQ ID NO: 24516 - DNA, 1408 bp, Heterodera glycines
gtttttgcgggcggtgtgttgggtaatcggcggaaaacaaaataaataaaacaaaaatgtatctaatatgttgctaggccaagcggaggaagaaaagctgactaaatgagtgccataaatgcgaatcgactcagtcccttgtctaatcaccaagaaatagctttaaaaaagctactaacttttgaatggtttggatttggacttctggtaaaaaatttatggcttcttaaacctccttgacacggaaacatgcgcatggaaatgagaccaatcgccataaatgcgttttttcccgtcgctaaattaattttcccaaattgtcacatttttcctttaaaaatgtttcgttttttttttttgttggaattttaacatttctcaacttttctctgttcattcagccattcctttccattattactcatttttcgattcacacaatttttgtcgttgtgcacattttttgcattttttttcttcatggtgccatttgtttttgttttccactccatcagcgcggaaaggaaaggaacggagggattcgtcggtcgatttacacgacgcattcattcacacgtaattacccctccctccctcccccccccccataattcccccaaaattatgtatacttgaaataataaaacaaaattcattttttaaatgtgtttcccttccgtttgtctcctcacagattggtgctggacaacgcaaaacaattgcagcagcggcatcaaccgaagcagcggcagcagaacacgcagaaaacgccgacagcagtggcgccgcctgcgccgtcgacgacatattcgcccgcttcttcgagcaacgaagagcaacagttccaccacttttaccaccatcagcaacaacgcgagaagaagcggcaccgacagcaacagcagaggccacagagggaacagaacgagcagaagctgaagcagtacaacagcaacgctccccaacggacgacgacggcgacagcaccgacggaaaggcagacggaagcgccagcagtgggggaggcggtgcagcaacagttggagaggcggagacgccaattggtgcggaacggcggacggcgaagcggcaaaagcggaggcacaccacgggcgatgcccaaatttttgcacgcgctgtgctgctgtctccggccgaaagcatacaaaagtgagcagccgagtgacctaactgattagcgtggccaatttgtatttacctttctagattataaattgggtcccctttttgttgtgtttttcagaaaattttatgatctccccccactgcacccaatttaacaactccaaatctgtaaaaattaaaaaaaaaatggcgttgccgataaactaattgtaagcagggaggactttgttatcacttctccaaaatggttgtttttttaggg

SEQ ID NO: 24517 - DNA, 989 bp, Heterodera glycines
  unsure (1)..(989): unsure at all n locations
agtccntttgattcaaaaaaaagtataaaaaaccaaagtaattaattaattaatatgcatcatatgggagaaaacggcggagcaaatgaaaagccaaccgatggagcgaaagtgcagcactttctgttgccacttatcacttttgtcaccccgaaaaacgacgcgtttaaatgattttcagatgccgaacaggaaaagcattttgtgattaaaaaagaagggagtttttaggtatataaaatatttttaatttggtggttacaaaatttgaaatggccccagaaatgttccgtttttgccattacaaatttaaccatggcataaatgtaagtcagctgacaatgtctctttttccgtttcttattcgtccaaatgaccaccactctttcatccgttccatcggtcggattgacctccgccgtccgtccgtcatttaaccactgacttggcgctgtccgtccgacgccatctctgcagcggacgatggcggtggtcgtaggggaggaggggcgacaaggggacgagttgccactgccggcggtgcccactgcggtcggtgctcgcccccgtcgtcgcccattgccccgttatcgcttcccctcgccgccgcttgtccccctcccctcgatatcaacgggacattctccgttttgccctccaacatcgacattttcccccttttcacttttatttggtcacataataattagttttgtgtgtgtggatgagttcgttttagggaataatcagcaaaaaggcggaggacacaacgacagattggtggaaggcatacacacatttcaattctcttcgacgtgaggccatttccccaccctctcttcccacaccaaacacttatcgattgaataggcaattgaaaatggaaagacaattgggaatttgctgcaagccttcttcggtatcaacagaacacttgtcaacaaaagccagttgttacagaaactaaaaatgatttttctaatctttat

SEQ ID NO: 24518 - DNA, 2082 bp, Heterodera glycines
gatcagggctgggcgaagctcggctttgcactcgaagccgaagccgaaggcgaagcccaatttttattcgaagccgaagtccgaagctcgaagcccaaaacccccgaagttttcgaagccgaagccgaagtttttttcaaaattttttttaattccaaaaaattttttcatcacaaaatttcggttaaatatcaaatagaccaaccaacaacccctttcgataaataaatataatgatttttttaacaatgtattttctaaatttttataattcttagaatactcacagtttttgagtcaatttaaaaaataaagggaattttggaactccggcggtgccgataggcgccgacgggaaaaatttgaaattttagtgacagatttagttcaaaaatgaaaagattttgcgattttaattgttaaatttatattaaatttccgtcgaaaaaagaataattttgaaaaattagaagaaaagaaagtacttggatgggaactgatccaaagtaaacataatgaaaagagcaaagagcactaccactcgaccatgcgtgtgaacaaaaaaaaaacaaaaaattaataaatatatattaatttaagtttatcaaaagcccatcactaagggtgcattttcacattgaaaactcaatctttaggggtgtatttttcccgaaacttcgggtaagatagccgaagccgaagcacgaagttcgaagctcaaaaaccccgaagttttcgaagccgaagtttcgcccagccctggtttagatagggagaaaagaggagatatagataaagggaaaagaggagatagagagagagagagaaggggagagagagaaagagaaaagagtgggagatagagaggaggggggggggggagaaaatgagcgagagagagtaataaatggttttcaagtcttggctagcgcgaggtgcgcgagcgaagcgagcgcgcctgcgtagttttaattctagggggttgggaaaaattttccgtagaagatgattatgacgaacagaaagagcacaaaattctctacaaaatggccttggaatgattgctctatagcaagtattcgctgaggggtgccttgttaaataccgactatccaaaaaatggctcaatttaagccatttttcctcatttttgagacatccattttcaacaagacgcgccttcgcggagacgcgacgtagagtaatcattcaaaggccattttgtagagaattttgtgctctttctgttcgtcataatcatcttatacggaaaatttttcccaaccccctagaatttttttttcgaatttacccagatttttacattttttgcccacaaaaaatttgtgtttaatgaattttttcttacataaagtgaatagaaaatgcttaagggaggtctataagttattttagtgttaagtgcttccagtttaattcagtgggtcacatgtttgaggtgatttaagccttatggcccttaatttctccggaaaacttggaaaattcaacacaactccgcctaaaagacagatttctgtctgcaaaagaaatagaaatgtgaaaaaagatttgttctttcttatttagcttattttatcagtttctttttggtagttattgagattttgttcgtttttcacaggtggctctattttaaatcaacacccttttttcggaaaactggtcataaaatttttttctcgtcattcttttgctctctctcttctggaatcttaatattttcagaattgctacgtatggtaaaaatttcagttcaatcggttcactagaagctgagaaacacccgaaaatggggtggctctattttaaatcaacacactgtatgtacccaaaaagttaaaactttttaagtgcagctgttaagctatttttcgactttcaatgcttatttaggcttttattttatatcagaaaaacataattggtatttgcccttaatttctttgcctaaaaaaccttttataaaattcttcattttattattttttgttaacttttttgcatttaaacggtctaaatatcattaataagcatatatttttcccaatatttggtatc

SEQ ID NO: 24519 - DNA, 994 bp, Heterodera glycines
caaaatcggttagaaatgcagcgaaaagcaaaaacgaacaaaccaaaaaaaacaaatgatttgtgtgacggccaaatgattgaacaaatccctttcttttaatgacgcctaccatagcaatgattaataacccccacaaagccgacaaaagcaaataaaatggaaatggccgtaacaattattgttgtcacagccaacgccgggaggtgctgatttggttgcgattgatcagagttaccaaatgaaaacattgaaaacaccgccacatgacctctgtgtaagatgatgccaaacaaagtgctcacggtggtgcaataagcgaacaccacaaaggaaagaaggcattctctcaaatcacgcggccgtgcccttttcgttcgtcgtgacggcatcccattatgctgatcagataaagctgacgtttgatcagaggagacattttgtccactagcgaacaaagtcggtggtaatcgctcatctaaaagggttaaatgcttcattatataattaataaccatttttaattaacaataccggtgatgaattctcggaatattttcaacgcggcaatgcaatgtttgacaaatgttccaattgctgtttgattttcagggctcacaatttttaatttcgtcaattttcgaaatccttcgtatgtttgggggttaactttcacatttctcgccgctgttacaatggcattccccgccgaactttccagcgcttcccaaatgttttggccctttttcaattcttggcaaaaattgcgctgatttgcttcaaattccccaattatttctgctaattcatcccttttcatgacatctttttcagctttgattgtaatacaacacaatgtgtcaaatgctttttctaaaaattttccatttttcatttgtgtttgagtcacagcaaaaaatgccggtgccatttcttgcaaccggtggaccgttgcaaaaaagtctgaaaatggtaatgtttgatttgaaaattt

SEQ ID NO: 24520 - DNA, 2192 bp, Heterodera glycines
  unsure (1)..(2192): unsure at all n locations
cccgaccccctcccctttttgattggctcatccgggcgagtaccgatcaggggctcggcggttccgtccactccggcgcggcgcttgttgcggcggtgtcgggcttcgaggggcctgctcgggttcgatctcgtcctggtgaccatcgttgatcgggtcaggccttggctcaaggtcctgccctacaattccaacgttcggtgcggtgattggcagatggaatgcctcatttaaaattgccaatggttcgtggccattttcggtgttttcccggtttctcaattgattcgcatgaaagcgatttgtcgaaccgtcggggaatttgaccgtgtagatgactccggagcaatcacaaattgtcccagctctccaattctgcgagagtcggtgtctagcccaaactggcttatttgacacaaatttctgtggtcgggcgccaaaccggcgattgaaatggtgctccatttttgtgtctctctccgttggctgtggaagaggcggcattaggagatcaatcgttgtgcgcggttttcggccaaggagcatttcggcaggggttttttcgtccggcagcgaatcgttcggagtcgtgcggtaagttaccaggaatgtgttgatgatttctttattcggcactccctccccttttatttttcgaaatgctctgttaaaagtgtccacgaaccgttccgcttgtccattggacattgggttgtacggtgcggaaaagagatgtgcaattccatttgcttctgtgaattttgcgaattcactggcggcgaactgcgttccgttgtcggttaccaatgtttccggtataccgtgacgcgtgaagagataacgcagtcgttcgattgttgcggccgctgatttagtggccatttcgaatacctccgggtacttcgaatatgagtccacaacaatcagaaattcttttccgaagaaagggcccgcataatcggcatgaattcgttgccatggccgcgttgattttggccatgagtgcaaatccgttttcgtcggtgccttagcggccaattgacacggtgcacaattcttgacgaattcctcaattcgttgatccaattttggccaaaagacatactgccgggcgagttgtttcatccttttaattccaggatggcccttgtgtagcagtgtcaaaattttggtccggaatttttcagggatcacaattcgttcgccatacatcagacagtctttcagaattgtcagatcggcttttcgtctgccgaaaagctcaatttcttctgattgtggcgtcaatttgcgttcatcaggccaaccgtctctgacgaatttcataacaatttgcattgttttgtcctttttggactctgagaccaaattttcaaatttgattggcagaatttgctttgccatatccaaaacagttccaagatcctcgtcgatgttacacgcggcgatcactcgttcatcatcacattcaaattctttggcaatcaggcgagacagtgcgtcggcttgaccaaactcgttggtattgacatactcaatgtcgaagtcgtaggccagcaaagtaagtgaccagcgaagcagccgatttgcgctgcactgccgaatgccttttttgcttccgaagatgttgatcagcggtttgtgatcagtttgcaatgtgaagtgtctgccgtagatcattttgtggaacttttgcactgcaaaaattaatgccaggccctccttttcaatttgagagtaatttttctctgctggagtgagcgaccttgaggcatgtgcaattgctttactttgaccgttcgggaatttgtgggagatgacggccccaattccgagttccgacgcatcggctgccataattatgtcaaatttaggatcataatgggtgagtagcagttccgatgtaagcacttccttcaatttttggaatgctttttgtcgttcttccgtccacttccattcgatgtcatcctttagcatgtcgtccaaaggcttccgagtgaagcgcatgttcttgacaaactgttggtaatggtttaccatgccgaggaatgatcggagtgacgaaatgtcttttggagacggcatttggacaattgcatgaatttttgctgngtccggtcggcgtccatttcgatcgattatttgacccaaatatttgatttggtctcggaagaaggttgatttttcca

SEQ ID NO: 24521 - DNA, 1329 bp, Heterodera glycines
  unsure (1)..(1329): unsure at all n locations
aagcgccccagattttgccggggccttaaaaagtcaaggaaaggcgtctctgcggtgatttaccagtagtacctattaaattaaattttttagaaatttttaaagttttttgaaattttttaagtcaaaaagtgtggtgtctgcaaaaaattttcccgggttttaaaaatggngnnngaattgtaagcatttgtagtgtccggataggtatccctgcaaaatttggtgagcccctgatcaattacaaattatttatggacgatcaaatttttagaaatttttatttatttttgcataattaattcataaatatttttttcagaaaatgctctgaaacgcaccaaattttatttacatgctagtttaggcactctgatgctttttctatcaaaaagggagatgaataaatttttaaaaatttttaattcctttttaaacaggccaaaaagtttaggcttaacttttaatgaaaattcaatcactcatttttcgagtagtgatcagaagcgcaccagattttgcaggggcctaaaaaggtcaaggaaaggcgtctctgcgttgatttagcagtagtacctatgaatttaaattttctatgaatttttaaagttttttgaaatttttttaagtgcaaaagtggtggtgtctgcaaaaaattttcaccgggtttaaaaaatctaggaaaattagtaagcatttgtagtgttccgatacgtatccctgcaaaatttggtgagcccctgatcaattacaaattatttatggacgatcaaatttttagaaatttttatttatttttgcataattaattcataaatatttttttcagaaaatgctctgaaacgcaccaaattttatttacatgctagtttaggcactctgatgctttttctatcaaaaagggagatgaataaatttttaaaaatttttaattcctttttaaacaggccaaaaagtttaggcttaacttttaatgaaaattcaatcactcatttttcgagtagtgatcagaagcgcaccagattttgcaggggcctaaaaaggtcaaggaaaggcgtctctgcgttgatttagcagtagtacctatgaatttaaattttctatgaatttttaaagttttttgaaatttttttaagtgcaaaagtggtggtgtctgcaaaaaattttcaccgggtttaaaaaatctaggaaaattagtaagcatttgtagtgttccgatacgtatccctgcaaaatttggtgagcccctgatcaattacaaattatttatggacgatcaaattttagaaatttttatttattttgcataataattcataaatatttttt

SEQ ID NO: 24522 - DNA, 1753 bp, Heterodera glycines
aaaaaatgaaggatttgtttaaaaaaatatgcgtgtctaatcaaacccataataaatgaatccgacagctttttctgtctaaatttttaagtggactcaaaatagcccatttttaacagttttcgtcaaaaaattacccaatatctgtatttttgggtaaattaaggcaattcagtctctctttttggaggcgccgccttggcaaagttttgcaaatttatttggatgaaaatggttgtgggaaatcaggactgattataaagcacagaaaacaatgaaaagatgctgtaattcaacagtcgtttcaaaatcactatttctaactggaaattttcggtatttatagagcataatttgtttccttttccccaattttcgctttatttatcagtgacactttccctttgccctttaagaaaatcacccgaatcggaaagataaaacaatggccactgttctgtcaaaggatttgctcaacaaatggtcgtgcagcgtatggtaatcaaatggaaaatgattttttattgcaacaatttccccgtttttttggtaacatcatttcaccaacttttcatttttcagcacttttgacaattggccaaccgccccaaagtgcacaatttgcggccgtttgcgttccggcggcagcgcaaatgaaagcgaagtgcggcaaattcaacaacagaagcagcagaaggcgcaacagctgaacatcggtcgcaccgggcgtcagcgatcggtgggaaaaaattaaaagcaaaacaatagtttcggggggggggaataaaattgggggtccgacggcgccaagtttttatatttaattctttcgacactttcctttatgccctcccccgtaaaaataccaagatcccaacaaaggaatgcacttttcttgggtggttttatgcgctaaccaagaatatggagtcaaaaaatatcaccgtcttaatttgaaaaagtgatccgcccgtccgttccggcacaaaatttgttgggttttaactttttgatagagaaaagtcgagaatgctgaaactaaattaatcgattcctctcgatgaaagaacgattgataaagaaatgatatacctatgttatttctttttaaattcatagacaaaagcatatattttgcagtgttgagccatattgttgatcaacgcctgaaattaccatagaaaagtgctttcctttgttgggcttttgattttattatggggaggacggtataacggaaaaatgccattttttcatggactaacacaattttttagtaatttttttcaaattactgagcttggtaatatgccacaatgtctaaaatggtgtgcaattttcagtttgcattgtctgcgaatggtcggaaacagcaacagcacaaggacgacgccgacgatgagcaacaccaccaccacaagcacagtgaccaggacgacgagtgatcggcgcgacgacgacgacgacgacggaggggggaggagggcatttttgcttctctgcggctgaccaatcatttaaaaagcacacaccgaccgacctcttcgcccaaaccgtacacagactttggcttgcttatcgtatcggttgatattgattgaaatgagtcccacccatgtttcgttttcgacattattctcacaccttttctttttcatgctttcatcatgtgatttcccctcgaaaccataaattctctttctgagcttcgcacaacaaattaatcggctaaatgcatttattattattatta

SEQ ID NO: 24523 - DNA, 1574 bp, Heterodera glycines
  unsure (1)..(1574): unsure at all n locations
gcaacttttagtgaaaaaactttttttttctcaattgttttaaagaaaggagctcaaaaaacgcattactgcattaaatttttcgattctgatgtcattatcagtcactagaaatcactattttggcgtttcgtcactaaaatagttaaaaatcactattttggcattttgtcactattttttcactatttcgacattttttggaaaattccttaacaaaaatgcaataaaaccaaaaaatacacccctaagaatcgacctaaaatttttcaaaatatactcctatgaaatgaaaaaaaaattttctcaaaaatttactttcttggcaaaaatttttaatttaaaaattttttttaggtaactcttttgggttttttggtcttacaaatcccagtcctactcatttgcaactgcaatcagtgaataaaaattatttttgctcaatttttggctgaaaattatgtgactatttgtcactatttcggactttttgtcactattcttcactattttggcatttctactcactattttagttaactattttgggatttttcgtcattaaaagttgcttcctaataattagagataatacggtacatttacctaccggtcacttgccattgcgatttgagtgccgacgacgcacaggaaaagcacctgaaatgcaaatgcaaaatgtgtagcatttagcatttgaaatcaaattaaaaataattaattaattgaatgataaattgttgccttggccctgtcactttgttcgattgttgcgccattccgtccgctaataacaaaatgaacaaaaatgaaagaaagaattgaggaaaaagcattgcgcaaaatgtttctgtttttacaatagaaaaatgccaaagtatgaaatgactaaaaatttgcacaacattaccacaccaagaaacagtaaaaataaataattttaataaaaattatttaaataataaaataattgttgcattttgtcgactgattttggcatttaatagtgaaagacttttcgccaaatgtgtgcctaaatctcatggctaaacacttttatggagacaaatgctttctttcttcattctttcccttttcaactccatttttgtttgttttatgaatgaatttacacatttgtgtacgtgaatggatgattcattcatttcttggctttttctgtgccgtttcttcacaaagtttgctgatcggataagatggtattatttttttcttctttttttgcatatttctcaacaaaatctcaaaaatttttccaaattggggcaaaaaaaagaaagaaaaacccctaaaaattcaaaataagaaaaagcacccaacgttaaattatctgcgaaaaatatttattcatcaaatacaaattaaatgaattgaagtaattanactcacatctttcacttaatcctatcactttatcacactatcagagtccttttttattgctttcttaaatttgaaaatttacattnaaagaatgaaaaatattgaaaaattttgacaatttgctgatcggataacatggtatttactatctttttcttttttcttttgca

SEQ ID NO: 24524 - DNA, 1369 bp, Heterodera glycines
tatttgattaaaaaagctatttttaatagtagaaaaatcatttttaattaaaaagtttttaaaatgttaataattaaattattaatttaaaaaaatgacgacaaagttccggactccgtaagttgggccccgaactctaactttttctttgtcaaccaaacccaacattgtttctatcaatcgaatgctcttcacatgctctattagcctacatggctggggcccaaccgaagtgaaccccaaaattcactaatttttttaaatcgcaaaatattttgtaaaacggaattttcattactgacggattgttcttcactgacagattggtcttgattgattgtctattaaataattttctggagactttctgctgagtgggctaggaatgaaagagacgctgcaaaagttatgaatttgaattgaattgagttttttagttaattggttttttaaataaaaaaattccaaaaatttttaatttgtttttcaaaaactttttattactttttatatattgttcaggaagcaacttgatatgcacggaggaaatgcaaatttagccgacattactcatgggattagtgccgattcaaatttcaatttcatggttggccataatcactggcgccaaatggtcatattacataacagaaagtggtttgcacaggtcgaataaaaactcaccagaactgaatttattttttgggcaatcatcaagaattggtatcccgatgaaaaaaatgctgaaatttggcggcattttttctaggcttataaaatgcgttaacctcgaatctgaaagattttgaaaaatcatttattttgtctataactttttaaaaatgaagtttcttgcaaaatgagagcacagattcatgacctacgcattttttatcccaaacccattgaaaataaaatctttacgagtaattgataaaactttatagacaaaataaatgatttttcaaaaacgagttcaaattcgtggtcagcgcattttttaaaaccgataaaaaatgcctgctacatttttaaacagatgaatttgataatgaacgaaaatttttgtattttaaaatatctaaaaatattttttagacatttttaatgtaaaaagtcgtatttagagttgtgtcattcctgtcgggttttctggatccaagattatgggaatgcatgcctatgacaatggcacagaagtctttatgacatcttcgttcagtgttgccaatcgatacaaactattcttgctgatataacaccaattgatcactagggatggcaaaaatatgcacatgcatatttttttcctggactgcgtgggggaagactgaaacgcacgaaaaacatgtttttagcttgatttgaa

SEQ ID NO: 24525 - DNA, 2540 bp, Heterodera glycines
  unsure (1)..(2540): unsure at all n locations
tgaaaacgcctacaaaatgtcaaatgatgcttttattgccttctgcaaaactgaaatacgggaaaaacgagaaacacctaaaattgagccgaaaagaaaggaaaggccggtaaaacagaaagttcaactgaaaagtgaaatcaataaaaaggaaaatgttttgaaaactaaggaacaaaatgctacagtatctgttttaccgaaaagcactgtaaagctggtcaaggacagccaacaaaaaatgtcaaatccaattaaaattttacctcaaagtacacaaagtacagtgatcacaacttctaaacctcaagtcaaactctccacaacagtaatgcctgttacgacaagcaccactccgaagccaattactgttcaaagggttataacatctaccagttatccaaatgttaattatgatggacattttgagacaatttcagtgaaaaggcctcagaatgagcgaatttatcaggcaaagggaagagagtttaaaaatttcggaagtcgttctgaaagcactaccacaaaaaagcctattactgtcacaaaagttgggacgaatattccaaaaaatttgaccgtgtctaaacctgttaaaattcacaaaattgaaaggcncgttggtgtcaactgcgacaccaacaaaaatctaacaattacacaaaaacccaaaaatggagtcaaaaaatctcatcntcgtgccggagttcagaaaaattgttaccacaaccataaccacttcaacggtaaagcccatggtaacaagtacttctgtcactacgatttctacaaaagtcacgcaaaatgcgagtgaaataacagtgttgccaactgacaaaacaaatacaagtttaatgattggctcaccaattaattcaaatattttctcgggattggagaatgccaccgaagttattaagtcagaaatgggtgagaacattgggactgaatatgaaactgaaagcgagattgagatacgtacagaaaatagttctgaaaattagagccttgaggaaatggaaatgaattttataaatgaggaagatgaagggagtaatgagggagagtacgttgaatttgaagtattagaaaataacaggaaaaacggacaacagtgaccacgcctgatgcgcaatggcttaaaaaagttgaaaaaagtaaaaaaaaggggtaaagcgggacaggaaaataagaacatgaacacccgcgttaattatgcgatgtataggctggatgaagccagaaagcaacaatatgatcagatatacattcaggcatgtgaaagcaccaaatttcaaatgcaattgactagggcaatcttacagataaatccaaatgagggggttagaaggatttttgatagagatgatttggtcgcgcattgggaaggtgataatttggaagttggattttgcgcaccactaacacctgaaaaaatattttgggataaaaaaattggtaatgaatgttacgaatggacaccagtttttgcagaggataccgtattttttgttaaacctggcacaagggagttgagcattttggggaaaaagtcggaatgtgtggaaaatggcagtgtaaaggaaatgcagaatgagactcaaaggggaataatacaaaaaatgggtgaaaatattgagaaaattcgacccaagtaccgaaatatataaaacccgttaattttaaaagccggagcgctttttgaatcagacaatgtgcgaattgaggaaacaattcgtggatatcgctcaaaaattaataatttgcccacaccgatattacgattagttgaaaaaccaaacattacggaagttattaagttggttaaaagtgaggaaaatgaaacgcttggtgtgataattggtagatccggagattggttggaaatagtaaagaaaattccggagaaaaccaaggaagcaataagttatttaaaaggcctatcatatgtactgattgcgataccattattaattcttttggcattgatgggatacattggaattaaatacagactgataatatttgccggggttcgtgctgggtcagtattggcaagagtgttaagagcaatcctgggaacgaaaaaacgaagtactcgggttttggcggtaccaaccgcaccagaattggattcaatcgatgaagaagcttatgttctggattatcttcctccgagacgggttgcagcgattacgaatgacccgaggagactcccatccattagtatccgtcttaatgatttgttaacagcagccttggttgattcatgtgctactgtatcctactgtagagaaagaacagcaagaaaagcaggacttaaaattttggagcaaaatgacggaaaaggaaatttgaccgcggcaaacgattcaagtatagaaatattggggaaaacaatggcaaaacttcgaattaaggataatgtgactggaaatgtcggagaatgggaagttatattgcttgtctcagtggacgaacattgtcccggtcccttgattattggattaccacttcttatggaattaaagaggtgtaat

SEQ ID NO: 24526 - DNA, 1080 bp, Heterodera glycines
ataattagggcttctttttttaggcaattcctaaaattttttgcgcacttgatacgctcagataagctcaaaaaacgcgttttccgctttggggtgtctacgatgacttttataatgtagtaaaaaagaaaaatacacacctaagaatcgaccctaaaaaatttcgaaatacacccctaaaaattgaataattgtcacaaaaattgatcgccaaaatctaattttatttttttcttgataaatgttttagatttaaaaattgtccttattagcaaaaactttaaaacaattaaaaatgaaaaaaaaaattgtgcaacattataaatagggcagggaattatatggaaattcatattttttcctggactgtgagaggcctgaaacaaacgaaattttacgagcaaaaagtccaaaatatgttttttatgtgctaaaaactcactctgattgctttgaaaacaggtaaaaatgctatttatgagcttttcatgcgatagaatgttcgcaaaaaatatatgtaaaaacatataaatccgttccctgattattacattacagacacaaagacaccgattggtattattgcatccggtctggctctatgaacgatatatgtatagctatttctgaatctttaattttggttccaagtttgatctttttgggttttgattcggcttttaatttgtgcctttttagactatttcataaattattttttacggatttttcaattatttgcatctatgtctaactgtccattttcagtaatattctgttttattcattttgctctcactctctctctgtcaactgtcacttttttatacttttttgatttcaaatatatttcttaagcataaagtctaaacttttaaaaaaattgaaaagtctaaaaaaaatactcttgaagtatttttaagggatgtgctgcacctggagttgattctcgcacagaatcaaatcggtgagcagcgcacatgaacaaattgacagggtgatcacagtcaaattgtttttggccgccttcagcacttccaactgcttcaattggtctgcaaaaaagggggacatgaattt

SEQ ID NO: 24527 - DNA, 458 bp, Heterodera glycines
tctagagtcacattttgcacaaccaacaaatgtgttcaagaaggtaaaaccatttaatttttttcacatatatgaaaatgctatgatccgaatgtttagagctttccattttcttccattatgagcgacaatttcttcggcggtgccgacaccaccgtgccaacaattgttgaccaacatgaacacgcccaatcgcccataactgctctctcatcacctcaaccaccaatgggagattgtgtaacaaaatacaacgtggaatttccggcgtcagaaacaatggtgaaacctccattggtactgcccagcgatccgtcccattggttgaaaaagtacccaccgccgaagcagaaccgtccgatgaatgaaatggcagaggatttgtactgctgggaatcggtgcttggttggaaggtgatgaggagatatgaaattaaactacacttgttgttcaagag

SEQ ID NO: 24528 - DNA, 1168 bp, Heterodera glycines
gagtacgtaccccgagtaccccccccccccccctgggaccgtccctgcgcggtgggtgggggatgatagcttgctgacaatgagccccctgcccacccggaacgcctttttcccggcactctgctgacgccaatccgaccgttttaaagagttcgttgacagtgtctttcgtaactccattctcatagaaattatcgcccaaattcagcatcaaattcagtccttctttctcggccagttcggccatcagtttggccacactttgttgtcccttcgtcggactgtgctttttattttcgtcctcttttccgcccgcgtcggcgactacaaaaatgcgcaatttctcactcttctcatcacaaccgtagtcagtcttcccatcatagtaatttgtgcagggagtgccaatttgttggattttgttgggtttttgtccattggaagggaggaaaagtgggaaaaacgaaggacagaggaaaagcacacttctcaaaaaggcaggcatcaaaagctgatataataagaagtactaaagtccaccccaaaatggcattttaaaatgccaaaaggcacacgtgtgttaaggcattggcacgcatacaaagcgtgaatggttgtaagtgaagtgcgcaattgccaaattaaaagaccttgtgacagccacgctaattgatcagaataaaaaaagagaaaaaagaaattgccagaaatacaaatatataagccttccttcatcactagggctggaaatttaagtcactaaaaatcttcaaaaagtctactaaaaaagtcataaaaaatcgccaaaaagtcataaaaaaggcaaaaaagtcacgaaaaattgaaaaaagtcctgaaaaaatagccaaaaagtcacaaaaaatccaaaaaaacacgtaaaaatgcaaaaaagtcctgaaaaattaggcgaaagttaaaaaaatccaatttttaataatttatagaataacattttgatcgtatttttaggcacttattttataaataggtcctaaaataggcataaaaaagagattcttccaacaattaagaaaaaattctccaggtttcattgcctttttatcgatagaaattttattcgctaaaattcaaattttgcctcaaaaagtaaaaaaaatctcgaaaaaagtcgcaaaaactcgaaaaa

SEQ ID NO: 24529 - DNA, 1740 bp, Heterodera glycines
aaaacacctttgggcccatcccccaattcacctttccataattataggagttccccggaccccgaagagcatattcccatcttttattagtgcttgattaaactatgtatttttgcggggtttagtatatacataataaattctatggcatgaatacagaagtttttcatccgtaatttttttggtaaaagtctcaattattattcctgctgagaaaataaaatatatttattctagtaattagattgatcaaaattacatacatataatgttagtattaacctatatgcgaaatgcagaaagccaattattcgaaagtcaataaaatttcctttgttataagctgttttgaaagaatgcaatgttgcgataaaaagcaactgttgaagactatatgtttgtctaccgatagggggtattatttatctaaatattttcgattcgataattgttaatacgctttatggtacatctgctgtcatatctcatgattgtataaatatcaatgaagaatttcaacgcgtttataaatttgttggtctattaagaacgcttcgcgtcctcagacgggagcttcgcgcccgttttttagcttgttaggccgcttcgcggcctcagtcgggcgcttcgcgccggtttttcaatttttgttggccttgaacgggcgcttcgcgcccgttttttaaatccgttgaactcatcagcgattagaagagtgattagaagaggtacaacagtgattagaagtggtacaacagtgattagaagaggtacaacagcgattagaagaggtacaacagcgattagaagagtgattacaacagcgattagaagaggtacaacagtgattagaagaggtacaacagcgattagaagaagtgattagaagaggtacaacagcgattagaagtggtacaacagtgattagaagaggtacaacagcgattagaagaggtacaaaagtgattagaagaggtacaacattggtcagaagaggtacaacggtgattagaagaggtacaacggtgattaaaagaggtacaaaagtaaatggaagaggtacaacagtgataagaacatacaacagtgattaaaagaggaagaacagtgattagaagaggtacaactgtgattagaagaggtacaactgtgcttgattagaagaggcacaacagtgatgagaagaggtacaacggtgattaaaagaggtacaaaagtaaatggaagaggtacaacagtgataagaacatacaacagtgattaggagaggtacaacagtgattaaaagaggaagaacagtgattagaagaggcacaacagtgatgagaagaggtacaacagtgatgagaagaggtacaacagtgtgagaagaggtacaacagtgattaaaagaggtacaactgtgattaaaagaggtacaactgtgattaaaagaggtacaatagtgattaaaagaggcacaacagtgattaaaagaggaagaacagtgattagaagaggtacaaatgtgatttaaagaggtacaaaagtgataaaagatacaatagtgattagaagaggtacaatactgattagaagaggaagaacagtgattagaagaggtacaactgtgattaaaagaggtacaactgtgattaaaagaggaagaacagtgattgaagaggtacaaaagtgatgagaagaggcacaacagtgattaaaagaggaagacagtgattaaaaagatacaatgtgatttaa

SEQ ID NO: 24530 - DNA, 947 bp, Heterodera glycines
aaaattccagaacaatagtatcgcgtcatatgctgagaatgcggtggaaattcccttgactgtagaccagaaaagagatagccattttccaaaattttcacgatcaaatgcgctgagaaaaaaattccagaacaattagtatcggcgtcattatgctgagaatgcggttggaattcccttgactgtagaccagaaaaagagatagccatttttccaaatttttcacgatcaaatgcgctgagaaaaaaattccagaacaattagtatcggcgtcattatgctgagaatgcggttggaattcccttgactgtagaccagaaaaagagatagccatttttccaaaattttcacgatcaaatgcgctgagaaaataattccagaacaattagtatcggcgtcattatgctgagagtgcggttggaattcccttgactgtagaccagaaaaagagatagccatttttccaaaattttcacgatcaaatgcgctgagaaaataattccagaacaattagtatcggcgtcattatgctgagagtgcggttggaattcccttgactgtagaccagaaaaagagatagccatttttccaaaattttcacgatcaaatgcgctgagaaaaaaattccagaacaattagtatcggcgtcattatgctgagaatgcggttggaattcccttgactgtagaccagaaaaagagatagccatttttccaaaattttcacgatcaaatgcgctgagaaaaaaattccagaacaattagtatcggcgtcattatgctgagaatgcggttggaattcccttgactgtagaccagaaaaagagatagccatttttccaaatttttcacgatcaaatgcgctgagaaaaaaattccagaacaattagtatcggcgtcattatgctgagagtgcggttggaattcccttgactgtagaccagaaaa

SEQ ID NO: 24531 - DNA, 1265 bp, Heterodera glycines
ggatgtagtgttggtcgaggagaatgacactcctcgatccgtctggacaatggccagaattcttaagcttcagaggggacgagacggggaaactcgttccaccctcattttgcttaatggaaagggaaaatggagggcaacgaaccaacttttcccaatggaagttcaatccgaaattccagaaactcagctcatcgcattcatcatggacatcgacatggactcagtctcactgcccggaagtgaagacgaagcttcagagcgatcggcacccaaatttaaaattccaaagaaacgccgcgccttcttgcgaccgatcggtcaacagcatagccctttgcaagggcctcgtcgaaaaaagatggaactcggcgactccggactacgcaagctctttgcggcgataagcgaagagcaaggcggcagcaaggcgacgacaaatgcgataacggagagccgacagatggaaaaggccccggagcacgtcagaaaggagcacgacaaggaaatggccagaagacaaagagaaaaggtccaacgaataccaacggaggaaatcaggcagaaattggccgctctcccacacatcacggtttcttcggaaaatgccgaaacacagagaaaggaacgaaaggagaacgaagtgcgtcgcaaaaacaatcagcagtccacaagcgaaggatggaagcaactcgccaagcaactggattacgacttgatggatgagcccgatgaaccagccctggaacggcgaaaggctaccgaagaacagtcggtaaaatgaagagaagccgaacgacgtcaaattgcacggaaaaaaggcatcgtgcaaatgaagaagcgcgcaaaaccgctgaagtttcccaccgaagatgaaaccttgctgagctacgtaaagcggttttatgacaaggataattgggttctctcttggaaaagccgacgtattctggacgaacttcatgacttggagaacgaaggacgttggttcttataccacgcagcaaatggcgctcaactcactatctcacgaacgttcgatggaacacgaccattgccgaatttcgatatgtggaggaaggacacctcgtgaatctgactccaaaccaagtcatcatccgccaaacggttccagatgagcccgaagagagtccagcgagaaataataaaaagttggatgagaaggcagaaaaaccggcacggaacgataaacgaacaactctggccgctcggaaggtggaggagtattgcacggcagagatgaa

SEQ ID NO: 24532 - DNA, 1355 bp, Heterodera glycines
cgccgcagcgcaacagtcgccacgaagttaaagcatcgtgccaatgaaatggcgggcgagggcggcggcggcagagcgcgcgtgacgagggcggcggcgacattcatcaccggcactgaccacggcaatggtcgccctgtgccgctatgccctgacggacacctgcgaccgttgctcatcaccgtactgttggacatgacactgtcctcgtcagcaacggtaaacgatttgataaatggttgagtaaattacctcccccccccgcatcgccccgccccctcgattttaaaaaaagagcgttatttttgggtgcaccccaaaatctcgccggccgaaatctcgccgcagaaatttcaaaaaaaaaatttcaaacagaaatttttcaaggaaaaaattcttagaaaattttttttataataaaatttaaagaaaaaaattgttgaaaaatttttcagcaatttttttttgaaattttatgaaaatttactgtttttttttttgaaaaattttcaaaaaaaactaagcaaatagtttttttttggaatttcttataaaaaattttctaaaattttttccttgaaaaatttctgtttgaatttttttttttttgaaatttcggcggcgagatttcgtcccgtccccttatttttcgggttcgagtcccatccgcgtgggtttgacggtgccattagttgtccagacatggacaggttcattccttggtatatttttagcatattgaccaaaaataggttatgggattttaagccgctttaacaccgtttctcttaattacacagagtcgtgcggattttgacattgttttgtcccatttggctgcctttttggagcgccatttttctgtcgcatcgcaacgattgcgactgaatctgatcggagtggatgaaatggggctgatcgcaccggtggagcagctcatccccgtggaacagttcagcaacaaaacgaagaggctgaaagagtggcgaacattcggcggagtaatgggcaaaaagtcagtgggagaaaatgatggaacagttggccgagatttatcgggttaatggaagccctcgggattagttagccaaccagattattaaaacaggctttatcagctatattatgattagtcagtcgttatttttggcacgtttagtttgatcatgagtttcggtaattgccaattgaattttggctccttccgggtcgccattctgatcatttagcgagggaaagtgtgtgaaacagaatttttgtaaaaacactagtcaaatgctttgattagatgagttttattcctccccgaaaggttaaagccgtcagcggctccaaatctaagcaaaggtttacaa

SEQ ID NO: 24533 - DNA, 1433 bp, Heterodera glycines
ttgcggagactcaacaaaaaacatcattcaaaagctattttgtagggaattttgtgctttaatgagcagattgtttttaccaggatatttttccagcccactagaaattttttcccaaaatttatgaatttcccaatttcaagtcattttgggcttttcagacccccatgaatgagtgatctgattaacttgtttaagtgacttttttgttctgcacaaaagctcggctagcagtaattagttcaagagtcaaatttcttagcctttgcttagaaaaagattcttctttttaatatctttcgaataataaaaaattattcgatttagttggaaatgaagtgagttatggctgatcaaatgtgaccaaaactaaataacgaaaataaggcactggaactttcgtaaatgttgtaaattcaatctattatttctattatcctaaaaaacatctaattaacttatttgaagtgaattggaagctttgagctctgattatgaatttgatcagattaaatatactttgtatttcatttgagtgtattggcgttttgttttttacgccaatttaataattagggccggatttatatgggtttccatattttatacttatttcggccgaaaaatcacgtaaatagtattttagcttgatttgttgcttctagggtgtctttttattccctatttttcatattttttgtttttgtctatacatagttccattattttacattcatatttttggcattaataaaaaaaaccaaaaatttgtgtaaaaaactcataaaatgcgtttggactcataatgtgcaatttgataatatttattttattataatttttccattaaataatccgcactcatattttggtgcgcattgattgacctttcttagtatcataaatcttcctttgaaaagcaattaattaaccattcttggtatcatttggtgtagccctgacaaatgagcggcccacaagtgaccatgaaatttcgggattttaatcagccaaaaagagggggatttcgtgcagtggtggcgtagttgctttatttcctttttaaaatttcccctaaaagtacactccaacaattttaatcgctttatcttttttcattcaattattttcattaaacctcatttaaatgtattaaattttttaaaaaatttatttgtttaatgatcacattgtcaaaaggtaaattatatgcgttgatgaaattaagagcatccaacacataaattttatcccgaaattttggccaaaaacgcgtgataaaatttatttaataatctttctcttaatgcacatctcaaatttgtaatactattttaattgatcattttaatatgttttctttttatttcggaacttttaatgagacgataaatgtttaatctcctaacatatctgccgactccctatattta

SEQ ID NO: 24534 - DNA, 985 bp, Heterodera glycines
  unsure (1)..(985): unsure at all n locations
gctgtgcttgcccactgcatttcaatagctggtaatttttatttctccggcctaatccagaaaaaatcactatctctttttttggaatattttacgtgtcaaagggtgtgcatttaagcgactcgctgtgcttgcccactgcatttcaaatagctggtaatttttatttctccggcctaatccagaaaaaatcactatctctttttttggaatattttacgtgtcaaagggtgtgcatttaagcgactcgctgtgcttgcccactgcatttcaaatagctggtaatttttatttctccggcctaatccagaaaaaatcacttagctggtaatttttatttctccggcctaatccagaaaaaatcactatctctttttttggaatattttacgtgtcaaagggtgtgcatttaagcgactcgctgtgcttgcccactgcatttcaaatagctggtaatttttatttctccggcctaatccagaaaaaatcactatctctttttttggaatattttacgtgtcaaagggtgtgcatttaagcgactcgctgtgcttgcccactgcatttcaaatagctggtaatttttatttctccggcctaatccagaaaaaatcactatctctttttttggaatattttacgtgtcaaagggtgtgcatttaagcgactcgctgtgcttgcccactgcatttcaaatagctggtaatttttatttctccggcctaatccagaaaaaatgactatctctttttttggaatattttacgtgtcaaagggtgtgcatttaagcgactcgctgtgcttgcccactgcatttcaaatagctggtaatttttatttctccggcctaatccagaaaaaatcactatctctttttttggaatattttacgtgtcaaagggtgtgcatttaagcgactcgctgtgcttgcccactgcatttcaaatagctggtaatttttatttctccggccnntgactctaga

SEQ ID NO: 24535 - DNA, 2265 bp, Heterodera glycines
caatcaatcagccaaggctcacatatcccatctgccctaagggcattgagtgcagagttatcattattggtctatgaactcatagataatcattgtaatccacaaatcttccgaaaaagcaggtcctataatcacaattcccaaaggttaggtctttattatcatcaaagcattggctcgataagctgtgcgaacgatcgatatcctatattacttatcggcattacactatttatgccatagcttggcaacagattggcgacggatatgacgccgtatcagagtcagtcccttcacaatggacttctcccccccccccccctcgccaaccgattgatcgcggtacaatttaatgattgattgttgttgtccgttttgtgtcttctcgtcttcgccagaccctccctccctccgacacatttgctttgtgtgtgaccatcgcgcttcaatgagaaaacgggtcccccgttgcgcctccctatccattttcagtattttttgagccgtttagggtaattattggcttaatttgtcgccgatcccccacccaaatccatctgaacacattgctcggctcggggcattttgtcagctaataaattaagtaacgatctgtcgaattcatttacaatgcatcctcatttattttgttgcttttgaaattttgtagttcataatgtaaggactaatgttggggtaaattcgatgccaattccaaaaaaaatgccgatgcatttttctcgactccactcacaattctactaataattatattcatccatccgtctgcctgcattttcggccttttgtccctcttgggaccaaatctttggcactggactaaacattttggcatttcatccatccatgaccattcattcattctttgtattttttaaatccgaatgcttctctcatttttccaaattccaattcttccgcttccttcagcggatcaaatcagtcgagtcactcactcactcactaattgactgatttcatcaaatttaattatttcttgaattgaattatgcctttgtttgtcttgtcattgtttctttcttcttcccccgctgggttcattcattacattacgcttaattgggtcaaactttgttcattttcattttatccctcccaatttgtgtatttattatatgtgcatgtacacatgcgcaagacaacggacaacatccccaccaaattccgatcaaagcgtcaaatcactgctgattatgattgatggcgatctctgtgccctttccctctccctccgtctcccccatttgcattcgcgcgcacacaaacatttcgccaacaacacacatgaatttggaatgaatttgtgctgtgcactttgtgccgccgtcgcgttggcgttctgtcttggattccgttccgagattagctgcacttttttttcttactgaattagctttttgatcagcgatgattttgcgcgaaataaaatgcgcgcactcaattgattgacgcacttgtaaatgaaaaaaaacacttaattcacttttcttaaaaattttttttaagaaaagaaatgtttctgaaggcaattgtgatcaattaattaattaattaatttttattaatgatgatgttcacatgaaatgagcgattcattttattcaatatataaatttgttacatattttcttttgtttcttaatttttcatttgtaagtattgtttccttcctccacttgctttttttttcttaaataccgtcattaaataattaactgcattggcttaatagcctaccaaatttccatccgattggcttgacagtacacagaattcacaaaatttttcatcattcgaacaataatttttctgttcaaaaacgttcatcaagtcaaatggtccagtttgacgttttgtcttacaaaaaattgtcatttgtttcatcaaaaaatttttctttttgaccattattttttcgtaatgcctgcctttgatttttcgattcacagtttttctccaatttacattcacaaatccgcttttgattgtaattttgacgttttgtcttacaaaaattttgtctttgtcacatatttattttgtttttctgaccattatttcttaaatgccgcctttaatttttcactatacttttttggggtcatcaaatctttaagcattcttttttttccgaatttccattcacaaatccgctttaattgtcatgctaagtattcattaccaaattgccctcctttgtcctcttgttgctggtgacatttt

SEQ ID NO: 24536 - DNA, 1635 bp, Heterodera glycines
ctaattagttgtcatgatcttttttcattttaatacgtattttttggcaatgccatttttctgcacgtataaccacggcaaacccatttttaacgtggcattttctgctatgggctgagtaagtcaggaaaattcaatcccgtgatttgaaataaattccgtcatttaaaaaaaaaatttttctgacccttctagtggacaaattttgaaaaaaatcactgaaataaacggagctaatttttgggcattaattaaatatttaggtcggccacttaatgagctttgcataacgaaattgtattttattttatcatcgtcattttttccccttttcttccgcgttataatttttaatttttgtgtagggtttttcatttttaactttgctttaatatgtatcaacatttttttttgtttttttttgtacttgtttatttgtccgggctttttctttttttgggttaattatcggcattcgtactgagcagcccaaacctttcccttatttccatttccacttttgtattatctttacccctcatcccactcaaaatctctttccattgggcaagtccaccccatatgcccattctgcaattgtctgggtgggtcatcagtgtgctcatttgtcagtgctattatttgccttgagacaaaattttcccaattaactaattgcactgacccatccctctgagatgttattgattcaatttattccggggtttgaatgcaaatttattatgtccgtgtttctgctgattattataaattttttccacaaaacgttagtagagaaaaattttattgatatatatatttagggctgcaaattttatgtaaatacatatttttttcctggcttctccttgctctaaatagcaggaaaaacactttcttttttgtgtttgcgaacaaaaaccgggacttttatttacatatttttacatatttcggggtttttatacatatttcgggattttcttacatatttgtacatattttagatttttttcatatatattttcatttttttttacatattttgagtattttttacggaatttttggaaatcctcaaaaaaaatccaaaatttcggcaaatatttttgtacatattttcgtttttttacatattttgaaaatttataaagaaaaaataagtttgaaaatgttgcctaaaaataccaaaaaaaaagtaatttttatgtcattttgtggctatgtcataaagctctcgacaaggataagctttttctacgcaatgctaatcaatttgatgagttagaaaaaagatatgagcgttcgaaattttgttttttttgaataactttttaatgggaattatttttgcaaaaaccttcatttagaacaatttcgaatctcggacgcgaattcgaacaaaaatattttgaaaattctcacttttgttcctaaattagtttgtaatgaagcgagaaaaattcttaacttaaaatgaattttatctttctgagacggagttggccccttatacaataagaaggagttggccagacggagttgcctaccggtttttcgatacttttgttcatcgaccgattatttgtctgtttctgtcaatcattggcacattttgcgctatttgccaggtgt

SEQ ID NO: 24537 - DNA, 2473 bp, Heterodera glycines
aaatttgtccgcataatgaaattttttgccaattatacagacgaataataacagcagcaatttggcaaacattttttgtaagattttttctacaaaaaaattaataaacaaaaaaaaataaaaaattattttcataagaattatgatatagaatttttatggttgtaaaaaagaagctgatatttataggaaaatagtataaaagaattcttttgctccttttaaatgattacaaaaaaaggtgaattgaaaagccaaaatatttcacaaaggaaatgagaaaaacatatttattttaaggttttactttacgaatcatttatattatttttttagttttcatttaacgaatttttatgaaaaattttgccttttcaatataagaaaaattttaagtagatttttttaaatttgcttttaatgattagttatcggattcttttttttatatgaaagttttcgatttcacattattatcaataaattaaaaaattattttggttcttaatattatacatattattcaaaacaaataaatattcttcataaataatcaacaaaatgttttctgtactatgaattttccttctaattaattccttttttctatttcctcaaaagtcgaaatcggatgacaacggttcgtcttcctttccatggccaaccgaactttgttggccagggttggtaatcacatggctcggactcggcacattttggtgcgcggaatttccttgaaaataatcttttaagttttcaaataaatatttatttaaaattatttggtttgcctttgcttgggtgtccaaaatgcacagtaacttcaatgttcagtgcttggctaattgctttgattgtttggctttcctgctcaaattgacttttcaaactgtgccattctgtgccggtgcccgcatggccagcagcagcagcggccaagtcgaacatggcacgggcaaagcccaaattgtacggacactcgtcctcataagtgatctccattttcgcaatatcttaatggggtaatttgggcaatcattgtgtattaattagtctctcataaaaaatttcctgcaaaaaatattcctttaattaattccaaatttgcatttgccataatttgatcatataattactcctcagctgccgatcgatttcgtccacaatttgtgcttctcccccgctgggacatccgccgcgagaggatagatcactttttaacccatccacagtacttttcgtcattgaacatactgtagacgcgtcctcaccggcagcagagaaagtgccaatgtatttggacatcacagaaaccacttgctgactgcccgggcagcacgggaaatctgtgaaatttaaatatattaattaattattttctttttgaagattttggtttacttggcattgcattgcaacagaccaaaaagacaatcgagaagatggagagcagtagagaagacatagcaaaaaatattttgttttatttaataatgaataatttggtattttgttgtttttctgcccgtttaaatacccccctttttatttccttaatagacgtggtttttattagactaaaacatacaaaaaatctttttgcggaaattggtggatttttttataagctttcacgtgaattttaaaagaaaccgaaaatcgttgacaattttttttatttatttagcttttattttaatgtgtgactttatcaatctatttgcttcatgtcgaaattttatcttattgtctaaattttgctgcaaaatatttttcaataaaaaatatcttttaataaaaaaaattctttaaatcgtccatttaagaattgaacaaaagtgagtaaaaaaaaaattatttaagggattaagaattcaattttaatacttaaaaatttctaaatcttcataaaattttctcggtggcgtctgctagcactgttgaccgacccccttcttcccagaaatttgtcgctctgcaaaatttttgcgaaaaccaaagcaaaaaaaaacatcaaattttggcttttaataaattaggttcaaaagctaaattttcatacattgatttgttctgaatttgaaaaataaaagactcgtaaacttttgttttactttttcataaaaattttcacggcgcctccacccatcagagtcattaaaaattaagccttttaaagaaattatctcaagcccaaaaataaaataacgtaaaaattgtgattttgattttacactttcaactacgaactttgttgaaattatcccaataaaattgatgaataccgtattgttcgttgtggcattcatttggaactttagattttgttttgaaatttaacagtgccaatgatgaatgagctttttgtttgccccttatttccatttacgatacatttaatgtcaattggtgggcatggaaacaagttgaaactaatcccactattcacctgattaatttagggttcggaccc

SEQ ID NO: 24538 - DNA, 1339 bp, Heterodera glycines
tttttggtgcgaaccacaatcccccgaatgggtaggtccagcaaccatttttggtgcgacaaatgccccgaagggcctgtcagcgaacctcattggtgcgacaaatgccccgaaggcctgtcagcgaaccactggtgcgacacattccccgaagggactgtcagcgaaccacattggtgcgacacatgcctcgaaaggcttttcagcgaaccacattggtgcgaaaatgccccgaaggcctgtctgcgaaccacattggtgcgacacaagccccgaagggccagtcagcgaaccgtcttggtgcgacacatgccccgaaggcctgtctgcgaaccacattggtgcgacacaagccccgaagggccagtcagcgaaccgtcttggtgcgacacatgccccagaagggccagtcagcgaaccgctttggtgcgacacatgcccaaagggccagtcagcgaaccgttttggtgcgacacataccccgaagggccagtcagcgaaccacattggtgcgacacgtgccgcgaagggccagtcagcgaaccacattggtgcgacacgtgccgcgaagggccagtcagcgaaccacattggtgcgacacgtgccgcgaagggccagtcagcgaaccgctttggtgcgacacatgccacaaagggccagtcagcgaaccgctttggtgcgacacgtgcctcgaagggccagtcagcgaaccatatttgcaaaaaatcaaatataaatgttagtattgggaattaataaaggacagaacaattaaaaatgacaagaatttgcaaaaattattattttttaatttggcagttttaattgttcttgagtattctaggaaagaacttaaggcgtacctctgctatattatatttattatctattccatcctcagatttgggacagaaaaactattcctatatatagcaaggtataatttaaaataaatagaactctgaaaatttttcaatgtcttaagagggatggaaagtttctgctttgtttagtatataagatgcattgataaagtattagtataaaatcatagctgccagatgaatattcaaaatcattttgccataaaaaatcaaaataatatttgaaaaatcaaatcaaaaatcaatccaaaactttttttgcggcgctctttttaattcagttttttggatgtttaatattctaacaaatactaaaataggaacaacattcgaaagcagaaactttcattggcaaattataaaaaaattttacattccaccagtaataatggttggaactaacggcatttcatttttattgccatcaaaatgtttgtccaccagcgcattgaaa

SEQ ID NO: 24539 - DNA, 1170 bp, Heterodera glycines
  unsure (1)..(1170): unsure at all n locations
ttaatgttgatggtgggtttgtgagtaagccgagtggagtcgatgaatgactgaattagatcagatcagatcagaaaggggccggggaaggtagaagcaacggggaagaaagagggggcaacggatgccaaatgctctcccatccccgcggggctcccaattcatcggatgggcggtccccagggcctccgtgtccagggacagccgtatcagccacttgtcaaatgtttgttggcactaatgccccagggaaagtgttgtttgtccacgagcattcattccttgcggcaaagtcaaaagtcaaaaagttctttgaacgagttacactcagcaggtcaaattgacgattaaaggaggacattaaaagggacaaaggagccgagggaataattaattgcctttgaaaatctgtgcattttgagcatttggtggggcaaagggacggggagggggcgggaggggngggggggggggtaacacatcactccccccggggggggggggacgggggaaagattaattggccgcatcaatgcaaaacggagaatgatcggactaagagcacaaaaaaaggaagtcagcccaatgggcgatcgctatttattcgtcccttctcacatcagcagcagaatttgtctatcctagtggaagaaaatgcgggcgaatgtttgtggcgactgagaagcagtgggaattttaggatggaaaagcgaagaaaaacaaaaataaatattaaataaatggcgaaatttgcaattggacaaacccattattagcatctccaaacaatggatttttaactaacgatgaaaagcgatttttgatattgtgtctatggaagaatgggcactaaacacattttatccagcaaaaaatgttaaaaggccataaaatgacgaaacggccaacgaatggccgaggaaaaggaaggagagacattgaccgattaatcggtccgggaaagaaagagaaatttattaatttgggatgtcagcgaatttggcaaaagtctgcagtaaaataaaaggaaaaattggattaaattgttcaaaatattttaaaaagttagaaagaccgttttctttattatgactgactaatttattcatcggtttcatgaaaaatgagcgaattcaaatcggaataatcggagggggggggggagagaaa

SEQ ID NO: 24540 - DNA, 712 bp, Heterodera glycines
tgccgcccgcctgatgtttgaactttacattttttaaattttttcacgtaaaatttcacgtaactcacgcaaaactcatgatagctaaaaatgaacgtcatattcgtgttcagcgcataaaaatgccctagaaaaaattattaaaaaaaaatttcaggggggtcacaaaagggataagaaccagaaaacccccataaacatgtttccaggacttttcagaaccaaaaaacactatagtatattaccgaaagtaggaattgagccggggtttatccaaataaataaaatagtccacgacaaaataataataataaacacaaatcaatcggcgacaaacaaaacgcctaaaaatatcaccaacgacaactaaatccaccaactgaaacttgaataaaacaaaatatttgggtcgaattaaaataaacattatgccaaactaatacaaacaatcaaataaagggtcaaaaggtcaattttttttttttgaattttttttttgttattttatttttgatttttttctttttatttttttttaaattttttttgattccacatccccggcctctaatgctggtatgcacaatggtaaggataattatccgcagctatagattagcggatagggtagctgcagataaaaaaatctgcagataaaattcgcatgcacaatgctaaggatacttatctgcagctaacgatttttttatct

SEQ ID NO: 24541 - DNA, 1423 bp, Heterodera glycines
  unsure (1)..(1423): unsure at all n locations
caatgtttctatctaaataatttaatgtttacaaaaaataataattttttaataaatttacaagtaaaactcttacaaattggcaataaataatattagctaaaattgaatgaatttgatgccggaaattgggaaattttagctttaataataaatatttatttaatgagaaaatgagaatttattattgatttggatgagtaaaatttaaacattttagaaattataaagaaaaattatacaaaatttgaagaaaataattaaagaaaatgaaattattattattattttgttttattttaattttaataccctaattattccaattaaatagaaaataaaaaactgcaatgaaaaagatataatgaaattaaattttagtggaaatgatttttttatcatttttttattattgctattattgtttaacaaattataaaaaaggtgtctttaaaattgtaatttgactttaaaaaaatttaatttaataaattatgaaactttctgattcattttccttaaatccaacaaaaattttgaaaataataatcgacaaattttaatttttttttaattttcaaatagaaattaattaattttatttatgcgattaattttaataaaatatgataaatacaaaaatggccgcataatttattgcgttggattgattgtcaaagcaaaaatattattgaaaaatggatattttcaatgtttcgggttgaatttccggaaatcagggcaaatataattaataaatcaggacataatgattaatgtaattacaaaaattattattaaaatttttttcgttaactaaaaaatctgtttgttaaccgtaaataacaaaatttttgtctgaattattttgtgatttatgccaaaaagcatttttcttcggcttatcctccttcagattttaaaacaaaatttgtcaaactcgactttactcagccgcaacaaaatcaaacgcaaatttattttgaaaaaataaacagacaaacagaaaatgaaaatgaaaataagtcaaagtgccagctgaaaggtgtgaggctggtcaggtaggacaaagactctgccggaaaatttttccataaatttggtaaaattttaaaatgtgtttaactttaattgaatttattgtaaatttgcgcagaaaatattttcaaaatgcaatggaaatattaacattttcattaagttaaaaaatctgaacagaacacctatagaaagttttatgcaaatacaaatagaatttttttgacaaaatataataataagtctttttttcaagcactgataattttttaaacaaatttgtccaatttttcgtagctttttcccattcaatccttcaaaattttaacgccaaaattgtttcttccanatttaaaattganttttttacttaattggacctgca

SEQ ID NO: 24542 - DNA, 1639 bp, Heterodera glycines
  unsure (1)..(1639): unsure at all n locations
ggggaaatgactcatgctaatggacacntaatntagtgacactaattattagcaaattgccattatgaacatgcaaatggaaatcccaaaaaaaccaaacataacgaacaaaaaagttttttgtttgattccaatntatgccgatggacgattcatgtgaaacattcattcgtcagtttgcgtcattttttgagtgcaatttgcgtgttcactctaattaggtcactaattagcccatggccatgagtcttttccctctgtccgtttaatgttgtctcattaaggtcatttatgattcaaataaatgttcgacctgatcaattttcattacaaattaagaaaagagttggggttgaccatttcaaatttgttcacccgtaaaatgtcaaaaagttgcttttcatcgtaaaagatttgcctttcaattaagctaattaagacaatttccatttcaattttctgttttctccacggttctcaattaacatctttttttgggttcattttgacaaagcgcccgcggcacatatcctcaacaaaattgctgaaaatatgtaataaaaaatttatttctgaaaaatgttttttttctttttttagttatataccgagtgatgttgtacacgacgttttcaaatgggtaccaatgaaagtacttgccgaaaaaatttctgatgccaattaccggttcaattggttaacatgtgcacggcgatggcacataaaagtattggagataagaaataggaaggacaacaatggaatggaagtggtcgatgaacgagggcaacccttgccaatcgccgacgaaccggtgccaccgaacgtcattggattcaaactgatgaaaatcaggtggtttaaaccaattccgttcttgagtcaattgatatttcctttttcacaccatttcagttacctcgaccagcacgccatcaattttatccatctttttgatccacttttctcccgcatttcaacatgcttggcaatttcggcgagcacagtggacacatcatcatttattacccaagaattaatgccattgctcaacgagaggatttttgctatgaacttctgggagtccaacgacttcagtctgttgcgccaactcgagccgcacattctcatgcagtgcccttttctccgctacattgaattcaacgacatatttttcttccattttccgggccaagacattgagacggcgttggacagtgaagccgtggccaattggttaattatgccacgtccgagagaggcggcgccaaagttgcttcagtgttatttcactggtaaaatgaaattggaggccccgatcatggcagcgagagcggtgaataattcttttggcttaccgtattttattagaaatgggcaccccgcggggggtcctttttcactccctttgagtctcacacacatttagcgccttatttggggagggtgaattactgtattttcaagtacagtatgctttggatggtaatttaggtggtgtttcttttcaggcatttaccgagacaaagtcagcagcgcctttcatcattgccatttatcgtcgttttttcgggtctcgggaatttttgtttttgagcacagcagtaaacattcgattttgacttgggttatgcgatca

SEQ ID NO: 24543 - DNA, 1694 bp, Heterodera glycines
tcgtactcagcgcctcaaaacacccgtagaaaagtgttattatggatttcagaaaagttaaagaaaattttttcaagactaatgaatggaaagacatggttgctcatttaaatttatttttttacagaattttgggactcagaaaattccaagaaccccctctgaaaacaaaatttttaaaaattttcctcgaactcgtcccccaaaacgtaaatacaaaattttattggtgcatttttgaatactggcaattttcgtaacaaagtgcacttaaattttcaatttttttcaaaaaaaattttcacttgggaaaagtcccggttggtcccggtcccgggttttttcgctgtcccggtcccggtcgaaaaacttggtcccagtcccggtcccgacttttctggttccggtcccggtttttgtcaaatttcccggtcccgctcaacgctattcataaccccagtacaaagaaaaaaattaacttaaattagacaattaggtattccctaaggtgttttggcaagttcaatcctagacacacaattcttttattctgattcatgcattacagacaatttgcctacgcctctttcaattattaaattattccaaatgatcaatcgtggtaatgacactgacgaatgggctgtccaaaaaggagatgaacgaggcatcgtagcggaggtaaattgtgcatttttcattgaaatgaatctaacgaatggattgctcgcatttctttctgaaatggtcaccccctccccttggaagaattttttggtaatatgtagtaaggctggtctccctcctttttcgaaaattttttttatgttttcaaaagtcatgaaaaatgtttccaaggcctcgggggtcgcctgatcacgaatccggcatcaatttcgccaattccggacccgaattcgaacaaaaagtcgaaaattcaaattttcgaattttaggtttttgtttcaaacttcagaaatgaagtaaaagtcaataatgattcaataaaagatcatttaaactacttttagaccaaaaatgataaatttaaattttcgctttgttcgaattcgggccttgaattctgaataggtcgaaatggatgccggattcgtgatcagcgatccagaaaagcctttgaaacatgttttcattttcatgactttgaaaacataaaaaaaatttcgaaatgggggggggggcatgaaaatttcttgcactttttttggtctaatttttttttgggtttttacccaatgataaataccctggggtttacgaggtcgctgatcgcgaatatggcatccatttatactaaatcgggattccggccccgaacttgaacaagaaatcgaaaaattttttcaaaatagtactccttgtaaatagcgccaaaattctcacttttttctaaactaaaaaagggtaaacataaaaaaatagtcattttgttcgggtccggggatcgaaatggttaaaatgagtgtcagattcgtgaacagcagccctgaaagcccgcaaaaatgttttcaagacttcttcagaacaaaagaaaagttttttccaaaaaagataggggcctaccgacagtattaccatgacctggaatggtcatgataatttccatatcgccattcatttagttttttcacaggaacaacagccgaaagccagacgcggtaattctccatttt

SEQ ID NO: 24544 - DNA, 1826 bp, Heterodera glycines
atttttcctctcccagtttcttaggcaattctttctcagtttttgcacaccctgttttgccctgtgcgaacacttcttcccttgcaccatcctcggcacattcattcggcatgatggtcattgacacttccgttccaccgccagcagtatatgctcggactggacgagcaagaccaaatgtacgcatgacgccttatccaccacaacgagagccacgaacgagttacgcagaagcagtcgaacatggccgaccagcaccgaaagaacgaaggacggatgttgtatgccgcagatgtggaagattcggacacattgaaaaacgatgccgaacgtgattttttttttctgttctctatatttctcactcattcctttttcatcattttcacctctgggctttatcaaaagtgatttaaaaaaaattttaattttcggataccatcaaattttactcatcgatcggggacgatcgcttcaagggatggaggtgtaaaagggatttcttaattggatttttggccttttccgggacaaattccttcccgcattttccttcactttcccatctctttatctccgttcaatcagtcattttcttatccatttcattttctatccttcgccatccgcgttatatccatcattcacttcattttcacatttcgttttattcaccaatacgtgtggtttaattacccaagtttgagatgggagaataaagtaattctggataatatttggtcgccaatgatcctgggagggcccgcccgtttcactataataatgaaatcgcaatgaatgctttctattgcatttcttaagagaaaaagtttttgtttttgttattattaaaaagcgtttggaaatgaatgctcttaacacttttgtaaagaaaaagaattgtttttgtatatgcaaagtcaatggaaatgatcttacacttagttttgatattgtagtgaaaaagttttggttcgagagattgtttgaccttgaaatggagtttttttgtttttgtaattaaagcggatgtcaattatgcctcttttaatggatacggttttaattggatggatttatcgcacttattgtttgttttgacaaaaataagtttcttttaacgatataaggtcagtttatttgttctttttttgtatgtacatagatgtttatgtaaaataaattattaaaatgtaagagaacaagtatttataatgaaaaggattttctacgcaaattgtatttcataatagaaatacgtttttaaaattccaaaattatgctgacaggtctgaattaagtcccgtgattgacatgccgatgaatccgaaaattgagttcattgtttggaatagtgaaggattgagtcctcggtgattggaatggcggagaactgagtcctcggttattacgatgccgaagaatccgtgaaaagtgaaggattgagtcccagtgattggaatgctggtgggattgagtcccgggaataggaatgatggagaattgagtcccagtgattggaatgctggtgggattgagtcccgggaattggaatgatggagaattgagtcccagttattggaatgtcgcagaattgagtcccggtgattggaatatcgcagaattgagtctcgatgattgcgatgccgaaggaccaggtgaggttaggtcccagtgattgaagtcctggagaattgagtcccggtgattgaaatgctggtgtcttgagtccctgtgattgaaatgcaagagaattgagtcccagtgattggaatgcaggagaattgagtctcggtggttgcgataccgaagaatcaggtgaggtt

SEQ ID NO: 24545 - DNA, 1803 bp, Heterodera glycines
attcctccgatagggactgtaaaaaacttccatatttggatttctaataaattttgtgtagtatatttctgtttttgttggctggtttaaatgatttattgcacatgcttgaatttttttaaacaattcatccacattgtttcggagactttttatctgttttctaattttgaaacattttataaaacttttttttgatttaatttcattttcttgacattttttaagactacatttttcaacctcgcttaaagaattggaaatgtttttatattcgttggacatttgtagatatagcacccgaatttttataacagaatctaaaaaattctcatacaacacatgtattcctggtgcaccaaaggcaataattgtaaaaattttcgcatatttagaaatattattacagtaaataactacactatctgcctctttgatcatttttctttcccttttccaccagtttacaattcgattttttataaaattcatttcttggtcaattgtcgtcattttttacatttagagatacaatgattatttcaaaaattacagtatcatccaatggaaaaaagtttgaaaatataggctgttctagcagaacgtcaattgtattttcctgtggtaaccgtaatggcaaggctactagaaaattagaatattgtagttttagaattgatttgaagtttgctaattcttttatatatgcattttctaatattttttctagagattgtttaaattcataatcagatgtaccggaaaaaataaactttgtaatatgttttttgatcccaaatttgttaattacgtgacaattatactgaattgcctccattttactcgtgaagctcaataaatcccaacactatagactgaactctgctttcttgctccaatattttagtatgaatccgacgggactcgaaatgcaacttcttggtttcgtttaaactcttaaatactttctcctcaagttttgtggtctgatcgaaatctttagaatgttcaatctcacgccacatcgtctcaaccctttcagactctgcattaattttatccagaacggtgtaaatttcccagatacaatctgacatttttacgaaccattctcgaacccctggggcatagggggccttttctcgggatttaattgcccgattaagggctccacgagcagatttggaataatcatcagcttcctctaccaatactgaaacttccttccatgccctttcagcctctttttttgaggcttccaacaaaattgctgttcctttttctgttctttgaatcatttttaaaaatttattattatctttccattctcttttatacattaatcagatataaattggtctttaaatgttggtcttggggaaggtccggggcgggataaatattccttcattgtttccttaactttatcggccaattccccaatcccgaggtcagattgagtataggcgttacggtacgcagtaccgacgtcctgtctatactgcttaacaatttcaaatgctcccttcgcttcgtctgccaattcacgacacattaaaacatcttttggtccaaacacttatccatttcttttctaatgtggcctattttctgcctttcttcgttaattttttcggaaattccttgtacttttctcaccccttctaataacctaccgaaccacgttttcatacccggtgcctcaggatgacgaactttaattttttctgcctccgtaattgccctatgagaagcagcagcaaaatgccgtgcttcgttatttaatctggtggtatcccgaaa

SEQ ID NO: 24546 - DNA, 845 bp, Heterodera glycines
  unsure (1)..(845): unsure at all n locations
caaaaaataaataaaaacgaaagactcagattttcgaaaatttttttgagccagctagctcggcgctcatttcagtgtaagttagtcctttaccggggagtatccctgcaaagtttggtacgcttctgctcaattagcaaaaaatatgagtgatcgaattttcactaaaaaagttaagcctacattttttggcatatttaaaaagcaattaaaaaatttttaaaatttaataattttcctgcaccgaaggtactcactcggcctctttcgcggcctcgtgggtgggccttcgccccccccctcccacgcccttcagaacacgacaaatatttcaacaaaaattttgaaatcatgtttcccactcccttctcccaggggtattattttgtaaagtctttttttccccaataaacttgtcaaaccccatttttcgcaccgtgaatgttatttttattgaattctgaaccgttttgagtagattagactagaaaaaattgaaaattttgaaatcatgtttcccactcccttctcccaggggtattattttgtaaagtctttttttccccaataaacttttcaaaccccatttttcgcaccgtgaatgttatttttattgaattctgaaccggtttgagtagattagactagaaaaaattgaaaattttgaaatcatgtttcccacttcccttctcccaggggtattattttgtaaagtctttttttccccaataaacttgtcaaaccccatttttcgcaccgtgaatggtatttttattgaattctgaaacgttttgagtagattagactagaanaaattgaaaattttgaaatcatgtttcccactc

SEQ ID NO: 24547 - DNA, 2035 bp, Heterodera glycines
aggggaaattcatcatcatatgatggagaaagctcttataattcatgcgcatggtgtgtgcttgtggggagggattttgtccatttattttgccatttccccctaatttcgcattcatttgatttttttatttttttcatggccccttttctgtggagcattcccttgttggccattgtgtgctttttaagtgttggcataacagcgccaaacagtgacaacgagcagccaaacgatggagcaacaactgctgttgagcaaaaacacatagaaagtatggaaattagcaaggggcaattaggaatttaatcattttaatctcttaattgaagcatcctggaattaataattaatttggtcagttttaattagccaattagaatttgcgggccccaaaaaaattgcaataaattaattgggacacacaaaaagaccccaatttcggatttttgcaaatgtaaattattggagaattttatttaccttttgaaaaagtttgaacttttaaaccgcgtttttttggcctcgaaattcgtgcatcgaaaatttggcctaattttcgagcatcggcttcgagaagtaagccgagcttcgcccgtctgtccctgttttctatagcggatttctacagtataattgggcgcatgttttgtccattgttctttattttggattttctaataaaacattccttcatcaaataaaatggtataattctaggttaccgaattgcatattaaaaataattagtcctaattcacaccccaagatgaggaaaaggaagtgcaaattggaaaccatttggacaagaaggaagtggagaaggggaaagaggaagaggaagaagatgatgattgcaaaaagaaaaaatacaaaaagaaaaaaggagaagaagacaaaaagaagaaagataagaaaagagaaaaaagaagaagacgatgaagatgaaggaaaaataggaaaaaaaggacaaagagaaaaaagataagggcaaaaaagataaggacaaagagaaaaaagataagggcaaaaaagataaggacaagaaagagaaaaaaacaacaagaaagtaaaaaaggaagagcacgaaaaagagtaaaggcgaacaacagacaagaagaacggaagtatttatctcttcaagctcttttcatcatagttttcatgtgcctatctttctatcggcttcttcttttcttccggccttttctccttcctttctttgcttccaattctctttttctgtaactcttctttttttggtacgcataaattgaaaattctgctggtgctttttagtgctgtccgaaagtctcggttccgactcaagaaaagtcgggtttttggtctcgaatcgctactagagaaaatagtctcgaatagagcttctcgagaaagttacgagttcaaagaggggcggagagttttttttaatgagtttcaattactttctgtgcatttgaaaattccacttctcctttcctctctttttatggaaaataatttctatgctcctgaaaattttgataagccgcacaactaaattattccttctggcgtagtatcaaagatcccatacattataagagacaatctggaaatatgtcccagacatatgtgaacaaattgtctctaatggggatcttttgaaaatcaaattcatggtcaagagtgacataggcacaaacgtggcgtaagcagctcatataatcgcatgcagatgagtagagctgaacattaaataaggagaacatcatcggcatcattatagataatattgataataattttcaagagttcccagagtgatcatcagaacggacaataatcagaaacaaaagcagacaatgtcaatgagtccgagcaaattcagcatattacataacaaaatattcatatacgtgaataaaacgataaagattgacagcactaataaataaggtactagtatgtatattatcgcgtaagtatgcgcttggaaacacccaccggggatatgtataattagataaatatatgtcataatatttgttag

SEQ ID NO: 24548 - DNA, 1141 bp, Heterodera glycines
aagttttatggggaaaaagactttacaaaataatcccctgggagaagggagtgggaaacatgatttcaaaattttcaattttttctagtctaatctactcaaaacggctcagaattcaataaaaataacattcacggtgcgaaaaatggggtttgacaagtttattggggaaaaaagactttacaaaataatacccctgggagaagggagtgggaaacatgatttcaaaattttcaattttttctagtctaatctactcaaaacggttcagaattcaataaaaataacattcacggtgcgaaaaatggggtttgaaaagtttattggggaaaaaaagactttacaaaataatacccctgggagaagggagtgggaaacatgatttcaaaattttcaattttttctagtctaatctactcaaaccggttcagaattcaataaaaataacattcacggtgcgaaaaatggggtttgaaaagtttattgggaaaaaaagactttacaaaataatacccctgggagaagggagtgggaaacatgatttcaaaattttcaattttttatagtctaatctactcaaaccggttcagaattcaataaaaataacattcacggtgcgaaaaatggggtttgaaaagtttattggggaaaaaaagactttacaaaataatacccctgggagaagggagtgggaaacatgatttcaaaattttcaattttttctagtctaatctactcaaaacggttcagaattcaataaaaataacattcacggtgcgaaaaatggggtatgaaaagtttattggggaaaaaaagactttacaaaataatacccctgggagaagggagtgggaaacatgatttcaaaattttcaattttttctagtctaatctactcaaaccggttcagaattcaataaaaataacattcacggtgcgaaaaatggggtatgaaaagtttattagggaaaaaaagactttacaaaataatactcctgggagaaaggggtggggaaaatgatttcaaaatttttcattttttttagtctaatctcctcaaaaccggtcagaattcaaaaaaaaaaaattcacggggcgaaaaaagggggttggaaaagttatttggggaaaaaaaaatttt

SEQ ID NO: 24549 - DNA, 905 bp, Heterodera glycines
agagaacggcacggtcgtgtgccaaatggtaatgccctgaaaaagcgcaccaaattggagaggaaataaacactcgttgtttaagtgatttattggccaaattcaaaagaatgaaatccaacgctttaaaattgctaattgtaaatgttaccgatgaagaaaaagcgatatgtggtgtacatcagagtcagaggcacggtgaacagaatgcagctgaagacgatcagtcggccaatggcgcggtcgcgcgttttcgccgcgtagggcggcgcttcgtcgtccaaaagggcgtcctccgccgcttcgtcctcgtcaaactgttcgatttccttcgcactgctcccgcggctaaacgacccgtcgccccgtctctttttcctttttcgtcctccgtcgcccgccccgcctttgggaacaaatgaaatgcacttattaaatagggaatgaaaaaataatcattttcggaccaaaaaacccctcgaattgtatgtcttgtatcactgcaagcacaaatcgtaaatttaacatttaataataaaaaggatttatccgaccccgaaaacttatgtaacaaaaaacatcgattaacacctccctcctcattccccaatctctccactcactttcgccctccgtgtccgtcgtcgccgtgctgctgctcaacgacgaactcaacgagttgatggtcagctgatcgtcgccttcgcccccttcggcgccgcgttcgtcggcctcaacgagggaaattccattgtccgtgctcgtcgtggtagtggcactgtttgaggacattttcaccaaaaaaaacgaaaacaaaaattgagaaatgtccaattaaagcaataaaatagttgaaaaacaaatatcatactaaataagcaattatatgaaatgaataggtattt

SEQ ID NO: 24550 - DNA, 1900 bp, Heterodera glycines
  unsure (1)..(1900): unsure at all n locations
aatacataaaaaaatttggatagcaaatttactgatcaaatttcgaattattactttaataactaaatctttcagttttttgtcccttatactaacatttttaagatttttttaaagaaattttctttaatgccaaaataaaccgaaagttcgcaatttttcgtacgattttttttattacataatttgagcttttgagaataggaatttcaaaaaaatcttatcgtttatataagtcactttgtgccctaattcatgctttcctaacaatcatgccagatgtgctgatttgtcaacattttgcttgtttcaagacaaattgtacaaaaaaaaaaaaaaattttttttgattttttggcgtgggaaaattgatgttatcaattttatttaaacatagtctcgttcattaagttccggcatcccccttcctcccaaatagtgtaatgcaattatggcataatgcatcattaaactgtgatcaaacaataaacttaaaattttaattgctgacgttgtccaagtggtgtaccggtatttgcgccgcagaaacttgcgcctcggcctttgcgccgagacacttgcgcactatgggtactttccactgtgcagagaaaagcctagtactatctcgtcgtttctctttttctttgttctttctctcactctggcatactatctctccattttttaatagaaaaaacaacatttatttcgctctatacacctttttttcgccttacagattatcttcaaattttgcatagcgatagagaaaaaaattctgcatcgatttctatgtttattttntaattttatctgttagttcaaaagtaacaaaataaaacatacaaatgcatttctttttctctcgttttggcgtactattttcatgtctaacacatgaaaaacataaattcgcaaattctaataattttgattataagggtacaaaatcactttgagcatttagaatcaatagaaaaaaataaatttagcattttggttagaaagagctgcctaggacttgagttataacatgataaaagtttgaaactcccacaacttttttttgagatgacaaattacttaacattcgcttagaaaaagattctccttttcaaaatctttttttagataccaaatttgttcaatttgattgggtatgaagcgagttatggctgatcaaaataaactgcaaaaaaggcatttaccagtataaattttgaattagcgcgcaaaaaattacgccaattacgctatttggcgttatgagtaattttgtctgacactggggcgtacccatagtgctcatctaaacctatgttcgtattttagcctacaccgactcaaaaaacgagacatgtgtcaataaagagagagtgcagagaaaaaacaaatatcttttttgggtatatgagaaatatttgaagcccagattcaaaaaacaaattttaatcgcttatatcttttttcaaatgcttataattgcttaatatttgtttagaaaaagctggatccaggaaaaatacaggcctggatccaggtacaggccgatctctagtaaatacatattttttcctggcttctccttgctctaaatagcaggaaaaacactttcttttttgtgtttgcgaacaaaaaccgggacttttatttacatattttttcatatttcggggtttttatacatatttacatatttcgggattttcttacatatttggtacatattttggactttttcttacataatttcatttttttactattttgaggattttttacggaaatttttggaaatattcaaaaaaaaattcaaaatttcggcaaatatttttgtacatatntttcatttttttttacatatttttgaaattttataagaaaaataagtttgaaa

SEQ ID NO: 24551 - DNA, 2408 bp, Heterodera glycines
  unsure (1)..(2408): unsure at all n locations
ccatataaattcaaaaataataaaatnttgtcacaaaaaacttttttcttccgaaaacgttaaaaaaataataaactatatatgaccagcctaaattttattaaattcatacaaattatcttatttaaatattttatggattctatatgatttctccagtttaagaaaggaattctgccaacaaaaatgccgatacctcgtgttccatcatctatttaatttacaaaaataaaaatttatacccaacaaacatttatgttttaaaaagcaatatagtttataaggaaatgataaaataaaaatgaaaaatgccttcaagcaaaaacaaagatgtaaattataaacaaattaattaaaaaatttatctttactaacatattaattcaaacaaataatagcttaattttttaaaaatttagagaaaaatatatttttcaaagttaaaaattttaaaaaaagtaatttctaaatgaaaatattacattttttcattttattcaaatcgatgataattgaaaaaagtatttaacttttttctcaatttgcttttaactatgttataatatttaatagaaaaaatataataattcattttactgcaaggttttcaaaaataattgtttcataatacatcttctgactcagctgtacctggagtgcaaaataatttttcattaaaaaaactattatcatctaaagcgagatttaaaataaaaaaactttattgagcattcaaagtagtgaatagtgaagaaataataaaaagaaaataatgttaaatgaaaatgaaaatatatcgtattaaattaaattataaaaatatacaaacaataataatttgaaagaactttatatattatttatcatatatattacaaaaaaaaatacattgattttaacaaactaaagaataaaaaaattctggatatcaaagatggtaatcaataactttctgaaaaaaaacagataaatggttattatgcaaatcgaataaatacaagatgaaaatccttcaatattatcaaacagaaacgcaataaaataatacaataaatataacaaatattgcgaaagcatgtcatccgtttgatatattaaccatatttgtttatgcaaaagttatcttcatatcaatttattattaataatttttagctttccatctattgctttttaaaaatatttagccattttttagaggtgcccttaaaattgaggaaaaaattaatgaaccccacggggtctaataataaatcgtttaacgctacggtgcctggcttctcccgcccatccactggcgtctcctccccaagccattcccactgtcatcattcaacattctattctgctatcaggcagccggcatttcaatcagcttccatcaaattccccctccaaattcaattaatttatgaagtgctgatcatttcttccctcatttcatctctgtctcttgatcaaattgtcccctattttatttttgacttgccccaatttccattctgcctaaattccttatttaaatttagcaaaataagaggagccaagaagcaaaacctttttcaatattttttgtggatatcttcgaagtaactttaaaaatttaacaatacaaaattcatttaaactggaaaataccataataaaatttaattatttataaatgaaataaatataaaaaataaagtcttaatttaccatgaaattaagttcttaaccgtaaaatagcatactaatttctcaaaaacggggattcacgtgtatggccatcctacgaggataagtgaagcaaaagttagataaaaagattaatacttaaaccaaatgaataaatggatggtgaattttaaatgaacaaaaacaaaatactttattataaaaaagcttttgtaaatgtaggtatgtgcgagagtctcggttctcggtttccgactctggaaatttctcgggtttttcgcttcagagtctcgggtttttaatctcggaaaccgagaaatttttacactaaaattatcgggatttttaatctcgggtctcatatcgtttcccggggtcatttctcggttctcgtatcgtttctcgcgataattctaggtctaggtctcgtttatcggttcctgctaaaaatcacttctcgcacatcccaaatcaaatgacagtagattttcaactttctaatttctgttcattttggttaattaagataaatttgtaacaaaaaataattattttaaaaataaataatgagaaaacatattgaaaactcaaaatcctataaaaataaataaataatgaaaaatcatttttttatttaaaattaaatttacatcttaaatttgttgaaggagaaatttttgagaaaaaattaattatttcttttaaagccaattgttcttatggttgtgtgg

SEQ ID NO: 24552 - DNA, 2329 bp, Heterodera glycines
  unsure (1)..(2329): unsure at all n locations
taccgagaaaagcaaagatatttcaattgtattgaatgttgtctattttagtccataatttatttctagagctgtaaattgtatttaaaaaaaaatatatatatatataaaaatttcaagatatgcaagaatatgtatgacaaaaacccctaatatgtacataccaaaatatgtaaataaattttttttttgctttcataaaaaaattatttaaaaagagtgaataagaataaaatgccgtaaaaaatctctttttttaaaaatcggttttaaagctattttttcaaaataaattgaatttttcatgaaatttctataaatcacaaaaattttaaaataaaatccggaacattgctaagtaaataaaagtctctcaaactcaaccataaacattcttggcatcactcgataggcctaaaactctattagctcaccaaattccaaaaaaaaaaaaattggccaagtttgaacaaagttatggccaaaagtacacaagcaaccaggttttcacatctttttaaccataactttttgaaacctaactaaattttttgaaattttgcaggttgatagactgaaataggcgccataaataagcataaacaacccaaataataaataccaaagtaacaaagatcggaattagattttatggtccatcaagttcaggctgtttcctactactaaataccgaattggcacggcggctaaccgccggcttttccacgcgcttaagcttttctcgaagttgcgacatagcccgcgcggacttcgctgaccagctgctgctttcgcttttgacctgcttgctctcgaacaacttgctcatttccatatggatcattgtgtacagcagtgcggcacccactcgctcggcttgtgccattattttctttcgctttggcatttcccgccaaatttgttcctcttcaatttccaaaaattctctcctctgctcttcattgtacaacctttcccatctgtcgtactgatcatgatggaacaaacaactttgaaacaattttaagccatgcgcaccgccgccgtcactgtcgtcaaacattggtcgactggatttgctgctgctggcgcagctgctgcggttgtcctgggtgccagtgactgtttggcacattatttctggcacaattcgtgtttcgaaactgcaaaatcaaaccgataaaaaaaacgaaaaattttggaagggcatttttagaagaagaagtatacttaaattgcaatggaccgacccaattaaaacataaccattcagtttttagcaaaacttaaaaaagtttttcaaaataaaaaatgattaaattgttaatactattttagctaacgaattcaattttttaatataaatttaattttttttaatagttttttagggtgtctgtaattttttgatttttaacagattttttaagatcgataaggaatttgggtccgtcagtgctggaaaatttatctagtaaattttggaactaattaattttaagtgaaaaaccttatgttgtcaattgattctttnaacgaattccagaaaacattcggtttcttcttgaaattctttttcaaaaaattatgcacattcgtaaagccaattaacaaaatcagttctacaaaatttgacaaaatcatgtcaagtgtatctaaaattgacgtctttaagaaatattcatggcatcggattaattcggcatttgtttgctcatcgaacagctgatcgtcgttgccgttgatcagaaagcttgtttcaatcacttcattcaaagttttgatgctaaccgcagaaccgacaataacacaacgccaaactgtaacaatcgcaatatattgtataataaaataagtattaattaccgattagaaacattatgatggtcgtcgtgaaacagttcaaaaggacgtgcataataggatggaagaattataaaaataaatgctttatttatattatttattgaatagaatttttgtaaaagttttactaagaatttggtatttgaaataggtgaaatacagtttttaaggattacctgccatttacactgattaaaagaacgctttaagtaaatgttcagcttaactaaattcactaattttgaaaaattttaattataccctttttaaaaatgatgatgttgtataattattatttctttcataagggaaatatacatacatatagaaacagttataatttaattcccattttaaacaaatagaaattaaaagctacacgtaagcagtaaaatatttcatatttcgcctacgcttaaataacctaatgattttttaatcganttaatctttatgtcattat

SEQ ID NO: 24553 - DNA, 1548 bp, Heterodera glycines
  unsure (1)..(1548): unsure at all n locations
gaagagacggattccaancctcccggaggcgtatccaataagnncntaatataagttttatataacgtaatccaaatcttagacgatttggatttaattattcgaaacaaggaacgcatacgtaaatacgcattccttgttatttggttaatatgatcggaaaattgtaatttgttatcaatgattactcctaaatccctagttgtatccacagcatttattgtatttccatcaaatttatatgtttcttttgggttttttgaacccaaatataatacaaaagttttttgaattgaaacttttatttgccatttatttgcccattcgaataaattatgcaatgctttatgcataatttccgtgtcggctcttgctttataacaaatatataatttaacatcatcagcatataattttattttcactcctgatggcaaggcatcaggaagatcgttaatataaatcaaaaataataaagggcccaggacagagccctgggggacgccagaggtaacttttttacttgaggataaagaatccccaattttaactcgaaaagtcctattactcaaaaagccctttatccacattaaaagtttgccctttataccaattttttccaatttgtataaaagtaaattatggggcactgagtcaaatgctttttgaaaatcaatataaatacagtcaacattttttccatttataattgcctcgtaccaatcttccacaactgttattagttgacttgtcgtagacctatttctaacaaaaccaaattggtattccgaaattttattgttttttaggagaaagttgtaaatattttggctaagaattctttccataaccctgcaaagtgagcaggttatagaaataggcctataattttcaggattaaatttgtccccttttttgaaaagaggaaaaactattgattccttccagatatctggaagagaaccagagtctaatgaaatcctgaatagatcagtaataacagttgctaatgaagaatggcagtttttcaatattttatagctaatattatccggggaggtcccgtttttattcggaagttttttcaaaagtttttgtgtctctatgatgttaaggcctatatctgatataaagcattgattaacaacagtgttgcccaagcttaggtagcctgggtcaacttcagaattgttaaacgaatttgaaaataagttggcaaataattcaaatttttcatcaccactattatagcattttttttcaaaaactaaatttggtatttcaaaggcattaacatcgtatttctgtatgtatttaaaaatcgaattttttccctttgaaatagccttttttcaatttgagaatgaaatttatttgtttgtattttatgtgtaaactaatgctatcatatagtgttttttttgatgtatcagttttacattgcctatacagtctggctttctctttgatggatgcaattaaatgctttgaatatttagggtcatatcttttttggtaattcttttcattggaatacactcgtttaag

SEQ ID NO: 24554 - DNA, 1778 bp, Heterodera glycines
ccgaaggattcgatctccccataaatctgggcgcatcggttcggggggactgccccgaaaacaaaaaaatcgattttttcaagtgtccgtttggggtactcaaacatttatggggagcaaaaatccaacgcagaattaaagtacagactatagggaagctattcccgaaggattcggtctccccataaatctgggcgcatcggttcggggggactgccccgaaaacaaaaaaatcgattttttcaagtgtccgtttggggtactcaaacatttatggggagcaaaaatccaacgcagaattaaagtacagactatagggaagctattcccgaaggattcggtctccccataaatcaaccgatatgtattcgattcccgaaattttttggataaagcgtgccgcaacaaaagcggttttgaagaaaaaaaaactcgcaaaaataaggatgatgcattttttagctatttcttggacaaaaaaaatattttgtaattaattcatcataaaatttttcttacaattagattttttttgataaaattttgtgtctagggatggtgatgtgcctgctctcctacggtgccggactcgacgagcaggcggacgacagtgacaaaatgacggcactgcattttgcggtgtccaggcgcaacctgcagatcacgcgcttgctgctctgcctgggcgccgacccgaacgtggccaatgcgcacggggacacgccacggcatttggccgccaaattgaacgagtaaattttttttttggggggcggggaggttaataattcatttttgggcctaaattttcggtacttcgtgttttgctacccctcccccctcgagggcgggtagcaaacaaaggagtatcaaatttttgttattcttcacccaaataaaggaccccaaaagtccaactctcgtttttgtcctcttaaatatgtcaaaatttttcagggttgatttgctgaaaagtctgatcatatgcgatgctcggcgttgtccactcaccaaggtaacaagcacagattttgctatatatataaaaaaaaaatttttttctttgccttccaaaaattttttcatggtttcaaattgggtaaacacatccatctctcacgttttgtgaatccacaaatacgcatttttgtgttaaaaaaattcgtttttttccccgtattttaggttggctgtgtgtccggttgtgtcaacgagaagcagttgcacgagctgaagaggacgtccaccagttcaatgcaatcatccgccaccggcaacaccacttcaacatcttcgacggcatcgtcatcgtcgtcaagcagttcaacaacatcggcagtggcgtcggccaccgcagctgctgctgctgctacggcaccaccagctcaaccagcaacctcttcacaaccagcagcaggagcatcaacaacggcaccaaagccggccagctacacgtcggtgacggtggaggattttgagaaccgggcatttgacaaggaacatttccgcttcaacaaactgttggacattcagcacaatgtaaatagtttgttaagcctcttttcttggtggtgttgggaaacaacagatagcttctgattgagcgatatttcgccagaacagccgccttcccgcatttcaccgattcccgaagatgtcggagtatcgacgcgttggcaggatgaattcaacgaaatattcagggagcgggcaatgactgattggacactcggatccagagcggatgatcgtagagataataagggaagggaggggga

SEQ ID NO: 24555 - DNA, 2163 bp, Heterodera glycines
  unsure (1)..(2163): unsure at all n locations
attaaaaattcgaatttgtcaaaaactaaagaaattcatttttatttagctggttatttgcttgcacatcatcntgctgcatgttcggagcacaaactgtcgcaagtgttgacaacgaggtgactatagaagcataaaatttctaataaatatctaattaattgaaatatattttttattttacattttaattttttttaaatattttaaattgattaattttctcccccctttagaattggccaacaacgtggcgaccacacagcagcgccattcgtcggctgtatgagagcggtggcactgaatggggctgaaccggtcagcgctgacgatcaccagtgagttttcatggggccatggctttcgaaaatgcccaagacgtattgcaccgagatttttgttcacaaaccgagactaggcccctaaaataaatcggcatttcgttggcccctatagaatcggcattttgtggcccgtgtataatcggcatttttgccaacagtgttggacccgcgatatttttggcgatgccggcctgatccctcaattggcaccgacagagtttcccgaaatttgatttttttttccagagcgcgtgccatcaacgtccagccgggatgccacagacagcaacaatgcgtgccatcgtcatcattggccttgtctcgagacatgttgtcggcacagcagcagccctgtgccaatggtggagtgtgcgttgatctgtgggatcggtttatgtgccgttgtccgagaccatttttgccgccacgttgcgcggaacagccgcccgaggcaacgtttggccatggcgaccagccgtccaattgcgttgtgagacggaataaattttttaaaatttaaatttaaattttttggatttctggtcccgtgattcgggtatattttttgaaaaaataatccggattaggagttcgtcctgaaaaacaggatttttaatcctgaaaccatctaatttatagaatttttgccataaaaacctattaaaaatttcaaatttatgcatgttttggatcaatttttgaaactctgtcattagtaaagcttttctgggatgccaaaccgaaaaatttgttttttgaagctttaggcacatcccattttattttcccgaaaaaaaaaaacttaaaaattataatttatttttgatttcaattttttaaaatattctttcagtatgcgttgagcacggaggacaaacacgtggtggccgagaagacgcaaatcagtgtgagcaattaaaatgtttgttataatttgcgaaaaattgaaatttaatgggggcgggggtcagttacggtaccacaaagtgcacgacatactgtctcaaattcgcactaaaaaattcaatataacgataaattaatgattggttacggtacccatagtgccaggacctactgtctggaagttcatattacgaaattaatttaaatattttgtgccattttatagtctttaagtgatttatgtatttgattttgcatttcattttttcacaacaaaaaaatcccggattttatgttatttttggaattgatagaaatttgacaaaaaaaaaattttttttttgaattttagaaaatttattttgaaatatgaattagtctttttgtcccacagtttttgctgcgcacggctgaccatcggcacggtccaccatcctctccagcgcttccgggcacaatgccattgttttatattggcgaaacatttggcgcaggcgccagcaccggcgctgaaccggacaccagcacattcattgcggcacagctgcgcaatggtgtgccacaactgaacgcacggctgggcggaaaacaggcgcggaatttgttaccttttttaataaattttatacatccgccgccagtgggaatcgaacccacgaaatgcttcacccacactcaattaattccgactgagctacgtcggccgggttccggaaatttgaaattttttgaattttctataaattgcgtgtgacgccttaaatttttcttagtaccctaatagggccattttttttttgaatggtataaaataattttaatgcgggaatttaaatttttgtttttatcaaatttaattgaattttttccccanaattttagatttattcaattgatgcgcaagaacgggtgt

SEQ ID NO: 24556 - DNA, 1177 bp, Heterodera glycines
caagaaattggatgggctatatgtggttataaaaaacttttgggtatggaattattttttgaagtgagtcaaaccccttattagtgctttgctgtgccgagacccggcaggcaatggatagctttaaatctgcaagaaattagattggcaataagtggttgtaaaaaacttttgggtaatgaattattttttgaagtgagtcaaacaccctattagtgctttgctgtgccgagaaccggtatgcaatggatggctttcaatctgcaagaaattagattggcaatatgtggtagtaaaaccccactcggccgcttcgcggccgagtgagtactttaggctcaggaaaataattaactggggttcattatttatttattttttgcaaaattaattcataaatattttttagaacgtgctctgaaacgcaccaaatgttaattaaaagttaaacaaggctctctgatgctttttctatcaaaagggagatgaataaaatttttaaaaattttaattgctttttaaataagccaaaaagtttaggcttatattttaaaaagtttcatcgaacttagcgcactaaaatcgatataatctctccaaattttgcaggccttctccattgtaaaggactaacttaacctgaaaaaatgccaacgcttgttgtttttaaaatttttcgaaattctgactttttcattaattatttattattttgcaaaattaattcataaatattttttagaacgtgctctgaaacgcaccaaatgttaattaaaagttaaacaaggctctctgatgctttttctatcaaaagggagatgaataaaatttttaaaaatttttaattcctttttaaacaagccaaaaagtttaggcttatattttaaaaagtttcatcgaacttagcgcactaaaatcgatataatctctccaaattttgcaggccttctccattgtaaaggactaacttaacctgaaaaaatgccaacgcttgttgtttttaaaatttttcgaaattctgactttttcattaattatttattattttgcaaaattaattcataaatattttttagaacgtgctctgaaacgcaccaaatgttaattaaaagttaaataaggctctctgatgctttttctatcaaagggagatgaataaaatttttaaaaattttta

SEQ ID NO: 24557 - DNA, 1086 bp, Heterodera glycines
aatccaagacttaaaactggggagaagcaaggttcaaaaaaattttaagagaatttttgattattaatttgaagtcttgaatttatttgacaaatccaagacttaaaactgggagaagcaaggggctgtggctgggggcctaaaatttgggccacattggagaattaattctgatttctgaaaaagtcccagaaataactattttttctttccataccttcttgtagagctcgagctgctctttccaatggtcttatcccggtctcgatccgtgccgaactcacaaagttatggagtgaaatgtgaaatattgttttcaccacaaggcattttttctgaaaaccggattcaaaaatctggggtttggtataaccgttttagaaatagcgtagaaaacagcttcgatatcaagaaaccaagtcaagtccagaaaggaatattttaaaacgatttcgttttgttttggcattatgataccgaataactttcggaaattatggaaacaaaattggagaaattcgaataattttttgactgcaaatttttttccttttttgaattgggttcaaaaaaattttaagagaatttttgattattaatttgaagtcttgaatttatttgacaaatccaagacttaaaactgggagaagcaaggggctgtggctgggggcctaaaatttgggccacattggagaattaattctgatttctgaaaaagtcccagaaataactattttttctttccataccttcttgtagagctcgagctgctctttccaatggtcttatcccggtctcgatccgtgccgaactcacaaagttatggagtgaaatgtgaaatattgttttcaccacaaggcattttttctgaaaaccggattcaaaaatctggggtttggtataaccgttttagaaatagcgtagaaaacagcttcgatatcaagaaaccaagtcaagtccagaaaggaatattttaaacgatttcgttttgttttggcattatgataccgaataactttcggaaatatggaaacaaatttggagaaattcgaataattttttgactgcaaatttttttcctttttt

SEQ ID NO: 24558 - DNA, 1250 bp, Heterodera glycines
cgtttgagtaatgctcccgcaccagcggcgaaaagtggcgtttcgtttccaccggtggtgtacggcgtcattcgggtcgcagtgcgttagcaatgagtggtccatggatattttgtaccctggtgaaggcaccactaacgtgacgattccgttggcctcggcctcattcctgtgttttcgacgtttctttaagttgtcaagccgcatcggtaggacttttcattcgcggtttcaccgccacggtccggatgatctccactgatggcgctggttcgaccagttgtacttcttcctggtgtggtcttctgattggcgaaatggagtacggtaggcgccgtcggtttcttggaaactgcgagaccggtgatctcgaacgttctcttccttgcttccatctccgatcaggagaaatcgagtagttggggcgcttccgctttccgaactggtttggcattggccgctctccacggatttctgccacgatttccacttctccttcctcagtacgtatcggagatatggagtgtcgtctcgggtcactctgtgtggagttccgttccctttgagcagttggcgccttcttcaaccattccatccgttcggcatgcgtcttcattcttcgttcttcccaatcttttcgagtttcgcacttgtcttgctcctctgtctgtgcggtctttgtcttttctttcgcacgtttggcttccgcacgtgccacggccttgacatcctttctcatgaagcggttcttttcctgttgaatccgcttctccttcatttccgggttcctctgttcttggagttctcgtcgaaccacattcttccctccaattgctctgagcagagcttcaaggcctggccccgcaatgcttttccggttggtttgggtccggcgtttcgctttccctgttgactttgtcctttcttctcagggcctttctttcccttcgttttcgaacttgatggcttcgaacttgatggctggtcggccttcggctggccttgtggtcggaggctcgattccatggtaacttggatttccggattttggctttctgcttccgccattgcgacggcttacgtgtcatccactcggacactcgccacgatttgggccatttcacctctacctttttttgtaagtgaggagactatcacttccatgttgtacagctggttgatagccctttgaaaattttttccgtttcggatagtgttcgccacgcgaacaagtccatctctccccctta

SEQ ID NO: 24559 - DNA, 1277 bp, Heterodera glycines
ctgctattatgtggtgaccagcgcacaaatgaacgtgccgtgttcaccggtgacacgctgttcatcggcggttgtggtcgcttttttgagggcaccgccgagcaaatgcatcacgcgctcaacgaacgccttgccgctttgcccgacgaaacggtaattaacaaaaaatcgggccaatcataaaacactttcataaggtaattcgtgaaaaaaaaaaattttttttttctcagcctttagaaattgttttaaattttagatgttttcaattggtaatcggcagggaagttcccctcccccaccgaaatgaaattttttcgaattggcaattagaaaattttgtattataacctttaaaattgcaaaaaaaaaaaatttttttttaccggcggcacctagcggtaccatctgaccccaattttaccttacaaattcgttttttttaattttaaccccgaaatggcaatttttggcacaaaacaaatgcatattcctattttttcgacggtacaaaattcttcaaacattaaagttaaaaaaaaatttccaaactttttatacgtatatcaaaattcaatgttgttttagttggtttactgcggtcacgagtacacggtggcgaatctgcgcttcgcgcgtacgatggagccgtccaacgaagccatccatcaaaagttggactgggcacagggccaacgggaggccgaccgctggacggtgccgtccaccattggggaggagaagcggcacaacgtgttcatgcgtgtgcactgcagcgccgaggtgcagcaacggtgcggcaccggcaccgacccggtggcagcgatgggccgactgcgcgagttgaagaacgcgttcaaggaaaaatgatgatggaataatgacattttgtgtttgttcaatgacggatttttttttgtcctttccgtttaactaccactgctattttttgagcccatccacccacacatttccataacatattttgggcggataaaaatttacaatagccaatttaaaagtgaaacgataaattggaattttgcgcttttttttcttccactgctgtccttctattggctgctgctgccgatggggagagtagagagagagagtgaaaaggggagacgctaaaagtgggaaattgaagtgtgggccgaccgacagaggagagagaagcgagcgattggctgtctcccagccccaccaccactaattactatattttagggggggggggtgggttaataattttaaaaatttggactttcaaattt

SEQ ID NO: 24560 - DNA, 1324 bp, Heterodera glycines
attgagagaattggcgggagtttgaatgaaaaaagaggaataatcttaaaaattaaattttaattaatttgttttttcattttaattggcccacccattcgttggccattcttcgtcaagaagatcagtcgagtatccaagaaaatgccacatccgaccacgtcaccagtggaaaactccgatgatttgtatgccatttccacgtccgccgattgcattgccacgggggaaaatgacgaaccaaataatgacattggcattttgcacggccgattgatgccattacagccaaatgagccatcgcttcggtacccgtaactgttcaaaatttgaccaattgacccgtccaatggcacttccttcgtggcgaatccaatcgtgacaaaactgttaaaataaattcaaaattataaataaaacgctaagaaatcatcaaaatgaacaccttttcaatttgaacactttcatttcgaagtagaaaattccgggacgacaaaagttcgtaattggaaatttcgcaaaaacagagcgccatcctaattaagaaagtaattaattaattacattttttaatttttatattaaataccaaatctgttgcccttgcaattgatcgtcaattgcttttccccaatgatttcgatgtctttgtggcaaactttggcatcccagccattttgttgctgcgaattaggcacttcctgaaattaaatggcatttgtgaaataattaaggtttccttcccacctttgcaactttcgctgagacaaccgccggcggcgaatggtcgcccgatgacgtcactaaagcaactaaattagcaataaatacattttaaaaagaaaaattaattttttaacacctaaatatttataattagggctgtaaaaaatatgtacaaaaagtggtcatatatgtacataaatatgtaaaaaaaaatcccgaaatatgtacgaaaatatgtaaataaaattttttttaattgttattttttggaaaattttttttcataaagtgttaaataggcacaaaatgccataaaaatgaccaaaatgtttaaaatcaccttttaacatttaaaaattatttttggaggggtacattaaaaaaaaagattttttaattttttcacaagaaatttctaaaaattttcaaaaattctcagaatagctatgtaaaaaaatgaaaaatttgccgaaatttttggatttttttttgagaatttccaaaaatttccgtaaaaaatcctcaaatatgtaaaaaaatgaaaatatgtaagaaaaaagtccgaaatatgtaccaaatatgtataatcccgatataa

SEQ ID NO: 24561 - DNA, 2488 bp, Heterodera glycines
  unsure (1)..(2488): unsure at all n locations
cctccgccgttgggcccgggaaaaaagancagctcaaggtggccaccgatcgttctaataaatcaattaataaaaataatatagtgctaaaaaaaaactaagcaaatttatagatagttttcctttgttgtaaattttttaatttttctaaaaaagatattttaaaggaaatcaattaaataaataatttataaggcagggatgaacacggataccgcgcgatagggaattaaataggcacaaaaatgaaaaattggcagaaatttttaaagacagatttcttttcaattctattgcaaaaaaaaatattcattaaaaaaatttgttttaaaaaatgttttaaaaattaatgtgcatattttgtgtctttttcgtgcctaactcaatgaacaggagaatagaaaatcggcatttccttaataatacatataatgtcagccaaaatattcatgttttcttaatgttaatcaatttttccaaattttattgggcaattcaaaaaacagaaaatattttttcataattacaaaaaaaaacacctgtaaacaaaatgcggtcccggcccagtgacatattcttgtgcatttgaattcaaaatcagaacaccatgggcttttccgcttggctccaaaccaacgtaaaagggatgtacccctaaattttgtagattcaagaaatttacaaaaaaaaacattaccgtatccattgtatgagcccggtacataatattcatttccttgatcgcgtgaaaatgcactccacgttttatagatggaaaaatcatgctaaatttcaaatttaaaaattattattataacccatattttatttaactatttaatttcattggtcaaaatatgtttgttgcatactgtagttagttttaaaattcaggtgcatactgtaattacctttaattcatggtgcatattctcgcctaacccataaaggcgatcggatgacaaaaaagttgcaatttgtatgaattggtcaccaaaaacaaggccacctaaaaaagattttttaaaaaacaataatttttttttgttagttttaccaatcgatgtgtcccaaatgctttgtttgtttgaatcatttcgttgaattttaaatgagaaaggctcattggcattaccaagttcaaaactcagtgaatttgatgaaatcacttgttcaaaattggacggattgcgaagctcattcagtgggggaagccatctaaaattcaattttaaatttataattaaaaaatcttaaaaattgggaatcaatttataatttcgttttttgcacttctcatattaatttttttttaaaaatttgtataacaacaataattagtaataattttattatgttaattttaataatttaggcattccaagaattgttgatggatttttaaattgcttcaaataattgaaattgattttagtaataattaaaacaatatttaatctatttttatatattttatcattataataattttgcttgttcacctgtcttctgttccaatgcgcacataaattccatctcccattttttgatattgcacttcaatgtccaaatttggacgactgtacggattgttcagtgtgtttgatgtccatttcagtttcaaattgcccggcacgtttgactggattgtgtaacccttatttggcggataataacacattggcacggtcggattgtactgtaaacaattaattaatttgctatggattacataaaatggaataacacgacgcaaatgtttttagtactataatttccaaattttgcgatttgcttggcttaaaaaaggaaatggtacaatgataaaggtcaattagcttttttttgtcattattatgtgttgaatataaaaaaagttgttttaagaacaatttttagtgaaaaaactttgttaacaaaacaataaaatcacttaaaaacagttaagttaagcatcattgaaaatttaaataattttaaatgatggtcttaatttttcatttttttaaatatattttttaatttattacttcatcagattggccatcccatatacaccctgtttcaatgcagtcatcttttgagtttttatatgggctaaacattgaattataaagtacaataattattatgaaaaataaaaaaataaaaaatttcttcccaaatgagtcaaaaaacgaattgagaaatttctataaaattttgttgatttatgaattcattactttggcaaacagtcgacacgttggcccgggtcgacaacggcatcacttaaaatgatggactcgcagagcagaaaaaataataaaaacatttaatatttttgctttatataaaaaatatatataatattatattataaaaaataataaaattaaaaaactaaaaaataatgtaaatttacgattactttattatgtcggaattaaatagttcttaattatatctttcttaaatatttctctgtacaacgaaattaaatgtaaaa

SEQ ID NO: 24562 - DNA, 937 bp, Heterodera glycines
tgttgaaagattgttaaactaatttatccgcgggccttttgtacattaacttgtattctttccgttttttactttcttttaaatattttattttaaactttcagctcataaattatgtaatgaatttttatgtccgccatcatttatttaatgattttcttataaaataaatgtaccatccggtcggaaactagtcgtttttcaattcattagatacttttttttgtaaatatgctcagcagcatttttaattttttaacattcagtgatttgaaaatccatttgggtcacggttttaccatttctagattttattacatttaaattttttggattattcttcttttttttatatttacctcttttaccgatgaaaagaagtttttttcacatagataactgttttaaatgttttaatttggcccttttttagattaaaatttatttttgtaacaattataatttcgtttaaatttcaagccttaagtgtaatgtttaaactatacgtaatatttgtttcttataaatttagtttatttaggtttatttctgaattactagtttaattttgataattataataaccaaattttttcaccaatcgataatcattttataatctgacaaaaaaaatattgaaatattcttttttggaaaaatcgacaatttgattctatgcaaataaatttctgttatcccgttaaattttttatgtattatttggttataataaaatcatagaaaccgttttaaaggcgaagggttattttttcatacatttttaaaataatttaaaaatataggacttttggtgtcagtttggcagcaaaccatggtcgaaaagcacaattcgttggttgggattttggtatcggttatgacaccgacgtcgaaatcataggttttttcctatctaaatatatatttaaaaattttt

SEQ ID NO: 24563 - DNA, 1816 bp, Heterodera glycines
gcagttcgtacaataaaattttttacaaaataaagcctaagcctaagcttaggcctaaacccaagcaagcctaagcttaggcctaagcctaggctcaaggcttaatccgaaagcttatgcttattttaagcctttataaaaactgcctattgtacgaactgcctttgtacgaattgacatgaccccatagggagagataaggggcgggagggagggatgagacagcttagacgatctgtcggattggggaagggccgctttaaagtgccatctccgttttctcgagttaatgttcaataagccgaactgacaaatgaattcccaggaagggagcagttggaagcacgcagaccaaattgtgacgctgccggacactttggcacctcacgcgatggattcactgatggcattggtccaccccggacataatgacgaacatccggtgagaaagtcgcatctgaacgagcggagcagcggccttcgaatgaccaatgttcagctgattttgcatattggtgggcaaaattaaagagacccaattagggattaaacgataaaaagcaattaggggacatagcgtacgatatgcacgagtaccgtatgaagcaaaagattaggcaggaggacgaagatgaagtgtacaatttgggagatcgctttatgcaagtcgttgaggacattgcggcttatgtgccttatatggtgaaaaattggaaaataaaaaacatttacaagaatattgtaattatgttgaaaaggttgttgcgggaaaccacgaaaatgaggagaaatcggccgattatcacaagaagcgccgggaaatgcagaacgccgaaggatatgagccgcagtacgaacattacgaaagcagattcaaaatgccacgcaatttcaaagggcacgacacaagccaatattacgagtaaaaggggggggaaggcaatcaaaagtgggaaatggcacttctttagcttcacctacggcccaatttggttcatttgcgtgtccacagaatattactattcgtacgctgtcaaatcgcccactttccgttgggtgccggattgggaaaatgtgagaaaacaatacgaattcatcgaacacagtctcaaggcaataatcgggactcatttaaattaaagcaataaaataaacattgacagaaagccaacaaaaatcggcacaaaaatccgtgggtaattgcactgctgcaccgccccttttactgcacctccataaacaaagttacgtgccgtttcaacaaatcggtaggactatgaagtggttttaacggtgataggtccgtttcataaaaagttgccatcgttggcgtttcacagaaaatgccacatttgacgtttagtaaaaagtgccacattcggcgtctctcctaaaccgaaaaaaagtatcaatgaacctaaaatttgattaaagatatggctgcttgcagtgaaaattttactttaaaatgcgcgattcgtgatgacattcttatcaaatgctaatttctgtgatgattaatcacactccgattaatattttgctaattatttcggtaattagtttccgcttttgctcattgtcagcacaaacacggtctccccacggaagatgacccgaaaaagtttgtgtacggattggaggagttgttcaacaagtacaatgtcgacttcgtcattacgggccatgagcacatttttgagttttttccgcccattgaattgttcgacggaatgccaaaagttgtaccggacaaattttggtgtgagcacgcaaaatgaaaaaatagaatttgaaaacttaggtgaaagtgcag

SEQ ID NO: 24564 - DNA, 1745 bp, Heterodera glycines
tttatttttcgttaactaatgaaatattatttttaagtttttggcctcgccaggagctcaggtccaagaaaaggatcgggcctagagtcccggaaaatgggatttttagtcccgggaatcccgatccatcgtcaaatcccggtcttagtccagttcaatttagaagcgagtttagcaaataaaaatgcgctgccgtcgtggccacaaatttttgtttctgcgattttgttcttcggttccttgtcaggggaatcagcgatctgttgattattctcaaaggccattacgtccacttcttaaatatgtgccaggtcataataatattcttaatttaattaaattggattaatatttttaatttaatttggattttagaaaaaattcgaaattttgccataattgctcacgttgaccatggttcgaatctttgaattttgctattcaatcgcacaaactatctattgaaggaaagagtactttggctgatcgctttctgcagttaaccaacgtgatttctaccgaatctgatgcccaatacctcgacaaacttgaggtcgagcgcgaaagagggatcaccgtaagtaaatgaacggctaatttatagaggtggccactcgaataaaaagtcaaaatcatttttcaaaattcacatttatgttcgaatctacatcgaaaacattgagagatttttttagatcaaagctcaaacttgctccatgttccataaggtaaagaaagatatgcgtatttcatttttatattttatttacatttaaggattttatgctcaatttggtgtaagttgaagactgcttgccttgccttttgtcgtctaatcagccattcattcgtatcgcggtcataatgggtttttaagcgaaccaattgggtaaatggtatcatttgattggcttatgaacaactttagaaattacaattactacctaattattagtattagcaaatcagtaaagaaaattaatgaatggaatggcagttagatgataaaaattatcggacacttttttttcacatttaagcgatactcctggccatgttgactttgggtcggttagtactttgattttcatttatttttgtttttttagcttcgaggttaaacgttctctcataacctgcgacggagcaattttgctagttgctgctaatgaagtgatgaaaataaaacattttctctaattttacaattttagggtatccaagcgcagacccttttcaattttcattcagcctttgagaataatttgagcatcattccagtcatcaataaaatagacatgaaggcaaatattgccaaagttgaggaagaattacaacaatcgtttgggtttcatgccgtcgaaatttttaaagtgtctgcaaagacgggaagaaatgtaccgaaacttttggaggcaattattcagaggtagaatggggggggaaagtgatgggtatgttgcgggcggtgggtggacggacactttggacacgcagcgcccccgaggggacgagcgcgggcgggacgagggagaaaaagcgtcggctgtcagaaagatcggccatggactggtaggagatgaacgaggatgaaaaaagcggctgtcatcaaagaaagggaaagctagcggatgaaaaagtgtggggtgaccgaccaccagggatcgcacggaattccggtttcagatttccgaaatttttgataaaaggtcggaaattttcggaaatttttttgaatttttttt

SEQ ID NO: 24565 - DNA, 1791 bp, Heterodera glycines
tgttttttagacttagctcatcaagagctttcgaatgataccaaatttgtccgaatttgggcgttttaaaaggtcaggagccccccttttcactcaaattttcgagttttaaaccggttttttggcatttccgcaactggagacttactttttcgtgcatagctcgtcgagacgaatcgattgttatatcatttatgtcattttttccggggggttgactacagtacaccccaaaaaaaacccgctaaacaagtaccaacttctgaaattgaaataggcaatcaattttccagtcttctttgcaacgacataaatgttttctcatttatcacaccacacaatacatatgaacaattgatacaaattttgaataatgtgaataatggaacatcattgtgcttaggaattcaaccttatatacagacagacatggaacaaaatgcctaacattacaatacatatgacattatggggcctaagattcacacatctgacatcggacggcatcgtcacaggctgttcacgctcccacaagacgattcatccgcaatgcgaccgctgctgcgactgctgcgcctcgtccacttccgtcctcgctgagcaccatgaagaactgaaattaggggaaaattaatcattccgaaatgatattagaacttgaaactcacttcgcatttgacggccaacagcgccttgatcttctggtccaggttgaatttgaaggtcgggtggaagcggaacacggagccgtcgacgccgatcgtcacgcggggcctctgcatgcggttgaggatggcggcaagcccacaggcacagagatgggcggcgcgcgtgccaatcaacgagctgacgtaggcgacatttgcacagtcggcggccgatgagttcgaaatgcctgaaatgggatattgggatgttgaatgactaaaaatgatcaaatgacaactcaccaatggcacgcagcatctcgccgactttggcgaatgggttcccgtcggtgctgtgcataaacctgcaaatgaagtgaaattaagcaattttttagaacaaacagttttacccttcgatgtcggacaccatcttggtggagatgcagccgcgttcagaaattcgagtgaagtcgccgctgaacaataggccgcgacgtgccaagtcctccagcgcaagacggacgatctcaccctgaaaattctttttaacataaattgttgttcaatttgaaaactttcccaccatgtacatgccggagatggtcttctcgaagcgttgtcggccggggttgaggctctgctggtccaactgctggtcgtagatggtgaggaattggtccagtgcgccgtcgtcgccgaatcctccccattccgtgttgacgcacatctccgccggcagaccatctgaaattgtttcaaaaattagtgccttttacggccacccttcacctcccatttctaccttccgcggagttgacaattcccttgagtttcggcacattctccagtcgctccatgtatgcggcattgcagcctgaaaagaaaaaataggggatttaaatgaaaatcaacaaaaaattagttttcttacccgtcccgacaatgaccccgacgtagcagtgttgttcaatgaaggagcaggcgagcatcgtccccgtggtgtcgttgagcagtgcgaccacgtcgatgtccacgtcgcctcgtcgcttgaacgcgtcgcgcagcatgtggacgacgttctccccaacaacgccagaagcctgaaaaaaagggagtttagaaaatattcagaaatcaattt

SEQ ID NO: 24566 - DNA, 476 bp, Heterodera glycines
taccatcgcggcaaattaccaggcccacaacagtggtattttggaggagttgagcgtggcagtggacgttgcttcatcgtgccagtggaaagaagagatgccgacacgttggtgccactcatttacacgcattacgtggtgaaccactcggagcacttcaaggatcctgtcagtgggcagcatacaaacacaatagaatcgacgtggcagaagttcaagcaggaacacaaaacgagatttggcagtcacagatcacttttttccacatacatttctgattttttgtggcgtaagcactttggaggaccggacattttttataatttgtggacccaaatcgcggaattgtacccaataagcacgtaaatctccttttatttgttatttaaagcaatttcgacaataaaaaaaaaaaaaaaaattttgaaaaaatttgacccaaaagtaggatacaaacgcaatgagtaccctgatca

SEQ ID NO: 24567 - DNA, 1192 bp, Heterodera glycines
  unsure (1)..(1192): unsure at all n locations
tgtttcggtgttcggtgaaggggcgaagtgtccgtgcgtcgaaatgctttcaaaggggcgaatttgttgtggagtacaaaggttttccgggcaaaaaaaaatgcatttttatttccaagttttttgttcatttaggcgacttaatcagtgtgaagacggcccaactccgcgaacaacggtatgccaaagatgagaacgtgggctccttcatgtactactttcggcaccgggacaatggtacggattggatcatttgtttttggagtcgatatttcgaacaatttcgaagtcgaacctaaattgttacgggtccaaatttgagacactacctttgtttcaaaattttagggtagtttaggccgatccattatgaattttaaaccgattttggacatgggcacaagtcatattttgtgtaaacatcaaaacaaattttagtgttttgtatcgacgcgaccgatgaaacgccgtacaaaggccgactgatcaaccacagctatttgaagcccaacctcaagacgagggtattcataatcgggcggacatgtttaataccccgatagtttcttaatccgctccatgaactccatattttcttcccaattcgctattttgccaggtggccgacttcggctgtgacggcttccatttggtgctcgtcgccatgcgcgacattgacaacggcgaggagttgttgtacgactacggggagcggcggccctccgtgctggcggttaacccgtggattttgggctcataggtggcgagcagtgtgcctctatttattcttttcattcactactcttttttctttcctttccttttgtccttttttgaaacgttgatgatactcattcactcactcatgtcattaattcatcatcattttgttgtttaatgtataatatggttgagtgcccttttttctgcctggcatttccctaccaatttatgaaccaaatttttatcggaagtatattccctgggtttaagttcgaatttttccatggccaagattagggttcatttttgaacaattccctgggttagaattgacgattcctctcgaaaagcatattttatatttanatataaaattcgatattaggccagaaaagggactctccctccatttgtcttatttcatctcactcctttttatgttttatttaacacatgtnctttcggacgc

SEQ ID NO: 24568 - DNA, 1881 bp, Heterodera glycines
ttctttttttgaaatttaacgaaaatatttttcggcacgctttaaaattggcacactcaaattttgaattgttcagaaaggctaccgacggatcacacttcgttacccgaggggcaagttttgatcacaggggatggatgagcctctaaataaaacaaaaaaaaaggcgtcaattattttgccaattttttttaatgtccgaataatggggccaggaaaattaactttgtgaaaatttaaaaactttccatttttttcaagaatacgtcacaattggacgcgttccacgacgaaattacagtgtcggaaatttgtaagggctcatggaatcagagaaattatatttattttttatgtattattcaattagcgaatttactaaaaatgaaaataaatcatacggtggttattttgtttaagaatacggtactttttaaattttaagaaataaattttaatttgttgcttttttacaggaatttggtgctccaatatccaaatgaagctcacatcgacgagctcaaaggcatttgaatgaatgaggaattttttgaaaaaaaaacgatggaaccgttaattgacaaacaattgaaatgcgtaaaaaacagcttgggaataaatgaaaattttatttgattataattccttaccgtcgattcattttgactttttcccaattaattaatgatacaaaatgcagaataaatacttaattgtcttgaaatacgccatttattttttggcaatttttttcttttttttaccgtccatgatgaatatatgtataagctgaattcacatacagaaaaaaatacaatggaaatggacgcatttgcgagcaagcaaaggtcaaataaatacatacagacaaattggacacaatacaataatacaatattgaaatggcaaagtgcacacatcatttaggttacataatcgcaccaattaaccatcaattaattcatttctgcttctgttgctgatcagtgatcactcggcccgggagaagcggcgtcgagaagactgaaaagaaacgatgattctattgaactttaagccaattcaacaactattataagtccaaccaactaactacttaaccatccctttttttctaccataattctgtccattaaccgtacattttttggtaacatttgaaagcacaaagtctaattgtaagcaaaaatggtgattggactcatatgtaaaatcattttaaaattgttttgttcacccgtcgtcgtatccgccatcttcgatccaaatgtcaattgagttcgttcgagcatcactcaattcgttcaatacattgtcccatttcctctcatcccatccaattggacaacggtcgagccaaaaaccaccttcatattcttcaagtgtcaattgctccccagtcgcttggttgatcagatcaaattccacaacgaagtcaagcggagaagacgacggaaagtgaatgcgaaaagtagccggagaagaagcattggaaaatgcctaaaaaatgggacaaaaaatcatcgaaaacccaattaaatagggataatccaccgttttgaattgttccatcgttgacgtccattgctcctcctccattgaattaacagagcatttgaaccgcttcggcacaccgttcggatggggcgtcaacaaccatttggccaccgcttgaccatccgacgccatggcactgtcatcgggcggaaaagcgggcacaatgtcgttatttgacacggcaacacagaagagagatggacaatcgctgagcattgacggggccaattgacggaaacggcgaaaaatgaaggcgttcaaaaacagaaaacgaatggaatcgcgaaacattggccaaatgtggagcaaaaagtagtccaaaat

SEQ ID NO: 24569 - DNA, 1510 bp, Heterodera glycines
taatcttacttcctgtaattaacggattgggcaaatgcataagaagtttgaggccttcaagttttgccaatacgggaccccaacatttactatgccagacttttaattagtttccagcttttacgactcactttttgagtagggtccggaattgttctctgttatcacattttattttacaacattttcagctcaacgacatcggtctgtaccacgacagcgcaccgcaccggtccatgtgggagctgaagccggagtaccgcaactacagcaaacagttggccaagaatgtggagcaaaaaatgcagcaacaacagcagaaggacggatgatggcgagaaatgttcataaaatgcaatggaaaatgaatggatttttttaaatttggacgggttcatttgcacgaaaaagtgttgcctaaaatggatggaacgagggcgagaaaacagcactaaaaatatttaattaaattcaaaattcaaaaaattgacatggagaagagagaagcattggttaatttcacccattttacaataattatagctaattttttgtgggtcccaaaaaccattttcttattaaattccacaagttaacattcttaaaaaaataatcctcttcattcaggcgagcaacacttttaagtgttaatccaacaacattatgatttgctattgtgcatattgactataaaatcggaaagattgcattttttttaattttaaatgtttaaatttcgagtgttttcaataattatttttatttataattttattttgtatgattatataaattccatttgcgttggtttcccgttgaatgtcatttgttgtgccaccaatttttgccattttttcctccccaaatgttttctctgttccgcggggcgtacggcgaaatgacgcgcaaagaggaatattttgtcgcactgttcggcttggacggtgcaggaaaaacggtgtttgcttaaataattatgtaaaaattccttatttttggatggcattttccacaaaaaagtgatacgtgccggccgtatttataaaaaggaatacaaatttaattaaaaaattaacaatgggccaccaaattcagcgtcgatttaaatgcctatttctaaaatctttcctaacaatttttccattggattaggcttatgttgagcgactgaaagcgcactttgaccggcactaccggtgccggaatttggccaaactgtcctccaccgtcgggctgaatcgtaagtttttacattttgccaaaatttacatgttttgtaaccgatttgccattttgttcacagatgtccgtgtccctctcgctggtgccgtgctcaatgtgtgggacctcggcggtcaggcggaactccgtcccctgtggcactcttatttggcggaatgccatgccctcatttttgtggtcgactcgtctgatgtgcagcggttgcccgaagtgtgcagcgcattgggtgggggcactgaaaaagcgaaaaaatggggggggggggggg

SEQ ID NO: 24570 - DNA, 1212 bp, Heterodera glycines
  unsure (1)..(1212): unsure at all n locations
tttttttgccattaaaatgcattaaaaatgtcatttgttaggcattttttggccttatcacgggangatcggaaacaaactgaatcctgactgagatggtggtcagaagtaaatttttgtgaaaaccctttttttgttcttcgtttgagaaaatgtttcagatatttattgccgacaatttcatggatttttattcaaaactctcgaagagctaaaacaactattggttcctagatttgagctatggcgtctttttcgcaaaaaaatatccggtctttatttttttttacaagatactgatcgactacttaccgtacaccatggtaacatcgttgacagccaaaaacacggtgatgatccctaccaaccaatagcacatggcattaccaatgacaaccgtcatgatttgctaaaaatttaaatcccaaattactttgtttattttaaaataataaaaataattggctttggtttggataaaaatatgcttttgctgttgaatgtaattttttgcataatttatttgtggtaaataaatcattttcacaacaaaatgagcgccaccgatgataaaatcaaaccaccacattcactcttttgtgcaagctttaatagagcccatcaacagcagaagtgattcatcgtcggttttagcgtatgaatcgaataaaaattatggaaaaataaaaatatatatataaaaatgatatagattattatatttttttaattaaattattattatggggagacggccaaattgaagggatacaagttggtttgaattttcttaacctaaattaattgttttttattccgtaaacaccaacttcatcaaaaaacaaaaagattttcgtaaaaatttgaattttagattttttgacagagatttttgaaaaagccatcgtactctatctgtaaaaattcatgaaaaataattttaatcagagtctttttcaaaaatatattttttattatttatttgtttattatgattcatttaattggtccttttccatgtatttgtgcagcccaaatgatggtggtaaagacgtcaacaaaagggataaaattaaattagtaatttaacacaaaataatttaatatttattaatttatttggttgtgttggttactgtacaacaagttcacctgttttgacgaatgaaaagacaataaattaacacctgcccactcattaaggccttttag

SEQ ID NO: 24571 - DNA, 1736 bp, Heterodera glycines
ctccgtatgccatcaattggtgctccgttcggctaattggcaaatttcgcccaaattggagcagagcatttactggaacgttgaccgaatttttgtggacctcaattggagccagaacagatcctgcccaaaccccgaagtgatccaagtgcaacacacgccaatgcccagcaaagagaaagtggggacaaaaagagacggacgaattgaccttttaattctgttaaaggcaatcgaataccttcgtcatatcctcgacaattcgtttcgcatccgtcgtttggacctgaacatccaagtctcaaccgaattggtggtcaatgacattttggacgttttgaatggccatggtgaggagttattttgtagcattgttaatgataaacctttattctttttagctaaagtacaacttgaagaactgttcgtccgacgtcgttatgtgggcagcaaattctccggtctcgtgccgctcattcggtcgaatgccaaaacgttgaaacaaattggcaaaattggtttgggcgaggctatcaaagcactcagtgacgaggtgagtcacttttacagtatttgtacaatcctatcccattttgtgccgtttcagatccacctcgaacgtctctcgttaatcaacttcgacctggtcgaacaagaccagcgtttggacagcgaagaattggcccaaaactcgcgcttttacattcgtcggttggctggcattggcaccacctttgaccacttgtcctacacttgtttcaccggtttcgagatcaccaaaatgccagccctcaacatgctccgtcagtgcaaggtgtgccattcaaaatcaacatttgctgtaacggcaattcttttgatgccatttgcaggtcaaaagtcttcgtctgacgatgcaaagcggcgtggccatcaaagacccggaactccctcgcccgctgttgccgatgatgcagcgaattcaattggtcggcggaatggacgcgtcgtcggagagactgtcgttgctgtttcccgccctggaggagctcgaaattgaaaagcaggacctgatcactggccaccgactggaaaagcgagcgcgcgtcctctccaattacgcgcccgactttgtcggtgacgcatataattctgtcgcggccgcttgctgaaccatcggtggacgacgtaaagccatggaagacggagaagcgagcacattcctttcttttgacatttctttgtcagtatcgttccattgatcttattcattcgttacattatatgctcatttaactgtaaaatcaggacatgatcttcaccatccgtttgatatgtatgttttttaaatcattttccttttgacaaataaatcgaaaaaaattatgaaccaataaagttgcagtgttttaagactctcaaagttctttctggagaaaaagtacaatggggtcgggctaacagtgagaaatcgctaccagtaaattgtgcggctctattgcagttcacacaaccattaaaaaaagatacggcaataataagtctaacaaactaatggaccataagaacgtccaaattctgttttcacaatcctcttactttccacaattgccaattttcattagacctctgtgtttgctgggcctcaacatctccaaaaaaaagaaaaattttgtattgtcgactaacgttattcttttcctacaatatttgtttactttttctctgctggtttgtgagtaaagaaatagtgacaa

SEQ ID NO: 24572 - DNA, 1112 bp, Heterodera glycines
ggggggggggggggtccggcggtgaagacaggcgccgctggagaaaactttgaatttaatgaatttaaaaaaagcgaggcgcgtgaggggaagggaagtggcttttttacgtaagattccaaatcactcctccgaagaccaacccaaggcaatgcccgctttctcagcagctgctcgctgttcactgtagtcatacccctcgaacatgtacagcgttcttccctccgcttcatcttctatttgctcatcctcaatgttttctttgtcgtcgccctgtcaaaaagtaaaattatcaaaaaataaataaataaaatatggccaacctttatttgccaatgtccgttttggtcggttcgacccaaccgctcttcaagctgtttgtcggtcagaatgtgaaactgtgtgtgcttcttctgctctttctccaggtcggtgagcccctctagcaacagtttggacaggtcaaacattagtgaagggcctgaaaatattttgaaaaaaaaacctaggaacaagaaatactcgaaaaccttccttttcgtcggttcccaagacattctcggacagcttcagcttctttgcggctctctgctttatcagctcctccaccgtatgttttgccacgagacgaatgattttaacaggtctaaatcgaaaaatggagaagggatccgaagaatttttgttctttatgagggaatctaaaggttttgttacagagttttgagaaaaaaaaagtcaaacatttttgattaaaaaaatttatttattttttgtataaataaaaaaaaataaatataagacccacttgtcctgcccgatgcggtggcatcgtgcagccgcttgtttgtcgttctgcggattgaagtcccaatcgagaaaaatagcagtgtctgcggcggttaaattcagaccaagaccacccgctttggttgtcagaagaaaagcgaacacgtccgaatcaggccgttgaaagttttgaatggctttctgacgatccggttgactaacggttccatccaattgctcacagatgtatcctgtgcaaaaatgaaagtttaaatgcttattgtaatgtaaagaaaattggagcctggaaaggcaacatccaa

SEQ ID NO: 24573 - DNA, 2406 bp, Heterodera glycines
  unsure (1)..(2406): unsure at all n locations
tcatattaaataaattttttattgaaataataaaaagttttttgaaaagtgaggaaatgtcactatatataaaatgctaaataaaaataattaaactgttttaaaactctatagaaaaatgaataattaagaagataaatttctttaaaatatttaatcataaattaacaagttttcttcaaatgattataaaaatgatatttccaacattagcatagcaaaataaaagaaacataccaaaaataattctaaagagaaataggaaaaaacaaataagatttattatcatttaaaataaatatcaaataaaaactatttaaatttgacaaaaaaaataaaagaaattaatatattatgtatctatgaagtaatattaatatatctatttaaaagaatagtaatttaaacaaatgacaagcgagatttaaaattaaaaaggctgctaaaaatagaatttaaagttaaaataaaatacataattatttttatctttgttacaattaaccatagctaaactgtttattccaattaatattcaaatggacaaataaaattttttttaaaatgtgaaaaattattcaaaaaacgaaataaagggcataaagtgatcagattatcacttttcataattattttaaaaattttagagagatttttcagcaaccgaaaaaattttaattgcattttcaaattgatttaaataaataaatattaaatttatttttaagattcaacaaatggaggaataaataataaaacataaaaaaggaaaaagtaaagaaataaaacaaagttgttaaaggaagttttaaagttcaacattccaagaaattaaccaattanaattttataagatataataaataattgaaaatatatttaattatttacagtgaaaattatttatgcataattttaataattgacagcaatatttgtgataaaattgatttaatgcattaacttaaagcaataaagtcttaaataaatctattttttgttctattaattaaccaatggaggtaaaagttaattgaatttgtaattttaacataaagttattactttaattcttaaaactaaatccctaaaattttggacaagcttcctaatattgttatgaattaacgaaaaattttaaaaataattagttaaaacagcgtaaatgattaaaaccaaatcgaattttaatgaaataataaacaaaaaattacacatataatcgtcacagtaaattgtcactaatgcgtgagatcagacacgaattttaagaaaataagaaaattaaaataaattatagcttcattaaaaatattcatttaaaaataaaattaacaatattgtaaaataaattaatgtaaaaaggaaaataaaatttgatgaagattaatatatatttataaattgtacaaaatgatttactaaataatttatgaataaaaggaatgcaaaaagtaagaaaaataaaaactaactttcttaaagaaatataaaatgttcgggttttgtaattaacggttggggaggaaccctaacttaaagtctttttaaatttgttaggaaacgattgtcacggtttcggtaatgagattttcgtccatataacttttaattctattttgaattattaaaatcgtgcttaaatccatagaatttcaatttttaaatattctattctattcaattgggaggaaaacgagaaattttcagtttttttcagccctttactagacataaaaccaccggagaaaaccctgctctgaatatatatatatattggagaggcaaccaaaattcttttagaggcagacaatttggaggatacgtgcaaaggaatccaaattttattccattgggacaaaatcggacttggaatgggaattttggaaataatacggggagatttgagaatttccgacctcaaaggggaaattttgggaatttccgagggaattcaagaggaagaggaagtgaaaggcaaaaatacaaaataaatgccatttcggatgaggcggctcagccttcggtatccaactcccgaaggtccctgaccccgacaatgacatttttgacaatttcaatgattctgtgctcatttttcgggactatttctggtcaataccaattatgttctgatcgagttcccaccacacccatttggttaccaaacgtaacagaatgttcagtaccggagtaccaaaaagctgacgagagaaaagttacactttttttagctgttcgaatgccaaagcaattcccagtttataactgctatcagaaaatgatgaaaatttgtacgggaaattttctttttttctggaaagacataaaaagtcaggattcgtacgtgaagggagtaagtcaccgagcttgtcatggatttaaaaataacatgggacatacaat

SEQ ID NO: 24574 - DNA, 1561 bp, Heterodera glycines
ttttatgtgcatatttcacgatttttggtgcatattttatgcgcatattttgcgattttatgtgcatatttttgccaactctattaataaatatgacgataatcattttttgatacttttttgtgaaaatttttggttttagctaaaatttcttaacaaaaatgcaataaaaacaaaatgatctaactttttttcttcaaaaacattcatcattaatattgatttgttcaaaaaaaaatttgaccaaaaatttacacacgcctaaatttgtggctatttttagataattttctattttcgcgcatatttttgtgcttttatttgacggttttctaaatttaaaatatctaaatatggataacaatttttaaaattgataaaaaatagtcaaaactactatttgggctgaaccatccaataggtagaaacgcgataatggctagcaaaatatatatcaatcggttccttttgcatttcaattacgaatccgaaagaattttcggacaaaaaggaattgacaaaaggaattgtcaacgaaaaccttcgcaaatgaatttgataaaaaaatttaggtgagccaaaaacactcaaaatcacttgaagattttgaactatgtaaaaagcaaattaaataaatccttataaaagcttttggctcgcctaaattattattttttatcaaagtaattttcggaggtttttgaggataagtcagtttgattttgtcagaaaattctttcgggtgcgtaattgaaatgctgggagaaattgtttgataagtaatttgttgatcatttatgcgtctttattgttttttcttcttttttaatgtttggtttttcctttctttattaataattttttgcttgaaactttctttttgccgacccattatttatttatttaatgtaatcactgattttgactttcttcagtccccgtgaaaatcgtatagaattttacaacatgatggccaataaaatttttaaaaataccgttttataaagcgataacgcatagaatttccaaaaattttcattttaaatctgtaagcaagatttagaaagataattatcaaggattatcctaagattttaaagatttaactgactatcattgagattactgtaaaggttttaagcagggtttttaaaggctcaacacagcagcgcttgttctgaacttttttcggttcatattaaaatccaaaaaaaatttaaaaatgcaactatcttagcaccatcctttttctacgcattttttttataaaactttattcaaaaaaagaaaaagtggacgccccggacggtgtgaatgagtacgagtgcgaaatacaacaaccgcatccgggtgcggaggaagaacaagtggaagatgggaaacattggaaacacaaaatttatttttatttatcgagcaaaccaaagtgtacattagtgctcttacagggtgcgaatgagaaacaaagtggtcggtgccaaacagtggcgccgggatatccttcgccccaacaattcattagtaataacctccctcccgacattatcttcagggccttcgt

SEQ ID NO: 24575 - DNA, 740 bp, Heterodera glycines
caaacattttataagtaaatcaattccgtaaatttccttttatttgaaagtttcattttatgaagctattgttaagccttaagaacaattataaaaatcacaatttaaatgaaaagtattttaaaaaatcagaattataaggtaacttcatcaaattattgaatttattttgacattttaaaggccctgacaaagcaaatgggaggggttcttggcgttattttgccgatggatttcccccggaagattggagcgattgatcagagatgcttatcgggcggcagtgtgtaaattgaattgaaaagcccggcgacggattattcccaggcttttgcatgggaaaagctaaacaaaatatcgggttaaagcgactgatcggaacagaacaataaaaacagggacaaggcaaagagtgatcgaaacagtcgcttcaaaagtgtaatgtgcaattaattgatgggttccaccggcttttcctccgtccaacccattgggaaatgaaataaataaataaataattgcattgtgtgaataaatgtttcattttaaaatttaaaacactttacatttgttgacctgatttatccaattttgaagtggaaaagaaatttataatgatcggaaatcaacgcaataattggggtagaactgaagagatttgatggggaaatgcagggaaaacaaagaattggaaaatggggtcaaaatttgggcgacgagcaaaaaaaaaatggtacgac

SEQ ID NO: 24576 - DNA, 941 bp, Heterodera glycines
ttcagtgcactcttgagcgatgcccacggcactgcgtccagtttcggctggtgtccattttctggttccaatttaccggtccccgactaatgttgttatgcacaatgctaaatacctgcagacaaatcgctatttcagcaaataaatccgcatgaacttaagattaaaatccatatcatttaaattataaaaagaatttgaaaaacaaaaaattaattgattaattatacgaatgattttttgaattttggtaaaaattttaagatgtgaagagaatttttctattagagaatataatttaaaaaatgcttagaaatataaaacacactcgaaatttagaagaaaatgaaaaaagcatatattttaataaaattcgttttccgattaatttacaagaatgaatattttttaaataaattcaagtcaaaaataaaatttaattaattatttttattttgaaaacgttaaaaaatagagggattcattttgaaactaaaaaaattaataataaaaaatattcgttcaatttttcgaggatttatcataacaatcgattaaataaattccaaaatctttcacggcggagaatatcggcacaaattacttgaccactaaatttgcctgattgaatttttggaattttgtaaaatggcgattttcatggaaaataagatttttgaggattttagtgtcaaaagaggattttaagactaatgagttatgaagaattttgaaataggagtctttcctataagattattagaataaaattttaatagatcatctgactaattgtaccaaaaccagtcaattagcataaaaatatcttaatttctttgagttttttcatttttttttttgatttttaaattaattagctgtgtttgcggtcgttttcagagtatcatcccgctttatgtccatttttttgtctcattttc

SEQ ID NO: 24577 - DNA, 1689 bp, Heterodera glycines
  unsure (1)..(1689): unsure at all n locations
ccgcacttctgctggagaaatgcctgcccatttgctggacgaggcggtcgctcgacagatcagcgcgtcggcagtgtttccactgatcaacgcccatttgagtgagttggccaaattaaggcatcgatcactgatcggttgcctgggaataattttgtgatctttaaaatgccgtcgctctcttaggcaatgattcggtgttggacgtctcccaacacatgccctttttccaaattctgttggaattgtgcgccgcgttggcttccgtcccggcactgctcccaaagattgttttgccgcaagacgcacacggaaaatcaatcgcgaaacagctgatcccgcagtttcggaacaacctgaacaattaccccacactgatgagtggaatcagcgaagctgacttatcattcatggactttattcgcaaagtcaacgattattcggaggttggggaagacaaaaaaatgatttccaatttaaattttaacttttcaggtcatcattcgtttggcacggcaatttgaacgtcaaattccagcggaaaagcgcgtcaaaacgtcccattcccatcgctatttcacccgcattggcgccgaccgcgtgcgacgactgcgtaacgcgtcggcgactgtgccatcgtcgacgggtccgagttcggcggttggcagtgccattgcgtcaccgcaagccgacggcttcggctcgcagttgtcgtctccttcagcccaatcgctggtctttttcggcaacttcgacgtctccgcgactgtctctgtcgtagcgcgacagcgaagcgtcgcaactgcaacgcaaagacaacggacagccgcggcacggcgattgagcacgcaacaattggcggaattggacggacagtcgccgagcgagcagtacagggaggtgctcagagagttgcagatgagcacatacaggtgtgggcaagcctaaagggtgcattcatgcttattggatcgtgaaatggctttaggttgctcaacgatgccgggaagctggtccacgggttcagcttcaaacgcgaactccgctccgtgaaccccttctccagctcaaacaaagacaggaccaaacggatcgcaaagtgagttttccggcgagtggggcagagcatcggcgtgtgatcgctcactgactgatcgctgatttctgatcaccgctgggattgcctctgggttctactctgatcactcccccccccctctcccctcagggaactcgcttccatgcacaattcgctccctttgaatgcttccaatgcgattttcgtctgtatggacgagacacgatgtgacattctcaaggtgagcatggtgtgctgatcagttgacaattgaccaacccttttcttccctttggccaggttttggtcaccggtcccgacgacactccgtacgaaaacggactcttcgaattcgacgtgtttttcccgtccaattacccgcaacagccaccgaaggtgagggcatggcaggggacggtgcatgcactggaaggcacttacagtacacataagccattttagcctgtccgatcaatattttttgtcttattcattatcaaatgggattgaggggttgttgatcactttgggctgatcattggctctgtcttacatttgtctctgatcactcgatcactttcgtttttttttgtcttttcagntgctctttt

SEQ ID NO: 24578 - DNA, 1537 bp, Heterodera glycines
  unsure (1)..(1537): unsure at all n locations
ccggtccgttttgctgttgcggcgtcccttcaacggctgttggtagcggtggcgagggcggcggcgttggtggtggcaccggctcaagcgtatacgtccaacagcaggagccgtccctggaaagcggagaaggggaggaggtatagttagaatcttcataatntaaaaaattgagaggcatcgaagtgccgcagaaaggtcaccggccgcctaaaatgtgcccgagggaactacgccaaaaataagaaatctctggtaaaaattcaagaaaaaaatttttagtggcctattcaattttttgaatttttgcagggatattttgtcccggagatttttttgggttgtaccgacaaaatcgggttttattgtgctatgcgcatgtgttctttatgatttgaaaaaataaataattcagcttaaatttttttcaaaattaaattctttaagtatgtgcaacaggttgtgcgtgcccaatgccatgccccaaactcaccggtgttccaacgcggccaccacgtagccgtgagaggccaatgatgcgcacaccgtcgtgtagacgaaccgactgccactgatgccatgcgagaaaatgaccagtggaaagcgctgctcacccggcacgaccggcgcatgccaatggacgggcgatcgaaaaaacaaaaaaaactactgtgttaatgtttgattattggcatttatttagtaattatgttgtcccttcttaatttttgtctcattgtctgtcattgtagtctctcgcctaacctatattttgccattcccttcccagcagaaaatgtcccccccgtcttcccttcaattcattctgttggcagagcactttttatattgttgtcgtcagttattttcctcggacttcccccccatttttattgttgctgagtgaattgtctccactttggaaatattgttgaaggaaagcagtgaataggccccgacccaaacagcttatttagcacgctacattaaaagatggagatgaaaaagggatgggggggggggctggtccctgaccgatgaagctgaaataacggtaaattttttttgaaaatttcatttaaaaagtaagatttttgcggaaatttttcaaaattcagtttattttttggtttgcgctgggaaaaaaagatccaaaatttgcaccaaaaaaactcactttttgtcgccgacgacccaatcgagaaagaagttcatcttgaccatactcatgccctggtaatttgccaagccgaccatgtactcggtgtccggacgccaacgcatgaactaaaaaagtgggagaatggcactgagcaaaggggaggggaaagagggaaagaggcgaggggggggggggtagaaaaacgcactaaatggcatacataaattggcgcaaaccaatttgttcgactatattttcgccacaaatcgtttcaccaaaaaataacaaaaaacaataaaaaaaaggggtgcaatgatgctgaggtgaactgattcaagggcacaaatctccactccctaatttgaatttaattcg

SEQ ID NO: 24579 - DNA, 894 bp, Heterodera glycines
tctgaaaaaatatctttatttattttactatttaaattactaaataaatttacgttaaccacaactcgagttgtggttaagatttcttaagaaagattaaaccacggttaccttaaccacggttaaaaaggaaaggacgagcataccggttaaggattcttaattgaaattattgttacgacatttaacatctataatttcgaaaatattttcagctttgttaatgaatatgttatataaattgcaaggccacttataggctcccgcttttcctcttcatcaatgagactaatccaactagggtcttcctttggtgacatgttagccttgtcctgttccatttccgggtaagcgttattcatccaatcagtggcgagaattaaatccattttttttaaattaacaaaattaaaagttatatatagagttttaaatctaaatgtaattaaaaatggaggaaacttttgatcatacggatgtacagtttcgtcatccattcacaatgattgtgtcaggaagtacgcgaagtggaaagtcggaatggataatgagattattacgtaacttgaacaaaattatttcagtaccaattgagcgtgtattgtattgttacggggagctgaatccgaatattttaaatttacaacgcaatgggagaattgacaatataacagtcactgttcacaatggagttcctactgaatactacattaaaggaaatgccaaaaaggaaaaattgttgttggtgttggacgatttattggttggtatgagacagcaatatttagacacacttgtagtataagacgtattaatccggtgtaaaatccccccccccttcccttaccaaaacccaccaccccctgaaaaattccggcccaaatttggtcccaa

SEQ ID NO: 24580 - DNA, 1066 bp, Heterodera glycines
  unsure (1)..(1066): unsure at all n locations
ggggacctctagagctgaattcatcctcaaattaaggggcattgacgacatacaagggggggnnnanttangggnannnannngnncctcttaaggggggattnttaagtgaanaaaagtaataaggtttaattaggntgagagaaaaatgtgaaaaaattttatttaaggtaatgttttgatagtaatgataaaaaatggattttattaatttgattagattattttttttaatgaatttgaaatatggaaaattgagaaaattttaagaaaaataatttgttaaggatggaaaatttgaaagtgaatttttttaattgaattaattatttaagatttgtattttaatttatgtttttgagttattttatatttacccaaattattggttattgtaataaatattcttaaaaattatggcaaaatgaaaatgaatattttaataaaaaccaaaaatattatataaaagatcattgtaattaataaattcctaaaaatttgtggtcaaataaaatataatataaattgaaaaattaaattttctcgtaaaaaaaattgtaatacttttttaaaatttgagcaaaatttgcaaatgattgaatgattaaaataatcatacaaatattttttttgaccgggggtcataagccgggataattgaattttcccgggaatcccgagcctttgttttactaaaatcttgttctgatctgagaatcctgaaaaagggaactacatttttgaaattgcaaaacttcttcgaatttttcaaaatttcgccttccaattaaaaagaaaattttagccacttataatagagttgagcggttagccgacttttgcgccgcagacatctgcgccgcaccatttgcgccgcgacacttgcgccgctcagcaaaaaagacttttgcgccggggacatctgcgccgcaccatttgcgccgcgacacttgcgccgctcagcaaaaaagacttttgcgccggggacatttgcgccgcaccatttgcgctgcgacacttgcgccgctcagcaaaaaagacttttgcgccggggacatttgcgccg

SEQ ID NO: 24581 - DNA, 1971 bp, Heterodera glycines
tgcttatgatttggaaacggtgacaaaaaacaaagaaccgttaaaaaaatgtttaattttactgtaatttaaattatttttaaaataaaatattttaatattaaagaaaatatttaatttaaaaatttaagaataaaaaattgtttttttattgtaatccaactaaaattatttatattaaaaaataaatttaattcattaaatgaatggataaaaaaattttaatgtaaaattaagaatttattcaaaaataatttttaaattaaattaattcatttaataataaatcagctagttcaaacttcgtgaaatttttgtacttaaatccgttttctaataatcttttttcctttatttctgaagatgaatgaattggattcggtgtgcaatttcgaatggcgaattttcgatttcagtcaaatggtggaaggacgggttcgccaccttaaaagtttcgcgtggaagttttttgtgtgggcggtaaattttttaaattttgaatttaaaatgattcgttaaaatggtaaagcacgttttattggagtatgacactgtggtttggcttgacacttcagtggttttccataaaaatgatttcaaacgattttttgaaccgatgcaaaacggcaaaattggcacggtgcaaatcccaagctgtgagtgaaaagaatggaccttttaaaattaatgagtgaattataaactaattatcattttttagttgctctccacacaatgaatatgtcaactcatcctggtaaaacaaaaaacattttcaatggccttactttgtaattcaccgcatattcccaggaatgtacgaatatttgccaatgtacaccaattttgagccgaacagaacatacgaactgattggaacttataagcccatcatcaaaaccgaccccccacagttcgagacaaactttgtgattatgcacaaatccgagcaaacgcggcaagtgatgaaatggtaaaaggataataaattgagaattaaaacttcgaactttttttgtaattcattaaaaaatcgtccattttacatcaattttgggctaatatccggtaatattattccataggactgggcccgatattcggatattttcatgtttgggtcaagttttttcaaaaaataaaggtcgattccgatcccttttaaccctctaaaataaaatatcacagaatttttctccctatgaaagttaaaataaaataatttaaatttgcatggctttgctttgtgccgccgagcccgactgtatggtgccaattggacagacgtaggcgtgcatttacacggcaactgctccgaatttgacttgccatcgacaggatcagagtctgatggaaattctccgctacaacatggaatatcgacaacaaattgagagtttgttttaaaatcaaagtgccgatcccaactttttcggcatttcttatgcccggttttgtttttcaaaaattccggtccaaaattactcattttttcccaataatttatgtatttttaaatcagacccatcatttttgacccaactgaaccctgcccacccgcgcagttcaaaccgaccgttgcaatcgtcgggaatcagcggattttttgatttgctccgtggtaagcattttggcggttctcaaagtgaatggcttcaaagagttcaatgttgctgatgaacatcatcattatcttttgttttttattcattttcgtataaatttgggcataaatggaaaatcgttaaatgattgccaatttgggaaattaacatttaaataagattttttcattttgtctccatttgttaggttttgcaccaaagtgatttatttttaaagattctgaaccaatatttaaaaaaattagttattttttactgaaatgtcctttaaacgatcctacaaaaattaattttgaaaatattttgcattaaaagagttttagaattcaagaaataataaattttc

SEQ ID NO: 24582 - DNA, 1761 bp, Heterodera glycines
  unsure (1)..(1761): unsure at all n locations
gggcgctttgagccgaggtaaggctaactttttttgcgctaactttgcgcagcgccgggcgctggaagtcaagggggcttggctccgcttggcgaaagtttgcgccgtgccatggggagcatcataaaagaaaatttggcgcgattctaaaagtctaaagggtcgaaatgacgtttcgcttgacagatagggggttagcgcgggtaccacgcatgcccattcgccaatccctcgggtttccactgtagcgcgggtaccgcgcatacccatcccccatcagagcgggtttgcactgtgagagcgcatgtcttcgtactcactttcctccctccctttcctcctgtcccgacagcagccgccgacaactgcgccgcccgcccgttcgtgccgtcgactcttggccctgtccgttcgtgcgccgacttctgtgccatgccgatccgtgccctgccgtgcccgactaccgccttgacacaccgcccgctcaatgccgcccgtcccgtgccgttgacgtgtgccgagccgaccactcccgttcggtccccaaattgtgccgtcctccgatttgtgccgtcccccattttcccccattgtgccgtccccatttctgtgccatcccccattttgtgccgtcccccatttttcccccattgtgccgtccccatttctgtgccgtcccccatttgtgccgtcccccttttttgtgccgtcccccattttccctccattgtgccgtccccatttctgtgccgtcccccattttgtgccgttcccccatttcccccttcggtttaattacccaagtttgaggactccaataaagtgtattttgaatcgctttcccgcctcacttgacccccagcaattccaccatccccgattgaccgccaagcgtccaccccaaaatttcgccacaaccagtccctctcctggtcaccattgcgccagccgcccccaccccgccgactcgcactactcgtccacaactcaaagcccagcaccaccaagcagcgccggccctctaccaaccactgaactcatcagcacccccacatctcgccaaattcctacccctcccatttgtgcgccatcgaaagcgtacaggtaatacgaaataatgccaaaataaatggacgtccttggaaaaaataattgctgactccctaacgaatacctggattggttttgctcgttataattttttttcaaaaaacgactatctcttttttcggggtaatacgaaataatgccaaaataaatggacgtccttggaaaaaataattgctgactccctaacgaatacctggattggttttgctcgttataattttttttcaaaaaacgactatctcttttttcggggtaatacgaaataatgccaaaataaatggacgtccttggaaaaaataattgctgactccctaacgaatacctggattggttttgctcgttataattttttttcaaaaaacgactatctcttttttcggggtaatacgaaataatgccaaaataaatggacgtccttggaaaaaataattgctgactccctaacgaatacctggattggttttgctcgttataattttttttcaaaaaacgactatctcttttttcggggtaatacgaaataatgccaaaataaatggacgtccttggaaaaaataattgctgactccctaacgaatacctggattggttttgctcgttataatttttaaaagaaaacgnactatctcttttttcggggtaatacgaaat

SEQ ID NO: 24583 - DNA, 1135 bp, Heterodera glycines
agacgacaagaagcgctacgagcagggtaaaagatggcatgcattgcgacattgaaagactgatttttttagaaatgactcagtacagagctcgccagaagtagacgattgggcagtgaatgacgttttatctttgacttccttttccgctgttctctcctatatttaaaagtcaacaaaaatcgaccttccatttgtcgtccttttcgacattctgatttatttctctcagtttaacttttattctgatcatgtacgtatacattgcatctggaaaatgatgatcaaataaatggaaatcatcaatctcgttgacaagcctaattgtgttttaccacttattttgattagaatgctacattggtccatagtttagtgcgcccgttagaataagtcagaatttaaccattttaattaccgggtcagcgattggataatcgatagaatagaactaggtatccatccgggagcgggagtcccgccattagctcacacagtgggattttttactggagtagtgttgattcccgctcccgaaaacttttcgactcccgctctcctttctacaatctcatcaaattcggagtaaatacaccggtggggatggatgtgattttttcaaaacacgagtaagaatgaaaattttctaaattttaaattattttgcgtaacccttcgcttcggaattgtgtccggaagagaaaaaaaattttctttgcacaatttcaaattgtaaggtaaaaaatatggttctagtcggttttacgcgtcccatggcattttacgcgtcccatgacatttttttgtgtccatggcggggatggcatcccgaggccacaaattttcggaaatcggaattccgtgccatccctaactaagaggaaacctatttttttgtcgtgtatttcgtaaattttcaactaaaaatttcgttgctaaaccaaagtatcatgtcaactcacacaggcaactcgatcaatggcttagactaggcgtaggcttttttgcaaatttcttttatgtgtttactgactgttgacattaataagactgcttagggttgctgttgcacatttccataatcaaggcatacaatcaagaacaagtagacgattcggagggtatatagatttga

SEQ ID NO: 24584 - DNA, 1012 bp, Heterodera glycines
ccgtttctttcacccgtttaaacaggtcattcataatattccatttcccctgttgtcttcctcagttgccatggctggtttggccgtttccctcgtgcgcaccttcgccccgtacgcttgtgggtcgggaattcccgagatcaaatgcattctgtccggatttgtcatccgcggatacctcggcaaatggacctttgtcatcaaatccgttggtcttatcctggcctctgcttccggtgcgtgttcattggtggaggatttatttattttttgcttctttgagacttaccagataaattcataaaacattgatcaaagcaattcaaattcagggctcagtcttggtaaggaggggcccatggtgcatttggcctgctgtatcggcaacattttctcctatcttttcccaaaatatgggctaaatgaggcgaaaaagcgcgaaattctgagcgcttccgctgccgccggtgtttctgttgcatttggcgcgccaatcggaggagtgatgttcaggtgatgatttcggtttaacaggcttatttattaaaaaaaccaaaacctactcattctctttgaccaatggttttttttagtctggaggaggcgagttattattttccgctcaaaacgatgtggcgctcgtttttctgcgctttggtcgccggtgttatccttcgttttgtcaacccgttcggaagtgatcaggtgaatgttttcttggaaagcaaataaaaaatagtgtattttcttcttttatagacttcgctgtttcacgtggactattccatgcgttggacattcatggaactgattccgttcgcaatgttgggcattttcggcggtgttcttggcagtttgttcatttggtaggctaatttttttttttttttttgctctgagctgcagccggggaaaattttttgaaaatttaagtgcgttttaacagcttttgtccaaaaaatgataattttatgtttttggaaaaatttagtcaaaataaattggattaggg

SEQ ID NO: 24585 - DNA, 1304 bp, Heterodera glycines
ggtgtgagctataaacaatcatgaagtcagcagtaaagaaacaaggaatggtgaaaagggatcgccgcatggcatcattccaatgaacgggacggggaggggtgatattgatattacacacgaagtgatcataggaagcgtgggagagcgtgtgaaaattctgccaatctgatggttgatgattgtggcaaaagaacaatactgggaaattgtgaaatgtttgattgaggaaaaatttgggaatgggagggggaattcatgggataactatagacaaattgcgtcaaagactactcgtagtgatggacaatcggtgagaatagccgagtgcccgaaacgtcgcaaacggttgagatccattggccacaaaagtatcacgcgaatttcgtctttgagcaatggccaaacgttgagcaagaagcgttcaaaaagacgatcattttttgtttgaacactcaaattaattccataatttgcaaaaaccgaagagaaacggcgcagaaattcgatggcatttcggtcgatgtaactgaaaaagtcatcagaaaaaaaattattatttttttttcgttttcaccttatcaaaaggtgttggaatccaatgactttctttggcaccgatttttgcggaatttccattgcttcgccacggccattgaaaatttgcatttcctttgtgccattcgtttcctttttgcagcgccaaatttgcacatatccaaacgaccatcgacgagttttgaagtgttcatcaacgtaacaatcaaaacgattgctgatcagagcaatgccatggccaagttgacgtggcggaagcaattcgaacactgaaagccaacagtcggcggagataaaactgaaaaattaggggaaatattccgacaattttttttattttacattttctttttgtgaatgcgtcgttttttgaagcggtcccaatgatgccaaagaaatgtgaaacagcagaccatcaaaggcacagcaaatacactgaaaatggaattgataaaagaataacaaatgaacaacgaaaaatgagacgcaaagaagcaaaaatgagggacaacgaattcattggtgcttcggtttgactgaaaaaagtaaaaaatttttgtaatggaaattaaaatttgatgatcaaaagcaactcagagagtgcaggcaaaagccaaaggagaaaagcaatgggacgaagaaaaaagaatttggggcataaaaacggaagacatttcgaacacaaataaaagcaaaaaatgagggcgaatgaatgactgagaagagtaggaggaagtaccttttat

SEQ ID NO: 24586 - DNA, 1319 bp, Heterodera glycines
ctccatctcaccagcttatgtgttttttgttttttgggtagaatatggatgagttagcactttcattaacggaattcttcaataatgatgctcgagagtctcgacttgaaaagtcttttttgcctcttggcacttttgagtcttgaaattgtcacatcggtctcgaggctgggctcggttcttttcgtattgatgccaaattcggtcacgctcaatcatcattagtcaataaaatcccaccgatagtaccgatttttgcttgccagcagatgaacattgcgtgccgtacggtgtgtgcgaagctgcggtttgtttggtgggactgctccgagcgaacaatgcaggtcagtcagtcacagtcccgacaatacgagaagagagcaaagtgtgctgttttcaagagtcgggttcattgttagttttttgggtctctgtctcgattctgggctcaattttcagtctcgaatcggaatctcgatcaaaaattgctgtttccgacctcctaaagattaccgtaacacggcacgcgtatatacagtataaccccgtggtgttgtgacttttgggtttgggaaattagacattttttcaccatttcccccattttgttgcccattttcagtgatccgaacgtgcggcaacgaagcgcttggctgccaacgcaatttggaccggtgggctcacatctgctcgtgcgaagaacacttttgcaacactttcctcttccttcggttggacaaaaaaaaaatgccgtgcgtttttcgatgcccaaaaaaatcaaaaaacgcagggcgaacacaaacattgacattgggatgagaaagaacccacgagaatcactgaaaccaaatctaaacatcggcggccaaaaattggacagaataaactctcacagagtccccatcctttcggctttttgccctaattcgggcagagaatggacaaatttcaaaaaaccgtcaaatattcgcaaatgccaagaattgccacgtgggtttgccccgggggcattttgccactgtttccttggcattcccttttcgccgttgatgaactgaacagctccaacttcgcgtgtcattcccatttcccataacagatggcgacgaacggaccatcaagaactccaacatgctcacgcttctgctcgtcattgtgccgttgtccgtcggtgcggcggccgtcgtcgtcgtggcgattaattactattgccacctgtgctgacactggttgaagaaggcacaacgccacactcagcattcaaatgatcacttatttatttgcctatgaaaaatttgtgtgccttccctaattactaa

SEQ ID NO: 24587 - DNA, 1706 bp, Heterodera glycines
  unsure (1)..(1706): unsure at all n locations
ataatttgggtttggctaatgagtatattggtaaactgagtcgagacaatgcaatccgtaaggaagcggaaatgcaggaattaatgcaggagttacaaattaatgagaaacaaaaggcagctgacgttctcattccaattttgagggacaaaattgaggcattagaagagaagttagacataactcacaacacggatggtgacactacctccggcattggacccctctcaaggagcgtgccaatgcgtaaaaatttgccaaaaactgagcttaagagatttgatggtagtccatctcagtggataccattttgggattactttcgtacaataattcatgaggactctcatgtcccaaaaattgataagttcagttatttagactcatgcattgaaggcaaagccagtgcaatcattcagggtattccaattagtgagagtgggtatgatgatgccatagatttacttttaaaaacctacggggaaaccaaacgtctaattcgaacgttgaaccgggaacttatgtcgcttccaattagtgagtcatttgaagacgacgagtccttgtacttgaagtctgaaaagatttttcgacaactgatttcaatgaatcagaatgtcgaagatggtatgtattacagtaacctggagggcaaaatgtctccagaggtgttagataagtactgtgttatcaaggatgccgaagataatgatgattgggatacgtcaaagtttcggaatgcattctcacgtgcattggaccaaataaagcataggcaggaattaaggaaaaatgtgattgagcccaaaagggacaaacatgaactgaccatgtctttcacggcattttccaagaatgataagtaccaagggaggaataaatttcctcaaaggaattcggatcaatcgccccctcgtgggcggaaatttgaaccaaggaaatttcgtgatcagaggcacgataatagtgactcatcagtcagccattcaccaatgagggataggaggaattctccttatcccaaaagggattggtcaagttcaccagagcgtgaaaaatggaagaaggatgagcagagaaaatgccaattgtgccaaggtgagcacagtgcgagtaaatgccataaatatatggatgccctctcacggcgcaacaaagtattaaaaatggaattatgttttatttgtctaaggactggtcattgggcaagtcaatgtacgttaaagggatataagtgcaacatttgcaatcgggcgggtcatcacatctcattgtgtagatccaaagacatacccaaggataggaggaatagtagttcagaaaattcaccagttcggtcgaagataaatacgactcaagacttctcagagtctgaagaagttgaaaaggaaataacatcggtcacttcgtgtgttacaagtaaaacaacgaaattgtctttgctgaaatgtaaatatgttaccatttataatccagaaaatccaaggcaaaggaaaaggattttggttttcatggacgatggaagtcaaaagacatacatttcgactaaattggctcaaattttgggtttgaagccaattggtaatcaaaggtttgaactctcaggtttatcgaatgtcgaattgngtaattcgaatctccatttatgagtttggcctcaaaagggcaactttgacattctgatgaaatgtcgagcccttgataaa

SEQ ID NO: 24588 - DNA, 2018 bp, Heterodera glycines
  unsure (1)..(2018): unsure at all n locations
tcccgaatgctgtttgccatttgttttttaaattcaactttcttgaaaaattttatgatatactggggtcgcaaatcaatgtttattccgttattgagattttttgaattctgttcgttgaattgttattcttgtattttaatttttaaagttttcaaatgcgattaagttgcgcgaggtcagctataaccatttccacctcacgtacatttgtgttgaaccagctatttccaccaactcttgttgacacgattggttctgtcgtgaggagcaccttgtcaatccctgctgagcttcaaggtaattaagcagcgactgaaattcatttcggtagaaaagacaatgagaagaaatatgtaaaatgtatggctttggattttgatgctaaattaagttttcatttgaactgtctattgcctaaaaagcgtgccaaaattcgaactaaaccgtttttttaacctgagctgaatctgttttaacaagttatcaatgatattttgctttggtttacggcttgttggtctgtgttcaattgagaccactgaatcgaagtcgaaatttttatttgtttggtttttagctattgttcaaaaaattacgctttgctatacattctttaaatttaaaattagagattggaccgggccggccctgtatcggcaatttgaaaatccgggttgattgttttttgagaggctgtgcccggaaaccgttcgttttcaaaaatgtcagcccggcccggcagatttgaaagtccggtctctatttaaaatcaatttacccaaacaaatggctgtgatgctcagttttgtaatttttcagattccgatatggtggaggaacaacagccaataatttcgccggcacattgtggtagtggtgccgaagaattttcgccagacgcgcagtgcgcacagcaatggaanaagcccaatgagtcgctgtttgtggtccaacaattggcccgccaagggcttggcccgcgtcaaattttggcaacgctttatcctcgctattgttccaccatttcggacgacatccccgatgagtggataatgcagttactccgtgaactgtgcgagcaccggacacgccaaaaattgtccaattacaacacatttgaggacgcagtggagttattcaggttttacataaaaatttttttggcaaataaaatatctatgatttttggaattttaaaaatttcgaaggagggcgggtagcaaaacaagggagtaccctgcattttccaataaaatattgcccgtcccataattttttctccaaggaagagcaagcgcattttggtgatcaccggtgccggtgtgtccgtcagctgtggcattcccgactttcgctccgagaatggggtttatgcacggctcaaaaaggactttcccgagttgccaacccccacggcgatgttcgacattgacttctttcggcagaatccgaggcccttctacaactttgccagggcatgtgtctaatttttggggttttgtgtcgcttatttgttagttagttggcccgttttttcttttaatttgaaattgcgcaccctccttccccttccgaaaaattagaaaacaacccattttttccaggaaattttccccggccaatttcgaccctctctgtcgcacatgttcatcaagtttttggacgatgaaaagaaactgttgcgcaactatacacaaaacattgacacattggaacgcattgcgggaatttcaaatttggtggaatgtcatggtaaaaaataacatgaaattctcaaagattttgattttttatggcaaatttaaattattggcgtgttgggctgtcattcattgaaatcaatttcaggctcatttgcgcgtgcaacatgtttggactgcaaacaccaagtggatgctgaagagattcgtggcgatgtctttgcccaggtatcacaattcgccagcgacaattatatggatttgggattttcgagagctttggaagataaaaaccactaactatccgaaagtcct

SEQ ID NO: 24589 - DNA, 2504 bp, Heterodera glycines
ttttgtaaaatacacctcttaattcgggatttcaaaaacaaaaaatacacccctaaaaatcgaattttcgacttcagccccccccccccccgaaggcaagggcctgactacgctcttgggtcattagaccgaccatgatcggatgccccgaacccagacaagacatttagacaattaaaacatctttcaaacaatcccaccgccatttgtacagttcgtccttcaggcaaatgggccgggtcgatggtaatcaccacagcaaatgtcttcgactcgacatgtgtctcctcatcggtactcaaatgcatgtatctgttgtaatgccctgaaagctcggataagaacaagcccgaatatgagtgccaacgcgggatcagtggaaacatctgaaatcatggaatattatagcattagcgaaaagcagttttgtgcacataattcggtgtagggaaaatctgccggcattttgaacttgaaaacttttcccaaaacttaattaatggcatttgtaaccttaaatccggtcaaatttttgtggaagaaggtgttgtccagggcctgtaattaaattagaattaattagcataatctttgtatttcataaatgagaaatgtaagtgagtgaaagtgaaaaggatgagagatgacaaacgcgaaatgaaagaaaaattaattacttaatatcataaaaaattgaaaattagtttatttttcagtgttttagcttattccaaaatttcattgcttttcaaaatggttattttggttggaaaagcatttatttgcccgaggcaaacaccgcaaacgcccccaaccgtcgttcgtgccattacaataccataattggcaaaggctttcgccaattttgtgtctttttactgtccgcaataatacggtaaacaagtgaagaagtgagcagcagttgccgtccgggccatttggtactcggcacacacaaaaccaactcaaaaatcagttcgtttggaagcagtcgccgatttcgatgtccattttcgtcgtctgccgttgttccgttctgttttggcgatttgtccattttgttctttgtgtttgttggcatgggaatgagtgaaggtggcagatgttgaacgatggcactttctgttggcacttcggtcttggcacggcaccgtctcggtttcagcgaacaaaacccagcgacaatggcatttgttgaccaaagatgttggacgatggcactttctgttggaacttcggtcttggcacggcaccgtctcggtttcagcgaacaaagtccagcgtcaatggcatttgttgaccagcgaaggttgtcgtcattccgcgcactgataaacgaagcaaattaaacattggtgatcaaattgacaagtgcccatttctattgatcaaagaacagtaaattgattgatcatccatcgtccaagagagaggcgtggcaaaaggtgtgccgccttcgcctttgttcttgcgcagcgactgtcgactgctttcgatggcgtcaattttgcgaaacaaatttttaaaaaatcgcgagaaaaattgagttaatagctgctcgagaccgaaaattcccgagactctcgagcagcactaccgactttgtattcggggtaaccaatttttgaaatgcccgttcggtttttgggtcgaacaaaagatatgcctttagtcggctgattgtcccatgtcaacagcaaaatgccacaatttaacaaaaatcaggacataattaaagcaggaaactgtaaaacaaaaatagaaaattttcacttacttttatgtcggcagagttcgaatgggcaaagttagtgaaatcgaattggtataaattaattgaaattgtattaatctgaaaaattttaaaaaaattttgttgctgattccccacaatcatttagtctcggaaatatcaatttgataggtcaagagtgggatgggatgggctgtaaaaccaaaaaacaaaagatttatagcggcgaatttttgaggataacagagattagcattttgagaaatagaaattttttggtggaaatgaggccaagcaagagcaaagagaatggcttagcaattatgcttaattagagcaattatggctaattagccattttgtgatttgaaacaaaatcattgaaataaatgggaaaaaggaggataggctgatgagatagccacggacaacaaaaaaccatagaaatggataaattcaaatggaaatggatgaaatgatgatggagttgagaatgtacaaatggatccccatccttgtacaaaaaagaaaggagtgcctgtcgaagaacacaaaaattgtcaattttgaaaaaacggcaaaccgacaaatcacacaatcattatgtatcctttctttgtctttgtgtaaaatttgtgagaaaattgccttgctaatcattataccattattgagcatgagaaaattgcctgtggttcatcagctttttgttggcatttgattggtgccactccttttttttagtagtaaa

SEQ ID NO: 24590 - DNA, 1252 bp, Heterodera glycines
tcatttttaaatctgaatagtcagtaaaacccgtaccggtcggaaaaatacggttactacgggtcgctaaacctgtgtacgggtccgcccgtattcgacctcgtttttaatagccgttcactttggtcagattactgtatttttttaatctttttaatttcctgatgtttttatagaaaaaacaactatttgtaagaaggttggaaaacaaagaaaaagtaaattgcttttttctgttttttatcgttttcggagggaggaggaattagaaaccatgacgaaggaaaaattctcagggagaatgcaaaaacaaattaagaatcgggggtagagtaccaattctcattgtcaaataacaaagattgggccaggaaccaaagcagaaagggaagaaaaatttaccggaaattccttgttgcccgaggacagcacacagtcggcgaagaagcccttctcgaacagaatgcccatgtcgtccgagaggcgacagggcggcacccgaaattgcatcatgttggactggccggtgacattcacctagaagggggaaaattggccaccgaatggaacattggggacggaaaatgaattcaatccggaaatgccgagaattcagtaggagccgcccaaaaaatgtggcacttacagtgtccgcgacgacggacacttcgcaaaagatggacagccggtcgtccggcagcagtccgttctgttcgtccagcaaaaagtcgcggcggatgaacttcttgaagccccagtctttgccctgcacaaatcggtaggcgcgctgcgactctgaaattttttgaaaaatttaatgatttatttttttatttgaaaatttgggtgactgaagtcttggagggggtacaccgacaaggaaactcgcaaattcaacataaaaactataaaatactatttttccttaaaatttcgagtgtggggtatcttagggggccaatgggaccgtcgctgatttattttatcgcgtaataaatgcccaatttaacttatttttagttggaaattaaatttttttaaaatatggcaatttctgtgccgtcccaattccctccgcccgtcactcacccatcgctttggtctcctcccgtttggcgttcagaatggagaatttgaatttggcgcgcacctccgtcttgttgcattggacgagcagcacatacagggacaagtagtccttggattcttcgtcgaggcctttcggatcgatgcgcaggcaccacttcagctt

SEQ ID NO: 24591 - DNA, 3027 bp, Heterodera glycines
tgccttatttaattccaactttcaccaaatattaacttctctaaggtccacaaaaggggaatgcgaatggttttttcgtgtttaagaattaagcaaaggaagaaggatcaaaagtaaaagattttttataattttaatttaataatttattggatattttgaaaatgtgttcttataaaaatcccgccatcattttaccaattccaagcgatgtttggcatacgagaagaatgacaaaaaacattatcttaaactgaattttataatttatttcaatgtaattaaaaaataattgaatattttttcacattcttactgattttcgtttatttatctgggaatttattctcatcaaatttcgtaatgatttcctggaaacaattgaaattaaaataattgactgtattttcaaaaacaaatttttaaacagactaaattgcttttttcgttaatgagcctaccatttacgttaaggaaaatggtttaaggcatctcgaattttttatttcaaaaattcaaattgtttgtccgttatttataaaaataaaataaaaaatgacacagaagatattcttaattttaaaattttatgcctatttcaggaattcttgatgatcatttgggtgcttaattatccgcttcctatttataatccaggaaaaagctatttacaaaaaatgtttatttatttttttatcaattattcctaatttttgaagcgttttgttattcgtgataaaccaattccttcctttaaccataggcaacacattcgataaatgtcttgcgatttcattacttcctttacataactatggaaacgaaaaagcaattaaagaaaggcatttttttattaatcatataaaatattaatcaccgcttttcgaaaacattttacgtgaaaaatgaaacattttttggcgctaaagaaaaacgaaaaaaaagaaagtgattaaccgaatcggtgcgatgggccattgttatttgttgtatttttgttgttgttgttgttgtaattttggccatttttaattacaaaaccagagacccagcagaaaagataaaaatcatttttttatacatattaactacttattatataagataaaaactattgaacagcatttaagcttgacaaaatgttctttgaattttcatcatttttcgtattttttcaattatccatcacatttctttaaataattatttaaacatttttgtttcgattttatgtatttacaatttgctttttctacaggaaatttttatgatggtttcatatagagactttttgtgcctttttcagtgccattttgcgctttttggtgccttaattgtgagctcaagccataactttagggccggcggtgctgataagagccgccgggaaattttgtaattttaatgctatttgttagcagattttgtctaaaaataccaaattttgaaattttgggctaattttttaagaaaagatagctttttggggggtcggcggtgccgataggcgcagccggaggaaaattttaagaatttttaatcaattttgttaaaaaaatggccaactgatttgtcaaaaaagtcggtcgattgtttcggttttttaattatttcggtcgaacggtttcggttaaaaaaccgaaaaaaccgaaaccgaaaaaaaccgaaaaactcaaaaatttctcggtcggtttttttcggttaaaaaccgaaaccgaaaatcgactttcttatgcaattgctttttagcagttttattctaaaagattttctctgcaattttattttttacaatttatttatgtttgcccgtatttacctcttttttcattaatgtaatgtattattcaattttataaaaacatattttgccaaatatttggcataaataatcgttaataaaaaaaatatgtttacgtttttacaatattgaatgcgtggcatttgtcggtctgatgtaagcaaatgcaatggcataatttgcagcatatttaagtcaaaaataaagatttaatttttaataattttacaaaaaaagaatattttttaataaaaaccattaagcaactaacataatggcctttctgctgaagtttgttctgctcctctcaataatggcaattttctgcgactgtatggaccccggcaaaaatgggaaaaccaaaaaaaaaggtacagaaattagctggagaaaaagaataaattcaaaataaaataaaaagaaatttagaaaaataattttttttcttttgaaattttagacgttgtaaaacaaaaagttgacgaaacgaaagttgagcgtaaggaagaggaggggaaaggtgaaaaaattaatttaaaaaataaatattttaggcgccagtgaaatgaacaaaggcaaaagcatcgttatggctgactccaaaaaggaaggtgaaaatattgttaattaattattaaaattatatttttaactgaaggcacaacgacagtgaaaattccgcaccgttatggagcagtgtcggggatgagtggccaaaatgccagtccaaaagcctctcaaattggcagtccaaaaaacagtccaaagggcactcaaattggcagtccaagatccattagcagtcctaaatcaacacaaattggaagcccaaaaggcattcaaattggcagtccacgaaaggaaaagaccaaattatcttcagctgttggctcttctgatttcaatgttatcgacgaatgtaggaagtcataaagaagcaattagaagacacatatataatttatttaatttagcaaaagaagcgaaaaaaccaagccaattcaaaccgagtccgtccagaagccaaaataaacgcgaacagcagcgactcaatgttactattggagaagcgggaagaggtaattaatgaaataaatattaattgtttctttgttatggcctaacgacatatttgggaacgtttatttaaaaaagtaaaaaactcaaagttcactgctaatgccaatctcagacgctatgtttattatgattgattagggctggta

SEQ ID NO: 24592 - DNA, 2265 bp, Heterodera glycines
atgctacagtcaatacagccgcaatacgcgcccttgcgcatcatgacgcgatttgcgcaacatcagcagacgcgacgggacagtgatggattgtgatgtgattttatggttctattttccaatcaaatttttatgagtccaatcaaattattttttcaaatgcgtaaaagctgttatttagtatatgctggttcttttcattaagtgctttaaaatgatagcaaaaatgtatggttttcttcaggttaaatttgttctaaaatattcataataagtagttaaaaacttatatgaattgtctctttttattcttcttaaattgtcatgcctccgagcggactcgaaattttgggtttatatattttttgtttcgactaacttccggtggggtgcttggtacagtggaatcatgcgctagcgtccgatctggcaagttaggcaacgctgagcttaacttggcctaaaggtcgggtgccgtgatgaagccaaagccagcactgcttaccccgcggtacccggcacggacccccggaggtttggatttaattaaattctctccctccggggttttttcttattaggttaaccgttagctctcgattggtctatttatgattttttgggttttttggctttgaaaatgtttttatagctcacaacaaactaggaatggaatggaaatgatttggaaatgctgtacaattgaaaagtacatacaggacagagattggccgggcaaaatggatagttgcggtactccttttatgcctgaggtccaatcactgttttatattatttatttccttgctgaacattaccgaaaaaatcacattcctgttccatcattatgataaaccctaatttggtagatggggagctgctcggacaccccaccgtacttatggatttaagttaaattactttttcggcaaaaaatattacataattgatgaaaagaattcaggattggaaaatcatcaaactttatctttcaggcaaaaagttgaatttaatctcgcccaatttcatgtcccatttttatatattatgatttttctatgaaacggaaaatgcatgcgtcagtgatacaaatatttaaaataaagttctgtggcagtaaatatcgtagtaaaaaagtattctataggaaaatcgttccctgacccatacttcaatccttaaataagagatcacttacccatttttgaaacaaaaaagctaaattcgaaaatttgaactttcgaacccctcttttgcaagcactcatcttcgctacccaacagtcagcattcatcgtcgctattccacgttttgctcagcattcatcgtcgctattccactttttgctcagcattcatcgtcgctatcccactttttgctaagcacccatcgtcgctatcccacgttttgctcagcattcatcgtcgctatcccactttttgctcagcattcatcgtcgctatcccactttttgctcagcacccatcatcgctatcccactttttgctcagcacccatctgggtgaattgtgcaatggtttcgggtccgtgttgactcgagctgggggtcggtggcggtcgcgtgcgacacgtaccagcaaccagttcggtccagctcgggctctcagttgtgcgttctcggtgtaaaagccggtcatctgttcgacccgtcttgaaacacggaccaaggagtttagcgtatgcgcaagtcattgggtgttcaaaacccaaaggcgcaatgaaagtgaaggcttcttacggagctgatgtgtgatccctggcactgcggtgttggggcgcaacatagtcccgtctcgatcgcatgcgatggggcggagacagagcgtatgcgctgagacccgaaagatggtgaactattcctgagcaggatgaagccagaggaaactctggtggaagtccgaagcgattctgacgtgcaaatcgatcgtctgacttgggtataggggcgaaagactaatcgaaccatctagtagctggttccctccgaagtttcccccaggatagctggagctcgttaagcagttatactcggtaaagcgaatgattagaggacttggggacgaaatgtccttaacctattctcaaactctaaatgggtatgaagccagggttgcttgactctgaacccaggcgttgaatgtttgagctccaagtgggccatttttggtaagcagaactggcgatgtgggatgaaccaaacgtggagttaaggtgccaaagtgcccgctcattagaccccataaa

SEQ ID NO: 24593 - DNA, 1407 bp, Heterodera glycines
agaagagggcaaaaacggaagggaagaggagcaactggcgagagcaacggaataggaagagagcgcggtgaattctaagccaatgcaaaacttttgtctcaatgaatttttgatctcattttactcaataaaaactgtttttttaatataattaattttattttgttctcctcgttacattaattactttatttggattcggcatagtttcttttaattatgaaattccttaagataatggctgagagtatggaagaaatggacagatcgacagatgttgaccgagaaattgacaagggcgagtttcgccaagcgcaggtcaattaacctcatattaaaagtgtgtggaaagccaagtgagtttgtttgcagtttgccacattcaaacatgatttccttgagtcatttgacgagtcggggtatgccaagttggaacatttgacgctggataataacctgaagaaagaggtggtcaacatggcgagacgcttgcagaaggctcgcatttccttgaattcgtaattatacatttaatttaattttgaaattttagcttatctaaacaatcttaaggcaatatatttgaattgccaccaataaaattaacaattttcggtaatagtaaagctggtgcccccccccccccccttgtcagtttgccggacactgaggccattgcgccggtaattgcgaaaattgatgaaacgttcggccagctgatcgcactttccaaggagtccagcgaattttccgctcgaaacatcaaattaccggagtacagcagggcggacgtggaagcactgctcggcaaaatgggacctgagaaaagcaatcagatgaaggagaaggaaatgggaggagagaaccaaagcaacaaattgacaggttgggaacggacagcgaaaagggaatgattttgactacattttgccaaataatttccccaaatggtggccatgcaaccaactcttttaaaatattttttaggtttttaagacccttccacacgttgaacacatttattaaaaataaatgtcagatttttgcccataatcagcatctcaattttgccctagaaaagaaaaattcagggtttctccaagcccacacttacccaaatgtttgcacacctacccccccccccccccacctttttttctattttcatctttacgcccacttaattatatcatattaatccaaatttctgattcatctatttcataattctgtttattcgcctattatccctggaattttagcgcccaattgttcgttttcttcaggcgacgtaagggaacaaacggagggacccgtcgaatggttgtgccgctccaatgaagagtatgagaagcggatcgaagcattgcttgggggccgggggaactgatgcttaaacgaatggca

SEQ ID NO: 24594 - DNA, 1444 bp, Heterodera glycines
tttttttttttgaaaatttttcctttattttttccccattttttacgttgcaaaatcacagaaatgggtgggcaaaatgtgccggtccgtgacagaacggtgttctgaaggcattggcatcggcccgcctggcaaacagaattgcccagacaaatggttgccggtgtgcaggtttgggttggctaagataaattagaaatttaaaaaaataaataaataaaattacaaattttgaatttaagtaaattataaaatttttaattaaattaaaaataaaataaataatatattgaatatttaaaattttaatttatattatgaaaaaaatttaaacatagaaataaaaattgtatctttgttgattttcattaaagtattataatatttcgcatcttttttaaattataaaattgtaaatatttttaaaaattaaaaaacatttttagaataatttattattttattttatttgaaatttaattttaattttttatttatattaaattaaaaaaattaaatatccattcaattaaaaaaatatgtattcctgattttttctttttaccaattgtgtggcgattgttactgttgcgcattggccattcagcgacacttgctgatatgggcaagtgctgaaagaatttggcaaaatttcaaaaaaaaaaattggcattccgtttaaatgttttaatttgatgacatttcaaaaaaaaacgtgccaaaatccgttagtgcacacggaattgccagtacatttggtcaaacttgcgatgcacggctcacccggcgaagctgacaaaattggatttaaactatttaaaattaaaataaattaaataaaatattatttaaaagtgaaaaatgtgccaaaaaagcaacaaaaaaaattataaaaaaaagtcgaaaagtcgaaaattcaaaaaataggaaattctataatttttacgaattattaaaataaattttctgagaaaatcttttttcatttgtcaaacgagaaattcaaaagcgggttttcgaggctttattaaaatgaggaattttaggtaccatgcaaaaaaattttttactgataaatgcaaaagtttaatcggtcttatgatcagtgataacttttaatggaaatatgtatgaagtgatcaatgaatgaataaaaaaattgataaaaaaagaggaaatgcaaaaaaaaaaaattttttttaaattgtaggcctgaaattctgtgctatgttaattttcggtgcaccccaaaactcagccgagacataattcagccgtgaataaatttttaaaaaattttcaaacttaaatttttcaagaaaaaaatcttagaaaaatttttcttagaaaattctatgagaaaaaatttttttaaagaattttcagcgatttttttgaaaattttttgaaatttcttagaaatagtccataaattttgaaaaaa

SEQ ID NO: 24595 - DNA, 1254 bp, Heterodera glycines
aaattatttgagctgtttcttaaggatgattgataatttataaaatacataaatggattaattaatatattttattaaatggtaacatttttttatgctctgtccaccctttgccgtaaacaatggcaattggcgcgccgttcggatgttttatttggcttaaagcgtcgaaagctctcttagcaaaatgcattgaatgctccaaatcttcaaaatgttattcattaaggaatcaatcagaaagaatgccgaattgaataccaatttgattttgttcactttcctcaaaggcaattaaaagtgccgaaattgcatgaaaattgcaagttccgtcttcaaacctaaacattcatttttgttcaagagttttgggttaatgagtcaaaaagtagcctttcttcgatgggttcgcggaattcgactttggacgaagtcagagaaacgaatttgacagttccgccgccaaaataaccgtttttttgaagaaaatgggcggaagaacggcggacaatgagagcaccaatgccaaaaatgggaagaaattggcaaaattaacaaaatgccaaaagagcaaataaataaacaaataaacggaactaccggagggataaccgaacattttgtagaaggaaatgacggcaaagtcgcaaaaggataggccaatgtcggacgaatgcggggccaaagcggcggagtccaaacagacgaacaatgggagcccaaaactgagcaaaaagcgaattcattttccaacaattcttattttaggaaagttgcaaaattttgcataatttatttaattttaattatttaattcatttttaattttatattttttgtttaatgttttataaatgcttattggcctctgtttcggccaaaaattgtcttaactcttcgtaagtgaccacaacaattcgttcgaagctttcagcacttcgcattccgacgacggaagtgtgggaatcgcgcagcatcagaagggtgctcaaaggagcaactgaaaggggggggggggcaatttgagagaaatgggaaaaccagaaaaagaaagtgccaaagcgaaactgactgaaaaagccaattaattaaacggaaagaactaattaccatccgacagacaattcacatcacttgaaaagtgttttttcgtcgtgcgacttttgcgagtttcgtctccaaagttttcgacgagcagtttcaaagcgtttgttgcatttgaagtgaaatcacagcgaattcttccaaattatt

SEQ ID NO: 24596 - DNA, 1480 bp, Heterodera glycines
ccggagagcattcgacagttttgtcaggcgcactttttgctgaaggccaaaatgagtccccgacggactgtttttgtttgcaaatttaataggtgaacaatggaaattggaccataaattgggcaatttaaaatattgtattttgtttgatcgatctttagccttaagtaaagcgacactttcaggggctttttgtcgctgatcaaaaaacggccaattccggacccgaattctaacaaaaaatcgaaattggcaatctttcggttcattggtcccgaattttttttttaaataaaaattttggaaacacatttctaaagcaaatttgagccgctgagtacgaatctgaccaccttttcgaccaacttcaaatcccggacccgaattcgaacattttttaaaatttcaatttcatcaaatacgcctaattaaaaaaaaaattcgggacaaatgaatcgaaagattgcctcgaaattctatttgatttcgaccttttattttaatccgtgcatttgttcaaaatttagcagaatgaattccataggcgtggtcagcgaacacggaaactcgcgggaaaacacgtcattcaaattagacaatttttggccaaaagggagggagggccgtgagaattttattttcaggggtccggcggtgccgattggcgccatcgggataaattttttaatgattttttaaaagaaaatgtatttggaatttcactaactttctcccctttcatcccttagccggcgacccgccccccgcccacctctttcacaccggcccccctcactgcgaagggatcccccattttgggggcctttgcgggcgaaagagggtgggagggtcggggctacccgactttttgggacaaaatgacattttgatgattttaaaaataaaattttattaataaaacaaaaaaaaagaatgctactttctatctgttgagtccggaaacagagttaattttaaatatttttatttttcacaaatggaaattaactttggtaactttgggctgaatacttaattattaattatgtataatatttttatccattaaaatcctcaaatgtcggattccctaagtgtcgagtccccaaattgcaaaccaaaaagtcgcgccacgatgggtcaatctccccttattttttgcttgtcgaaatcctttgcttatttttgaaaaattagtccaatcccgtcgtggtaaattttattgtttttagcgagaattagtttttcagtttttcgccaattgccaattttgttgaatcttttgttcctgcacagacgcagttccattcgtgccattgtccggtgcccttatcgtgccgtgtttgtggcggaacgatgcgcgatgttcgctcttcagtcgcacaaccatccgccgccggatgaggagggcaacgacaccgcggcaaatgaagccgctggctgtttcctgccatgccgaccgcagcagcagctacaacag

SEQ ID NO: 24597 - DNA, 1934 bp, Heterodera glycines
aaaaaaattcaattgcagatggacaattcattcaaaaaaacaattctgattcaataagtgccgccgtaaaaaaattgccaggataaagggtggatttggatgcttacaactttctaatcgccggaatttatgcccaaaaaagcttcaaatgcggaaccaccactgctatggggccttaaatccgttaaaaaatcatgcccattcatttgcacgcttaactatgacaaatcaatattgataataataaaatgacaatattaatatgaattgaaggttttttggtcgatcgtgcggctgatgagagaaaggaaaaaacatcgattgaaaaataattactacaattatttaattgattgaaaacgatcatcaaaagtgttgtttgtgcgctctctctctcatttatttgccctttgccacgggcgtcgcagcggacgaaatgggcgacgatttttgcggagagccgacgaccgaactgggcccggaagagccgggcgacgaggagggcgaagtgccaaacgcagcgaccaccgaactgcgcgggctctgtcggattgggctgtacacctgagcaaaatggggggggggaggtgtccatttaaaaaaatattaattccaataaatttgtaaatttaaattaaattttttaagttttcttgttgaagaaaacgatctgttccattttgggttcattcttttgcgcaaaaaatttaaaatacaatttaacggtattgaataatgaatgaaacgtaaaacattaaatttcttgttttagaaaactgattgagaaaatgaggcacagttgtaccggtataaaaaaggtacgatttcccctctagaaaataatttttagtaaagacatgaaccaaatatatatatcctataacaatacccacttttgccaagctgtccgccccggaagagccgatcagttgccgtgagggatggaaagcgacggccatcactccggcaccaaatttcttacgatgggcagcaatttcctggaatttaaggccacacgttgaaaaagagtgtcaaagaaaaaatagtgataagaaagagatggtgacagaaaagaaaaagtaaaaaagaacagagacggagaaaaagataatgaaggggaaagacgaaagaaaaagagacaggaagaaaggaaaggaaaagaaaaacagaaaagaagataatgcaggggcgagaacgacaggggaaaagacggaagaaaagtgtgcacatatttcagcgccgccctctcaccacctgcagacagacgcgcttctccgcgttccaaagtcgcattgagccgtcatgggaaccgctgagcatgtacagtccgttggggtcgatggccagcgtggacacgccctccacgtgtgccatgggcgcactgatcagtttgcctgaaggcgaaaaaatgccattggacaaattgactgtttataccaacattaaaagtcattggaccggagtaaatgaagaaaggctttttagatccaaaagaattggttttaatcgcacaaaacgattaaaaaaaaaagtaaattaggggtggggtaaagactgacttatttgaccattagttttgtctattttttaagcgattttgctatacaaatagtcttcccagcttctcacccgtgttgttgtcgaagaaacggattttgcggtcctcgcccgcggcgatgctcaccggcattgtcggatgggaaaggattttgttcaaggcgctcggctgatcatcacctaattacaaatttttttaaatgtgcagaaaattttttataaaaaattctataaaatttcaagaaaaaaatttcttgaaattttcttatagattttttctaaaattttttgcaaaataatctaggttagaagtttaaattttccggggggggggggggtgaattgatccctttgggctatcccttcagatatatttc

SEQ ID NO: 24598 - DNA, 975 bp, Heterodera glycines
aatcccggtaaaataaagacaaaaataaagttacggatgcattaattagacattttaaagcgccttaaaaataaaggaaaatttagtgaaccccacggggtctaaaaaaaaaaaaatgttattcttctcactaaaaaaaaaaatcaaaatctgttcaattttaattcgaattctgattgccctgaggggctcaattaatcgaaagaaaataataataataatatataaaaataaaaaaaagaaagaaaaagaaagaaaagagatttaatttaaaaataattatttaaaaacaaacaaaaataaaacacttaaaatacttaaatcgaaaaagggagagaggcagtgaaaatgcaattcacgtgcacggcagcgcagcactaactgtacagtgacaaagagatgcccatctcttcgccctttctcaccccgttgggccatctcttccgtcgcttcgttttcccccccccccccgtcccatctcacatcgcttctcccgttccatcgcttcatccctccttgccccgtcccatcatctgcagcagattatgcatttaatggccaaagtgtccattccgcaacaaagtgtaagggatgggaatggacacaatggcgacacccgattggctgccgttaaaccccttgtgtactacagtggcttggcttctcccgcccatccactgacgtcccctccccaagccattcccagcttcatttgtatttcattttcatcattctgctccgaagtcagcagccggcgccttaatgcctatcaaatccctcccccaaattcaactctttcccacatttgatcagttcttttctttattttatttccctagttgatcaaattattccccatttttgatcgtccccaattctctctgtgccacctctacttgacctcatttactcattttttttttctcgtctggtcaattcttgccattttcattttctaattataatttttttttt

SEQ ID NO: 24599 - DNA, 1235 bp, Heterodera glycines
  unsure (1)..(1235): unsure at all n locations
aaaaattaattttcaantatatcattttctaggggtgggaatttcgcatttcgcgccaaaaagcgaaatgcgaaacgccaaaanaatgcgaaaggcgaaatgcgaaacctcggcccatccctgatgtgcaccccctttggtcccgaatcccaaaatcacttttatttttgtaactattcgtaagaaactgataaaaaagtcaattaaaatgtatataatagagcaaaaaattgcgtatttttgtagtattttacttttccagaatgacttttcagaactgaggtataaattttttttctgaaaatttgaatttttccagacattctggaataactttttactttttagagaaagaaatcccaaataaatcccataaaattctcctgattttttgctatttttaaagctttaattcacttaaatttaccaaaactgaagttagttatgaattttccaatattagcccaaatttccaagggccaaaaaattgccaaaaaataaagaatttttaaaaaattctaaaatttccgaaacttaaaataaacatcatattcgtattcagcacctcaaaatagcccagaaaaatatttttgactcccattttcgtccgaaaaaaattccggaaatttctaggaggcctagctcgaaaatttttgaaatttgctcgacctatactacaccattcgatagcttttcaaaggctctacaattttgctctaagacactttttggctaaaactgctagtcaatataacatatatagtaattccttggaaaatttcatatcaaaagaaaagagagtaattaatgtattgatgatgaagaaaaaataattttttgtcaatttcctggttggctttttaaaaagcagaaaatttttatattatttggaatatttttgttaatttaggacattttagaattcttagataaataacgaacaatataacaattaaatatataaaaaaaaaattttatcacaaggtccgaaatgcaattaattacaaacattttttccaaggaatggtcaaatttaaggctaaatttgatcagcttaattaaagcttttattcttcaccttaccaatctgtttagcatagaaccaaaattgcttagtttttaaacgtagtgagcagcagaagtgacaaaagtatcaattttgtagtaatttaaaaataaaaaataattattattttaattttatttgctaaataataaatcataacttagcttaa

SEQ ID NO: 24600 - DNA, 1567 bp, Heterodera glycines
  unsure (1)..(1567): unsure at all n locations
aaatcactatctctttttttggaattattttacgtgtcaaagggtgtgcatttaagcgactcgctgtgcttgcccaatgcatttcaaatagctggtaatttttatttctccggcataatccagaaaaaatcactatctctttttttggaatattttacgtgtcaaagggtgtgcatttaagcgactcgctgtgcttgcccactgcatttcaaatagctggtaatttttatttgtccggcctaatccagaaaaaatcactatctctttttttggaatattttacgtgtcaaagggtgtgcatttaagcgactcgctgtgcttgcccactgcatttcaaatagctggtaatttttatttctccggcctaatccagaaaaaatcactatctctttttttttggaatattttacgtgtcaaagggtgtgcatttaagcgactcgctgtgcttgcccactgcatttcaaatagctggtaatttttatttctccggcctaatccagaaaaaatcactatctctttttttggaatattttacgtgtcaaagggtgtgcatttaagcgactcgctgtgcttgcccggagatatgagggggagggtgtacggacatttcgcctactcgacatctcgcctaccgacatctcgcctactgacatttcgcctactaacccaaaaacattcatttcgcctaccaagccaaaaacattcatttcgcctactaagccaaaaacattcattttacctactaattagtaggcgaaatgaatgtttttgggttagtaggcgaaatgtcgagtaggcgaaatgtccgattttgggttagtaggcgaaatgaatgtttttgggttagtaggcgaaatgtcagtaggcgagatgtcgagtaggcgaaatgtccgtacagccctttaaatttattttttgggatttcaaaaaattgctgatcattaaaatcacagcacctgctgctattgttgttgttgttttgtttctgatgacagagccatcgttgagaagcaatgagacgatgatgagaagaagaaaaagcaacagagaattatttttgttggaagccatggcaaaaaaaggagaaggaaattggaattctgtcgaatttgaaaaaaatgattagaaaaaaaggaatgacgaaaagttgagaaaacaactcaattaaataggaaatgaattgtcaatgtggtggaaaaatgaaaagagtacgaccaaaactctcttatcaatccgaatgaaaagaaagcaaattttattggacagcgaaaatcccaaaatttgtaaccaatttgaagagagagttcagcttctgatccaacgccctaaagcaattttaaatttaagaattcaataaaagtatcaaatataaatatgtagcataatgataggcgcgacatatattttttcgttcagttaatcaaattcattcccttctgtctattttcgatcttttgtccttttttataaccctcattcacattttttcggcaattcctctcncatccacaacttttcactccccgagggtcggggaggagccctttgtctttattntgttcattaa

SEQ ID NO: 24601 - DNA, 2344 bp, Heterodera glycines
  unsure (1)..(2344): unsure at all n locations
aacaaatcagcgagaaaattctgtgtgaaaagtcaagagcactgacagttagagaaggacaagaaaaaagtgatcagagtcttactctgtgaaaaattcggcgatacattgaaaggaaagttggcgatctaagaaataaagtgataggaaatgttttaagaatgttcagagtcataaatggtaagtagtaattcgtattagtcatcaaatttaggaggaaattagtgatcagatcgctgtggttgatcagaaaattagcgaaaagtgatcagaattgatcggagagattggtcagagtcaagcaaaaccgaatatttggaaagtgatcagaaagggatgaattggcacagcactcagagttggtccggtaatcccaaaaacgatacagtatgatcaaaagcaccaaccaaaaattggctccaccaccgccgggtatttccggtaattttccttcacggtctgcaccagtcgggaggtattcctctccaccctggagttgatcagcaccaccttcagcagatcaggcgagctgaaatggccgccctcagattggtactgatcaggncggcactcccccggagccccttcctgccccgccccctcacttttgcaggttttcaatgcgttttccgggcgtgtaactggcaattccgcctgaacagaccaacaattaatcatttatttggctgaaactgattcttaattaaatttcgacagtttttggtcggctaatgcctccccaaaagcctttctcttcgctttccccgcgcccccaaaaaaaactgaccataagtgcaaatggccgcgtccaggccagaggcgcggccgtggatcagcgactcggctgcggaagaccacttgcggatgatgtccagcactgactcgtcccaagtgagttcgtccgattcggcggacaccgaaggcggggggattaggccggccgtctgaaggagggcggccgcaatgcaaacgcaataagcacctgaggagggaagggattggcattttgggtggaacacaaatttggacggatatttttggctaaaatatttgcccgaatctattgagagaaaaaatcaggcaccaagactaagttcgaggccgggaattgaattttggtcaaagtgccttcaccccaattttgtcggatgggcaaaaacggcactgaccggaagagccgagtccgacgcaggaaggcaatttgaagcgaacagtgactttgacagctaacagatccctgcaaaaaaaaagaaatttgaattttgaaagataatgcttttgggacaattggacagaatatcacagaaaagtcagacagagagagacactactgctgttagggatagacagacagacagacagacagacataaaattctaatcaattaataagattttatgactgtgcaactgcactttgctaagtagggctgatcgagagccggaattttcagagagagggcgagcaggaattggtgaccgagactctcgagcagcacaaatattaacgactaagaacttagagaaacaacagcaggcaaacaaaaaatacaactgatctaataaagcaaataaacattaaagacaccgtaacccgaacagagtaagacagtaattcgtctataaactggttagactgtactctagcccggtccaggccaaggacccttggctgattaagaagtggacctatcgggactgaatgaatcgaaaaacatgattagatatccgtgagaagatgaacagcacagtatgcattagtactgtaacactgaggccacaaatgaagcaggacacggaccaattgagaagagaaaaaatgacgaacaaaaatcagaaaaaaacaatcaaaaggccaaaagtacggcgctgaaatggccattctcagtcagactgaattgggccgcgcccaaaaatcgcaccgcaaaaaacacgtaccaaacggacaacacgctgttgctaacagactttcgcttagagtccagcagtggacaggggccaatgattgtcgccggtgttggtggagcagtaccagcaacaccaccactggcccaattcgaggattgcagctgcgacggtcgtgggtgggagaacgcggacggcgacgggggcggcgacgcgttgtcgcgcggcgttgcactgccacggtcatcatggcacggctgctgttgctggtccgtcgtctccagcaagtccaacgcgctaaaagtcaatcactaaacgccacaacgaatacgccacgggagcaccacccaacgagaagactttggacacgccacaaaagacaaagggttgggggagcacacatttaaaacaatttgggcgacatgccccccagggaaaaa

SEQ ID NO: 24602 - DNA, 1550 bp, Heterodera glycines
acgtcgacaaccggtacaacttctaaggctccaacttcgacaataagtacaacttctacggctccaacgtcgacaacaggtacaacttctaaggctccaacttcgacaataagtacaacttctacggctccaacgtcgacaacaggtacaacttctacggccccaacttcgacaacaagttcaacgactaaaacttctactgttccaacatcgaaatcaaccagggcaacttcagcttctatggacacaacttctagatcaagaaaaacttcaacttctacagttccaacctcgacaaaaactatccaaaatcccaaccttgtacaaagaacccattcttgtcgggatggttggtgtgaaacaatgggatatggagcaacgattggcagtaaattaaattaactaattacaccttggtttatcccttaattaagttactcgttctgatggaacttgtggaggcgacactgttgcgttaaagggttgttgttgctctcttcctactactactacacttgcaacaagcagaagtccgacaacagcttcaacgtacattccctggctttatgtaaatggtcaacgagtgatcagtttgtttgaataatttaaatttcaaaattcaaaccaaaaaatcgtaattttaccaaaagtaattagaaaaattttcttttaaggatgcctagataaaatggagcaatggacttgtgaatctgctgcatccattggattgtgtaaagtgagtattaaaaaagataattcgatttaaaaaacaatttttaataccgagtttatatgaaatagttccgcaagaaatttaaattttcacaatttatatacgctttttggacctaaaaagttcccattataacctaaaagacaacttcaaggaaatttcaaaaatatatctcatcttttatataatatatctccatgcaatacttctcttattgaaagtcgctaaccaaagcaatggcattcaattgttgttggacatgttggaagaaagcagcagattttctaccactactttaatgaagaattcctaagggtgattttgtatataaatttttacattttttactactatatggtgcggaacaatttaatgagtttcataggttgttctgaagaaattatttgtctttgtctaattttccataaaaagtaaatttttaattttagctaaattacattagattatacatttaatatttattttacatttaattttatttttgaataaaaattaaatcaatgtacatcatattagtctgcatgtggttttacaatttattacgtctattccaccattacatgctatgaatgtctgaaattaaatttatatcaaatcaatcataaaaaaatggcgccataaagtatcccattaaggcataagccaaaattagccattaatattttttattaaatattaactccaaaattgttttaattgctccctttaaaaataagttttagctcatagattttattgtgctaaaaataagtttgtttcagaatattttaaattatattttcgatgatcattttga

SEQ ID NO: 24603 - DNA, 2433 bp, Heterodera glycines
  unsure (1)..(2433): unsure at all n locations
tttcgctcggatgggaaccatttgaatttgcgctttaaatatgaataacaaatttatttaattggtattgattagacaaaaaattgaaggtttaaaaaaacgcgccgcaaaaaaggtaggtttacaacttcgtaattttgtttttctaaaaatttttccaaaaaatcgctttatttttattcaaaaaaattttaattgaaattttcttacgaaaaaattttgagggggaaatgaaacgcatgcttaatttgtgaaaattcggtgagaatttaatgttttttaaatgcacgatccgcggcatttttctgtccgcctcccacccttgcaaaaggactcactccgttggccctcacaaatgcgtcgatggaaatggaaaggcgcgtcagttcggaaagcgacttactcatgtccttctgcacaactccgaattcatcctcatgaagagagtgagagatcactttggaaagagctaaatgccaatcggttattaaaatgaacttttttcaaaactttcaaggacagacggacctttaatcgcatataaagtgcaaagggtgtcgtaggaagagacaatcggtgcaggagcaaaaagcaattctttgcatctgttgacaatgaaatcacaaaaaagcggcacaacaatcagacgacgacggcaatggacgcgttcggaaagaaaagcatctaaaataaacgttggggatggaacagcttttcggcattaaaaaaggaccagctgagcgcgggttgagcgaagggggaacaaaaaaggagtgtttggcctcgtaaagttcgttcagtacgccggttgagcccgtcgaggagttcaacaaaaggctgccatttctgttcaccaatgatttattagcattatcttcgtcaatttcctccaaagtgtcgaaaacggacgcatcggccaaagacttgctcatgtgacgcacttccaacccccggcgaatgcaccagaattttactatgagtggctatttggaaaatatttcggacattgcgtacgtgcgcaatggcgacatcacggagagaatgccaatttcgtggatgtccaccttaataaacaatcaaaaccatgaaaagacatattatcaccaccaggttgactcaatgcgaagaagggtttccgcgtcgaagtgttggctgaacacattcgttgaagcagataaagcgcaaaaaactgaaaaattgtaatttaccggacaaaaaatggcattgcattcgaaagtaaaacctttgtcaacggatcgtttgactcgagtgcatttgtcagtgtcattgtcgaactcaatccttctgtggcagcataaaaaacagttggcatgacaaattcaatgggctaaatttaaacgtttctccacagttaaattgaccaaacaccttcatgagaaaattagtgacaacaaacggagttaaacgaaggattaaaacccgcgcaaagagagggaggaaaaagtcggaaaagtgccaaaaagcaaaaagtgacggaagcgacgcatggaaaggacgcaaaagcaaagctaaaagagcaattatggaaaggaatgaataattgcaaaatatcaacaaaaaaagaccgaaattaaacgcgatgacccaagcgaagcaaaatacttttgccgtgctgaaagaatgacgaatgattggtcgaactaacgccgaaacgacgtcctttttcattttgaagataacaaaactctgaattatataaatgaaatcgaaaagacaaatggattaaaattgtacgttatcttcaaaacgaagctgaaaattggtggagaaagcgcaataaaaggccaaaacaattgaagacatcagccagagcagaaaagaagagctgtatggaaaagaaagaatgaaaaagagacaagaaaccattcgttaccccgaggaaaaccaaaaaagatgtttggggatggctaaggacagcagaaagtacagcgaaacatttgctgcgaaaatggctgaggccgcaagtaaacaatcgaatttaataaggttcagattcgtctcgaaagtaactgaacaaatcgaaacattggaaattatgcgaaaagcgagttcacctgagaatatccaagtcgaaagcaacaaacattccaaaaataccactgccatttgcaggaaaagaacgaacagaaatttgggcgacatcattgaccaacagtctaaaagaaagaagtcgcaacgattttaacaggccagagaagcagtgccccttaaaggcttttataaaaaaaacactggccgtggaaaattggattttgagtttcatcaagagttttacgaatatcactcctaatacccgtagtggctggctcanatgttttgataatactgcagatgcctccctccccccccccagggnggatcagctgcagtatattaccaatattttttttaactataatgctgctcaaaaat

SEQ ID NO: 24604 - DNA, 793 bp, Heterodera glycines
caaaaaatgccacgacgacgactcggatgcttcctagggccacgacgacgaatcgtatgactaaagaatgcttttacgacgaatcgtatgacaaaaaatgccacgacgacgactcggatgacaaaaaaatgccacgacgacgaatcgtatgacaaaaaatgccacgacgacgaatcgtatgacaaaaaatgccacgacgacgaatcgtatgacaaaaaatgccacgacgacgaatcgtatgacaaaaaatgccacgacgacgactcggatgacaaaaaaatgccacgacgacgaatcgtatgactaaagaatgccacgacgacgaatcgtatgacaaaaaatgccacgacgacgactcgtatgacaaaaaaatgccacgacgacgaatcgtatgacaaaaaatgccacgacgacgactcggatgacaaaaaaatgccacgacgacgaatcgtatgactaaagaatgccacgacgacgactctatgactaaaaaatgccacgacgacgaatcgtatgacaaaaaatgccacgacgacgaatcgtatgacaaaaaatgccacgacgacgactcgtatgacaaaaaaatgccacgacgacgaatcgtatgactaaagaatgccacgacgacgaatcgtatgacaaaaaatgccacgacgacgaatcgtatgacaaaaaatgccatgacgacgactcgtatgacaaaaaaatgccacgacgacgaatcgtatgacaaaaaaatgccacgacgacgaatcgtatgactaaagaatgccacgacgacgaatcgtatgac

SEQ ID NO: 24605 - DNA, 1104 bp, Heterodera glycines
agtgaaaagacaaactccgtcaatatgagatcagagacactcaacgttcgaatgatcaaactcaaagagaattaactgcccttttacgataaaagagaatgaaagagaatttattgtgggcgatctcactttgttctcaattgcttcagttctatttattaaacttaataatcgtaattctcttctagagcagacatattcgtccatttgacaaaatgtccagaaataaaaccaattgtccgtacaattcatcatgaattttgtccgaatccctccgcccttaacggcgtttccgtttcagtccccaaatgttcggcaagcgcgcaaaaagtcaaaaagttaaaagccacgtggacggacaaactgaaaatgttcattttcgcgacagtcgccattttatgtacggacaaaaaaaccaaataatttcattttttggcattaaaaagaccaaatgttcatttgtcagtgcttctgcttccgattcgaattgtggtcgctaccattgcgactcttttcgacgaccacagaacgttgggacgggcaatacacagatggaaagtgacacgcaatggggggacgaccgccggcggaaatgccatgagcacaaatggggacggagccagaaactgacgaacacggcacgggaaaggaggaaattaggaggaaggaagaggaggagacggaggaggaaggagaggagaaggaggaggaagaggagaaatgagaaggaggaggaagaggagaaaatgaggaggaggagaagaggaggaaggggaggagaggagaaggaagaagaggaagaaaatgaggaggagaaggaggaagaagaggagaaatgagaaggaggaggaagaaaataaaacggtggaggaggaaagaagcgagttgaaaagctaaaaaaggaaaaccatttataaaacattttgtacacagaaaatatgcaaattccgaaataaaaaattgtgtcgaagtggtcagcggtgggcgcgccgtagaaaacttagaaaaattttgcatttcatagaattttttcccaccctcttattcccgctttgatcacgtatgcttggcgtctcgggaaaaatggaaaaaaatcaaaactta

SEQ ID NO: 24606 - DNA, 2359 bp, Heterodera glycines
  unsure (1)..(2359): unsure at all n locations
cgcgcgcgcacctgaaagacgttaccacgcagatttgctgccatccagggttgctgtattacccgattcgggagtgctagtattattattttttgataattntcataattattttgtttttttcatttttattatttacgaacgacattaatattttgaaagtcttcgtcatgtataaaaaagatttgtttaatgttactagttttctaatttttaaaatatagatataattattttcaatttttggtcttctatagacagataaatatttacagaaaaaaatcccaattcattatcgataatttttacataataaatacacttatttattatataaattattattttattttatcctctccaacttaattaatttatctttgaaattgaatgtttataatacgaataatgagtgaaagtttcgatttacctatttaaattttttctaaaattttaattattaattgttttttcatttttatgatttcaattttattttctgttttggtgctgaatttattttactttaattatcttttatatttattcttttatttaacaaacaattaaggtattaactttgttattataattttaaattgagtatataatcaattatacatgttttagtgcatttggataattgataaaattatatttataaattaaaaaccataatagaaaataaatatgtttatcactaaattttcaattcagaaaatttattttgaaacttcaaattaaaattctttgtatttttaatttttacagcttaatttaattctatttttaagtaccatatttttattattttcgttagaattatttgataagttgccaattcgcttgagtaaatattatttaatgtcatagtatcaatttatttagcaattcttttctttcattttatttaatatcgttttataaaccaattattttaattaaataaatttaaattcaatttcacattcacttttgattttttatatatttaacattttctgtaaaataaaaaatataataaatttatatatcgaaatgataatacggtgatgcgacatttgcggcgcccagtcaaagcgacacttgcggagcaggcacttgcggcgaggacattttcggcgccgacatttgcggcgcgacacttgcggcgccgaaagatgcggcgcccagtcaaaaggacatttgcggcgcagacacttgcggcgcccagtcaaaatgacatttacggcacagaattaaatggccccaaaaatattccaacatttatttaagttaataaaatagttattttaagtttattttttaataatgactagtttaacaataattcttgcaacttaatcacaaagataaaggttaatcggttgccgttgtaacatattcagaaaacgtttcagtgaaacggtttcactttgccccacccagcattttcaaagtataaatgggatattgtaataaaaatatttttacaaggtttattatcgtcattaaaaaagaggaagagcaccaacaaaactgcctgaggcctaaaaaaaatttccggaggcgggattgtacactgcagtacagcctagggatgaaaggctttgaacaataggactgaaagagtgataagtagagaccggatttttatgtttttacatattttttttgcggcttagttatggcgagagaagcccaaaaatagcattatctccgaacaatttttgatttagagcgacttataaaaacataaaaacacatattttggcgttttgtcacataaaatatgttagcacatattttggggtttggcacatattttgcacatattttggcatttttgagaaaaattgcaataaaaatacaagaaaattgaaaaatacacccctaaaaatcgacttttttcctaattattaacataattttcaaattaaaaaattttttcttcgattgtagaacctaatgaaatctcgaattcattaattcgtcattggatttcgaagttctctgctggaactttcaatttatagaaatgatttatcaaaaaaagacaattttaccccaaacacttcgaaatgtatttgatttgcgttgtatgggctaaaaatgataaagaatgagatttttgggaatttttatgcaaaaacacacttattttttcaatttttaacacatattttagcacatattttnggcatttttgggggtttttagcacatatttcagcattttttagcacatattttattacatatttcaggatttttagcacataaaaatccggtctctagtgataagctcaattttacatcgatcgcacagttttatttgcagaatagcaatattnatttttaaattttctcataaatattga

SEQ ID NO: 24607 - DNA, 1660 bp, Heterodera glycines
cgaatccatcggtgtgcggctgcgacccgactgagcatttcggcattgagcagttgggcaggcttagcttcctggagtgctgcgtcaaggaaatcctccgcctctaccccagcgtcccattcgtcgcgcgtcgtctcggctccgacacaatcattggcggaaacaaaatccccgcgaatacccaagtgttgctgaacatctacttgatccatcgggagcctgaacactggccgaacccggagctgttcgacccggacaggtggcatttggcaactctttttgcggttctttttatttgtcattttattaattttaagattttctcgtgagaatatgaagggtcggcacccgtacgccttcgttcccttttccgctggcagtcgaaattgcattggccaacgcttcgcccttctcgaggagaaaacgatgctcgtttggttacttcgcaacttccgtatcgaaagtctgctccgtcgcgaccaaatgggcttgaaacccgaattgatccttcgtccgtccgtcaaaatttctctcaaattaacaccccgactttaattgtttgaaagtccccagcaaaaggcactttcggtgactctttctactgacccgctgcaattcattttgtgatttgttaccatttgctctcaattttattaatgacctcataatttataattattaagaatagcataataaatttatacgaattctaccattttacacaatttataaagttttcagtccgattatttccttttaaattttatttttatctttcgttattctttttgatggccatttagcgtttgctgatgagtgaatcgagcagcagcgatggccatttgttggacgatttcgcagatgcggagaaaattggggagggcacttacggaatcgttttcaaagtgcggatgagggccaacggagagaccaaagcgttgaagcaaattcgactgaacaggtgggctggggcccatcgagttgctccgtctgtctttgttttattgttccgtaccaaaataaatcgttttttgtaccgtttgccaattgttttttcctcctgtgccatgtcaatgaattggcacagatttgtccattaagtgggaatgacggtgtgccgagcacttgcatccgcgagatcagcctgctcaaggagttgtcccatccgaacatcggtctctcctctccccctccctctgtttaaattttcatttccattccttcttcatttcccctcttcagttcgtcttgacgacgtaaaaatacacagtaatgaatggcattaattccttggcattttctccgtgtggcattttcagagggccgtcgtctctttctcgtcttcgaatacattgaccaagacttgaaaatgttgctcgagcgtctctcccctcgttctgtgcccattaattacgttaaggtctttcttctttttttcgattttccattttgcttgaccatttcttcgtcaaattatgccatttcccttccgttcagagtttcgtctggcaattgcttcaggcgctcacttactgccacacccatcgcgtcgtccacagagacctcaaaccccgtgaattgtccgcttcgataatctgttgcttacccccaacacctcttcagagaatctgctggtcaagaatgacgggaccattaaact

SEQ ID NO: 24608 - DNA, 1419 bp, Heterodera glycines
atgacaaatgtttgggcttttatcttttgtgcttccctccgaaaaatggtgaaaatgggagaatttctaattgaattaattaattttgattgccaaagatggaaattggagctgcgaatgttcggcaacccatcgaattgtttcccaaaagaacggaacggaggatttttcgcgaaaatgtgaccatgtttttaacaagaaagagaacgactggggctttccaactttcattgcttttacggtgagtgacagtcaaaagaagagttacggtcgaaatattgaaaaaactcagtttagtacagaaaactcattcgttttacacccaaaaatgtttagcggtcatatttttccgcaatgcttttgggtgaaataaaaacaacaaaatgagtttaaaaatgcaaatatcgcaaccattgccaaactcctttctcgtgaaataaatttaaacttaaggaattgatggatccggacgagggattttacgacaaaagtgaggaaaaagtgacgttggccattgatttaactgttgaagaagaaaaagggacaaaaaaagcggaaatttaccgatgaatcaacccacccaatcactattttctgttaattgatctttttgaaatttatacaataaattcggcagcaaattttttttcgtaattatttattaaggaaattttctcatgaatattaataaatatatttctttattcgttttcgagtagagttgagcgggaacgggacctgaacacggacaactgagtaccgaagttgaccgggaccgggaccagtcccgggtttttccagccaaaaattcgcggtttttcaacccgaaaaggtcccggtcccgggtttgcccaaaattcccggtcccgctcaactctattttcgagatattagattttgtgcttttccatcattccgccctcactaccataaaaatatatgatttacgataaattacaacaaacttttctagggtgatttgatgcgctaattaagaatgacgtcaaaaatttaagagttatctatgattttttcaaaaataaaagctataatggcccgccattatcgagcatgcgataacggagcaagtagtgaggcgcccgagcgagcagcggctccacctactggcgccatagtctttggccaaaatgctaatcaaacaattcagttaaaactaaatacctatatgtattgatgtgttttggccaaaacatcacacactcgactttttgttttagaattttgctatccgcttttgcgttacattgaccaaatgtgagcaaattggtcaaatctgaagcctttttacaaattgatcaaaattgttatgtgaaattctcgaaagatccagctgagaattagtgaaatcgaatttttgaatgcggtaaaataaatattttaaattataaattaattttt

SEQ ID NO: 24609 - DNA, 1989 bp, Heterodera glycines
ttaaaatttgcaatttaatatcggcattaatagggacccccccatcattttgtatttaattttatccttctttttataattatataatggcaccgaaacaaaacgtcgacgggacataacgtagccgcaaaaaaaggaagtatttttttttaaattcaagaaatgattttaaataatttttcgtcacctagccgaattccaaaaaattttgtcaagaaaaaacttaaaggacttaaggaaacaataaaatttttttgcagtaatcagaatataggacaattcactcataccttttttaggggtcagaaaatggcctgtcctatttgtcatcactttgcggacaacagtcacgcgggtttgaacccgggcaaacaattgtaaacagactgaccgctgaaccacagtccgtgggatgtacacagcataaatatcatttttataattttttcctaacaaaattacggcaaaagccactcataatcagcagttagaatttccaaaatttgtattcgatatgttcaaaaaaaatgcattaattccggcttcaaaagcacaatttcttccccttcccgaaaaccgttaattaaatgacaaataaaattaacggctgagaaatgtgccaaaaattgaccaaaagttgtcacacataacctaaaccaaaagatttaagtaaaaaaaaatctaaaggaacaagaaaattttcaaggaatttacattttttaataatttcaggaaaataattttgaatccgggtgaaaacaaatataaaaatagtgacaactgattagaaatgccaaaattgagggaaaaaacaacaacaacaatttacgactggcaataagaaaatataccaaaaactgacccaaagttgcgcccacgcgccctctcctcctcccgtgccaagaacagcggcaaaattggcattggcggaattggcatcatcgttggcattgttgtgcaccatcatttgttgttgatgtgttgggttttgctggtgctgaacactgacactgatcgaggacgatgacgacgacatttttggctttttgatcggttgctaaacggaaattttggaggggtattttaaaaaaattgaaaatttaagaattttttactttatttggacgagactttctttccacctctggctgctttatttgttgtgcgcgaatagcataaaagtaagtaagaaacagaagaatagataaatttgctaaaattaaaaaaaaatttaaaaaaataaaattcatttttttggcagacgtcgatttttataatttataagggtattacatagcattaaattttaattacgaaggtgaagcgagacttattccaatatgcttaaatgatcatttttaaggcgaaatatggtcttattttttcactaaggcctaaatttgaaaaaaataggaaaaaacaacccaaaactgcattttaagtgcctataaaatttttcgtaaatttcttatttaaaaaattaatcattaatcaattaagtcgcttagaaaggatcaaagaacacctccaatttggaaatttatgttaaggatttccgattttaaagaaataaaaaaagaaaaatagagaatttataaatttgcttggcgtaagacaaaacgccaatgccaataattaatttaaatcaatcgcgaaacaaattccgtttcagagagtccttatcaaatgtggtggtatgcgtgtacataaataaagataaactgaacgataaggtgagatgaatgtgatgagtgaaggaaaacagcgccctttttgaagataaacaaaatttgggggggggggaattcattttgtttattttattatgcatttgtatcgattttggggcatcaattaatcgccattttcgtatgcgatgagtcatttacccatttaaaaaattgctgaaaaattaaaaaccaataaaaatgaggtcaaatgattactaacagtttaatcgcagaaaaaaatatttccaaagattaaaag

SEQ ID NO: 24610 - DNA, 2452 bp, Heterodera glycines
  unsure (1)..(2452): unsure at all n locations
tcttttagttgaaagaattgttattgtgggagaacggacccgagaacatgtcaatttatagagcactaacagtttgcattaaaaatgccatctctgaattcaataaaaggttaattaagcaaaaagcgtaaaaaataaattacctatatttgatttaaataaattttacagtaatttttactgcactataattaataattaattgaccttaaaattttgaatctaaaaaatttaaaataaacaaataatgtaaaaacaaattaattttgaaaccgtttaaatttttcctcatatttgtttaaattaacaaatgcaaacacagacaaccaattagtcctggaattaagccctaaaaaatttgcaactctgcctattttaactaaaaacatcaattttatagatataattaacataaaaatctttgaataaatcgacattgaaaacgaaaattttaaatgttcttacattgatttttttaatttattcaatttctgagttagcaccactttttctgatctttttctttcgttaaattaattttgatcataatctccaaaaataaattttgtttgatcatttgatcacttttagattttctccgtcaaaaattcacagttctgaaaaagtgcatgaattgcaacgatcaatctttacaaaattgatcacttgcactgtgaacaaagccaacaaacaccatggcacaacaaatgatgactttttgtccaaattgcattttgacgttttggcacaaatctgtgaagcggatgatcaaatgaaagaaattgtgttgaaaaacagtaagccaaaaagcaaaaacttaaaataaaaaatatagaaattcagaaaagcatttgaaggattttatgaacgcaaattggtataaaaaattatctggtttgcttgagaaggtaagggtaagaattattttattacataattcattagttaatttgaccactttttggccagagctccgttcttcacattttttttttaaatctcattctgctgaagggcaaatcactgatttagttgaaaatagatttttccattttttatctcacattttattgcactaatctctcattgaaatgccgaaagaaaaattaaaataatagtgattttgttaacacatttagccaaacacctagcaaaataaatataaaaattttcaaaatttactataaaaaataaaaaatattttatttaggaggatgaatatttttctgtatccgaaagttttaacgaatctgacggttcagaaaatgaaatatttgatgacccatcagaaacaatcattgaggaaaatgaaaattcaaagaatttaatggaaaaacattcaattaaaaatatgaattttgaatttggtgaaaaaagtgcagaaaaatgtgaaaacaaaaatttcaaaaacaatttaacaacaacaaaaatggatgaaaaaaacagtgacgacgaatttttggcattaaattcagaaaatgaagaacaatggacaaagaaaaaagagcagcagaacaaaaaagcaaaaaatattaatgtaagaaaaaataaaaataataataattcggagaaagaaatgacggaacaaaaaaggaaaggaaaaaatggcaaaaataaattggaagaaaatgatgagaatttaaatttaaataaaaaaaattatggtaaaaagaaaatgatggaaaatttaactcctgaaaatgtacaaccgttaattgagcggaaaaatggaaaactttgcaagaaaatgtttagtgaaattggcgtcaacaaattagcaggcaataatttttcttaaattttttcgtttttcgttttttttaaattttttattttgtttctatttataagattttaattttaaataattttttattagaaagatagatgttaaatttaattttttttttaatttttagatttgctggatgaatcaattttcaaaaagatttttgaaaattttttggaaaaacattgggaaccccaaagcatggagaagcaatgcttggaatatttaggcacaattgcattatttgccagagcaattcaagcaaaaatgaattttattgaacaaatgtcgaaacattgggcaaataaatcggtgaatggaattgccaaaaaatgggaacattttatttttaatgaagaaattttattcgaattcgaacagtttgtacaaatcaaattgtattttctgcaaaatcagcttgatgaatacgcttttgagtaaatatattaataattcacaaattaattcattaaattacaattaattttatttggtttttacgtagttaaaaggtttttttaattaaaaatattattatttaagtaaattattaattntgtctaatcttttttatttaatcccatctatttttattcaggcaantcataattnttgtgaaaatttattcaaatattgacgaaatgagacagacaaatcaaaaat

SEQ ID NO: 24611 - DNA, 997 bp, Heterodera glycines
atgcttttaagccccgccgtgaggctggacagttccaaaatttgtaccacattttactgtggaaagtccaagtaccttaattggacaattaattgtcaacgaacacagtcgcctttggcctcttatggagcagaaaaggggaaatatcagatggggtgcgatcctttcaaaaaattactcttttcgtctaaccatccctccctttttgtgcactatttcgttttaaaaattgggaacatttttttgtttgtttttttgaaactaaaatgtaaaaatttaatagaattatttttgattttaaataatgcttctgtttcgaatcttttgactctaagaaattaaactataaaatttagaacaattaattctctgaagtttttaacttggctttaccatgcttttaagccccgccgtgaggcgggacagttccaaaatttgcaccacattttactgtggaaagtccaagtaccttaattggacaactacgtgtcaatgagcacagtcgccgttggccagttgtgaaacagaaaaatgggaatatcagatggggtgcgtcccatcctaaaaattcctcttttcgtctaaccatcactccctttttgtggagtcgggggcgtttgggccccagtttttgggcccccgcgtttgggcccccgtttttgggccccaagtacagaaaaatttctgtttttcaaaaaatcaatgaaatcctgccggatcctgcacaaaaatcagatttgcggatcctgttgcaggatttgaattcaaaatcttttgccggaccggatccggccggattaatcctgcaaatcctgcattttcaaaaaaacgcaggattgcggattgggatcctgcaaaatcctgcgcaggatccggtcctgctccggtatctaataattaacaaagattttgggtgcaaaaaccgaacgtgtctgtacgtgtgatgacaaaatttggtggcttttccgttgccgaccgtccggctgccaacaatatt

SEQ ID NO: 24612 - DNA, 1261 bp, Heterodera glycines
tcctctaaaccaaattttctctagtttccctttgctggaggtctgaattttctatttttcagcctttccaatccaaatcaattgtcgtctatcacttttacccatttgacctcatttaaacttttcctaatgtattcgtctttaatcatttatcaactatttaaatctaacgtgtaagtggtcaccccttcgttagatattttatttattaataaaaagaagaacacttaattgccctagtcaacaaaaggagaatgaattgattatttgtgccccccccctccactgctcgccctcttttatttttctgctgagtaattttgaaaatacggtactttgcgttatgccacactttcccgccccctcccctggcggtgtgacccacgcgtttgggcgccggcaggtttttccactatagcttttttctttggcatccaaatccaaaaatcttggtatcattcgaaagctcttaacatgctctattagccttaccaaatgcaaaaagattttcaatcctggaaaaaattttatgaagaaaaaacttcaaaaatttcgactttagctctaactttatataaaaaatattgattaaattttataattccaggatattgaagtagctttattcgtttaaacagattaaggaaaatttaaataatgataagtagagcttccatttttaggcacaaaaaatcgcgaaataggcacctaaaaaggcataaaaaaatcgcaaaataggcattaaataggcacaaaaaccctcaaataggctaaaataggcaaataaaattttttattggcactttttaggtatcaaaacacgtaaaaaattaatgaaaaacttaattttgattatatttcaattgtcttaaagtgttttcttctaataaatacaatttttaaactaaaaatttttatcagaaaaaataattaaatttgtggatcaattttgtgaaaaaaaattcaattcttaggggtgtattttctgaaattttttcgggtagattcttaggggtgtaagtttcatttttgttaagaatttttccgaaaatcatgaaaaaggcgccaaaaatggcgaaatagacacaaagataggcatttaggcattaagctcaaaaagtccaaaataggcaaaaataggtataaaagtcatcatagacacaccaaaccaagcggaaaatgcttttttcgtgcttatctatgcgtattaattgcacaaaaattttaggcatttgcctaaaaaaggaagccctaatgataa

SEQ ID NO: 24613 - DNA, 984 bp, Heterodera glycines
ccattttgggcctgttgagctgggattgtccaaaaataccccccgccctccccggggctttttttctgctgagcgcacaatttcgtttcgctgtgaaagacaaacatttcgcgccccctccactccgtaagcagagatgccaccgttttgcaaccacaaacctttgagaattggccttccccccccccccctccgtaccttccgccaccgcattttcccctcgctcgctgactttcactccgtcgcccattggcactcaatgaaagggcaccccgcggctaagccgcatcatccgattccctcccccccctcccattcccattgattgcgttctctttttggctaaagcgacaagcaaaagcatgccacaaagaagaaaacggagggaaagttgagtggggggacggcgaacgacgaaaggaaagttcgtccgaatagcgtggcaccgctgccaaagtccgtcgctgactttgcgcggtgtgccattcattcctttctttgctttttccacgcggcggttgccacggcattttagcataatccgcccaattcggcgctgttctttgctccttaatggctaatcacttgagaacacacacacacactaaatggcgtacggcgaatgggtggcccaatgcctggggcttttaacccagcgaatggtttcgcccccggggcgccgcagcgacggacgtgcgccgcgtccgtcggccgcctgcccatggccatgcccacctcctccgcctccttaagtcggtcgtgccctttccctctcattaaattccctcccctttctcttttccatattccttcgtccctttctcttttcattttgccattcactcgcgcaacaaacgacggattattgccattctcgggcataaaattacgtagaaattcgaactcatagatgatttaacatttcaaaatgcgtcaaattcttttttaatgattacccaattaaataattgcattggcatttta

SEQ ID NO: 24614 - DNA, 1772 bp, Heterodera glycines
  unsure (1)..(1772): unsure at all n locations
tggcgttgtgctctctcgctgtctcctcctgctccatttcgtggntgtggtcggttcggatgcaatttgttttgatnaacnttaaatttaaattaaaattaaaataaaaaacaatatanaatgaaattctttttaaatatcaaaaaattttaaatatataaataaaggaattgtgaaatgttttgaaatttagtttgataatcaattaatgaaattttacacatgtttaatttaatttttaattattttttaaattattaatttatttttttaaattattaattagattttttaattattttattttcacccgaatgccctggcgaagctttcgtcaattgcctcaacttcgcgctgcaatttttccacctcttccgccgccgcttcgtcatccccgccgctgtccgtgtagtcaaagggtggcaccatcgcgcggttcagaaacagcggcgaccgatcggcgccgtcggcgtcagccgtgccgagcatcaaatggacgccgttcaaagcggcgccaaaaattgccacatattcggcggacgaaattggcggacatttgtccaacagttgacaagaggagggatctggcaaaaaatagcaaatagatatttttttttaattttataacagaaattttacaaaaaatattcttaagaaatttttagtaaaaaatttcaagaaaaaaaattttggaaaattttcagcgattttttggaaaatttttgaaaaaacttagtaggtaattaaaaaattgctgaaaattgtcaattcattaaaaaaagcaaattaataatttgattcaatgggcaccaatgtgttttttgattgtcggcacaatggctgcaatttgcttcggcatgccggcagttaacaatttgaacagtttgaaacggaagatggtgagatggcgtcgcaaaaatgtgttgatgagatcagtttgggctgttggatcagtgagaatgagcatctttgatgagatcagacgggccaaatggtggtgatggaagtcataaacggacagctgagagaaaattgcaaaattacgcaaaaataattttagtccataaattttattattcgtttaaaaaaattgccggttttaaccccacaataatttattaatgcgcctaatgtgtcgccgccaccacctcgatgcaatactcgcagatgaacaaaattgccacaaatttttcgccccagctctgctgtttatcactgtcgctgctgctgtccaacggaatgattagcgcggccgtctccgcgccagcgccgcccgtctcagtcccatcgatggaagagcactgctgctgctgcttgcacagttgggcctcatcctcgtccaagtacagcatacggtagctgatggccagcgctgtggcacgacggaacagaaacacttcgccaatgccggcggcctcagcagctgcaaaaaaatggcggattataaaaaaggataaaagtatcaatggaagcgatcaattattattgctacgaccaaattggagtatttcaagcaatgtgatcacaaagttgatcaaaaaagaggaccacaaattaagcattttcgaaaaattaatcaaaatagtgttgtcgcattttttcagaaaaagtctcacggcactgccggaccaacaatttgcttatttaacttttcctcaattttggcataaatatggagttctttttggataaggtcaaagaaaatcgtgtcaatttttataaatttaagaatttttttnaaggcatttatttcaaaaaaaaaatttttttta

SEQ ID NO: 24615 - DNA, 1384 bp, Heterodera glycines
gtcggggagtgggtgacaaaaatttagcatccccagggtattggatccgcttcagcaattgtccaacataggaataaaagcaaaaccgccggcagcaaagaaagaatttcaatttaatggtttcagcatattgaaaaaatgtgctagttacaaattcataaggcagctcatttttagtgaatttgatcactttaccaagcataactctttcgcataaatattagggttagacgggtccgggtacccgaccggatccaaaaatacactggtaagaatggggtctgggtcaaaatgttaggcaaagttggaggaaagaaaaaataaaaaagaataatttaatatttattgtaaaaaattcatttattgctcttgtggcctataaattgagccacaattcctcaattaattggtcacaggttccttctatttcgtcgacaattcaccaaattctgttcctgacgaaatgttcccattctttgaagaaacaaaaaaacggaagaaaggcgaaatttcattctttgattaatttttattctctttgtttttaattaattttgggttttttttattacgctaattacttttcttattaatgatcttgatttacaaattgacaattgatttatttgctatagtaaaatttgtttaaaaaacagtttacgaatggaatgatacagatcgtcatatttaaatgtcttttaaatatactttgaaacgaatccaaaagtgtgatattttttgccattgatgatagctcagaatgatttctgacttgagtttttctccactaaattttgcggctctgaattaaattacctcaaaacaaagattctttattttatatattcatccgtttaattcgttgaagacaaattaagaaagataaagaaatatttcaaaatccaagaaagaaatccgaaaattagcgacaaaaataattgataataaattgcaaattggctatggaacgctaagaatttggaaaaagaaattttcttaagttttggagagtaattctcgagggtgttaatttaacttccctggttttcttttagcacctataacttgaacgaaaattacttcagcaaatctcttaaaattaaaagatataacatttaataacaaattttaatttaaaaaaatataaaatattttgaagaattgatttaattgttcggtttacgtggcagattaatatttgtaaagataaataaaatgagatacttttctgttttggggccaaagtttgatttttttttaaatcaacagcaagctaatagaattgcagatccattcgaagagatattaactcaaatttatgcatttatgcctcagaaaataattttggggtgtagctttagcaattctccgcgccctctgttga

SEQ ID NO: 24616 - DNA, 1277 bp, Heterodera glycines
tgcctaattttcttcttaattgattcatcaaatttctcctgacagcgattaaatcaatgaaactagagtagagcgggaccgggaccgaaacacggacaactgagtaccgaggtcccggttttgaccgggactagtcccggttttttcccggttttcccagccaaaaagtcccggtttttcaaccagaaaaggtcccgggtttgcccaaaattcccggtcccgctctactctaaatgaaacaacaaaatatttacaaaaaaaaggacaaaaagtcgaaattgtacagaagagaaaagtgaattcgaatgaattcgaaccaaaaaattggacggaaaaactccaaattcatcttatttataattttttgaaaatgactggaaattttctgcgtatttaagcgtgaattccacacaaaaatcatccattcaatttgcatctattgtttcccatcggtggaattgtctttctgtacaataaaatacctaattcccgtcatttttttttaatttggcgataagtgactaggtaattttattaaatggattcatcaaatctctccgctgacccacaaattgtccaagtctcgaaattgagttttttattattcagatgggcctaaggttagacaaggcgtaatatacaggttatattcgtattcagcgacctcgaaaaccctaaaaagcccaaattagactcattttgtttttataaatttttaaaaattttggacaattcgtggggttttactcttttggacaattcgtggcttggacactttgtggggatgccaatctctcctaacagcgattgaatcaatgaaacaacagaatagatgttattagtacaatcacaatacacagatggcatatatttaggcattggtaacatcacatgatgatggcattttgggtgaaattatatacatacaaatcggatggatttgacgggggatcaatttcattatacaacacataaaggggagccacactctctaagatgggcacaattatccatgctttttaattagtatcctctgcaaaaatcttcgtccattccgatcgcctcttttctctatgccgttgttattttgttgtaccacgcgtcacgtcgttcagtcactgtcgctgagtgaggcgcttccggtcgcatttcccaccggtcgttctgttgttggcgttcgtcgtcgtcgtcacttccgcgccgcccaacggtctgttcgtcgctgataaacgtgacaattaattatctatgttgctacaacaaaaatgccaaaaaaa

SEQ ID NO: 24617 - DNA, 1201 bp, Heterodera glycines
tggtgggttgagtcccagtgattgacttttggtggattgagtcccgttgattggaatgttggtggcttgagtcccagtgattgaaatgctggtggattgagtcccgttgaatggaatgttggtgggttgagtcccgttgaatggaatgttggtggattgagtcccagtgattggaatgttggtgggttgagtcccgttgattggaatgttggtggattgagtcccagtgattggaatgttggtggattgagtccagtgaaatgctggtgggttgagtcccagcgattggaaagtcagataattgagtctcagagattgaaatgtggtgggttgagtcccagagattggaatgtcattgaaagttggtgggttgagtgagtcccagtgtttagaatgccggagatttgagtccattgtttggaatgccggagatttgagtcccagagattgaaatgctggagggttgagtcccagtgattgaatgctggtgggttgagtcccgttgattggaatgttggtgggttgagtcccagtgattgaaatgcagtagaattgagtcccagtgattgaaatgctggtggattgagtcccgttgattggactgttggtggattgagtcccagtgattgaaatactggtggattgagtcctgttgattggaatgttggtggattgagtcccagtgattggaatgctggagggttgagtcccagtgattggaatgttggtgggttgagtcccagtgattgaaatgtaggagaattgagtgccagtgattggaatgttggtggattgagtcccagtgattggaatgctggtgggttgagtcccgttgaatggaatgttggtggattgagtcccaatgattggaatgttggtgggttgagtcccgttgattggaatgttggtggattgagtcccagtgattggaatgttggtggattgagtcccagtgaaatgttggtgggttgagtcccagtgattgaaatgtaggagaattgagtgccagtgattggaatgctggtggattgagtcccaatgattggaatgttggtgggttgagtcccgttgattggaatgttggtggattgagtcccagagattgaaatgctggagggttgagtcccagggattgaatgctggtgggttgagtcccgttgattcgtgtgggggagggttgagtccccagtgattgaaatgc

SEQ ID NO: 24618 - DNA, 1237 bp, Heterodera glycines
  unsure (1)..(1237): unsure at all n locations
aggccgagcagtgcgcgccgattggtgtgtcaccggcgcactggatagcgatggagaagtaaatgaagtcttctgggatcccgtaaaaagtggcggcggcaattatacgattttctgttatatcacccttttaaaggaaattaaattttatttttacaatttttccaaagttttcattttattttcgtaatctcgtcaagaaatattttttattcaaaaaatgtaataacacctaaaacaaatgtgcaacaaagccaacaacaacaaaaaaaagagagaggaattttggcaaattttcaaaaaaccaaagcgttaggtcgtttcataaatattgtcttttaaattttcagacttttcttgccatacgtggtgtcattcgaaagcctaatgggtcgggactattttttggtcacccatttttcggaaaattcttttctaattttttttcgaatttaagaccaacaaaaaaaccacccgaattataagttggagaatacatatgtattattggatagcgcaggtcgatttcgactttgaattttttatagcgaggtgtaaagtaaaactaaaaagttatggggcctcaaaaattttaaattttcccttgtgttttcccgttggactcgaaaaaacctcagaaaaacttgaaaacaaaaaatttatgaaattaattttttaaaccaaaactaaactttaggaaaatcggaggtgccatttccgaatttgccgtcagaaatttttaataaaatctttgatttttaacttttgtttttagggggtgtaaaaaatataacacaacccaaaaatagggcaaaaacgaaccccgtgatgagcacagtgtcgtcgaagacgaagaatttcatgtgctgtaaccccacaatttcgttggtccgttcgggcaacgcacttttgaggaggccgcgcaatttgggcgtatgaaagagacggacctgggaaatgtcgaaaaaataatttccaacgataaaaatgtgagcattttgatttgggaaattttatgaaatttttcaactttttttgatgcaatttcgtagcccaaaaacgcaactatcatccccaaagaatgcactgaatgtcaatacaaaaaagaagcaattttgtaaacattttgttatagcaaaacttgaaaattcgcgggagttaaggcataaaaactaatgaatgctaaagcattganggaaatttttgattaaaaacaaaaaaaactcacattttttca

SEQ ID NO: 24619 - DNA, 1685 bp, Heterodera glycines
  unsure (1)..(1685): unsure at all n locations
gaacgcccacactgagcttttgtggaacgcccacactgagctttttgtggacgcccacactgagcttttntgtggaacgactcaccacgggataaaaggattaatgaaaaaggtatttttattaaacaaaactgatgaaaattttgaattaataattcagttcatttaattaataatgattttgaataaagacactgaaaaattctatgaattaatcaaaatgaattaattcattttattaattagtataatataaattccaaagagtaaaatgaattcaataaaataaataaatattttgttacaaaaaattgactaaaatttaaaaaaaacgaagacaaatttatcacaaaatgattgaagtcatcagacagactgatgacagcagaaactgagaacgaatgaatgactgattgtccttatctccgctaaaagcttctaaggaattaattattttttacccatttttaattaaaaaaaaataataatacattttaaaatgaaaaaataataatttatgattttttgtagtattaattgacaaaataattttgcaatgatgcaattttttgcttccattacacaattttgtgataaaaagttcttctttctgtttttgccaccatttttatcagcaaaatgttttctgctcatcaccaatattcttccacatttgttgaagcaattgggaagaaactttttatgagtaaacaaaaatataaataaaataaaataatataaatttaaaatttaaaaaaatgatgcttcataggctcatgccattcatgaaatgtgaaataattaaaaaaaaaaaagtataaaaacagaaataaatttgttgatttttcaataaataaatcgtactttttagtaaaaaaaatcaaattcatcctattttctatctttaaataaaatgaaaaattaatcaaattataaaatcgagaatttaatttcatcttggtgtgtcttcttttgctaattaacttgtcattgtctcattcatttttaaaatttggcgagcttttaacataataaaattttgggccataaaactttgacccatgagggataaaattcccctaaagttttcaaattttacctataaattggcaaattttcagtgtaaacctgttgaaaaatggtcaaaatttccaatttttcccccgacgcatctattggcaccgcgggacctgatttttgaccccaaatgctgattttttgtaggccaatgctggttttgaaaattttcagttgccagccctggatttaggcttccaggtcaaactttttcatgctgatttttgctcaaaatattaaatgtaagaaatttttatgatttttttaaataaaaatttgatagctttacaaacgaaatatgaaatccaaatctaagattggtgaatccgttcaattaaaatgctatttctcttaattttcatcattcgataattttcctatcactcattttttgttaatctaaaaaccaaaaaacattatatataaaatttgaaatccataatgcttaaagtgtttaaaacgacataaataatatcaaaaaaattatataatataaaatagaaatcagaaaatgccaaaatatgccctaaaaaattagataattaattaaatatagaaaattataaattaattcagctcattgttttttcactgaagaattaacagta

SEQ ID NO: 24620 - DNA, 1084 bp, Heterodera glycines
aaattattttcatttcaaaaaaacaaaaaataaattttataaatttttcgaggaataatgagtagggctttcaaaaatatgcacgaaaaatggctaaaatatgcggtgaaatatgcacaaaaatcgcaaaatatgcaccaaatatgcacaaaaaactaaattagggatggaaattaattaaaaaattttattccttataaaataagttgtttttgcaatttcaactcaaaaaatttctcaagattttcggcagtgaagctcatcgcgcacccattcagtttggatttaattttaggcataatcaaaattttttccgaagagatattcaaatcggaaaatatttgacgaaaaatggcaaaatatgcaaaaaaaacaaaatatgcaaatataagtcccgatttttgttcggaaacacaaaaaagaaagtgtttttcgtactatttagagcatggaaagccaggaaaaaaaatgcatttgcatatttttgacagccatgctaatgaggatcggatgtgtaacgaaaataatggacaaacaaagggtggtgaaagaaagaggcaaaccaaatgtgattttgatcagttacggagctttggagttgttcatggagaaattacaaggaatggcccatacagaacaatacaacagcaaacagtaacaaaaaggtaggccagccgacccttacctttttgaaaaagagggcacattaaaaacacaaaaaagtgccgcttaaaaataagaggttatttggatgatggtccaggccaatgttaaaaaaaacaacaagttcaaggaggttgttgaagaggcattggcgaaacaacaccgtgtaaaatgaaagaagcgcgcaattgaaaaagagtaatgatcaaagtattaaagcaaattgtgcccaaaatttttgttagtcggcaaatatttgaacgggaggagagattgccgaatggacaaacatttcacggttctgttcaacgaaaccacaaacagcagaagaagaaaggacaagatatcatcatcaaaaatggacaaaatcaaaacttataaagggaaataaaaaaaagatcttttgctgtagaaaaataga

SEQ ID NO: 24621 - DNA, 2396 bp, Heterodera glycines
cacatcccacgcactcacacttaaatccatcatccctgcatggccgccccgcaccaattcgaccacattccttacaattcagaatgcatgaacttttgtgagtgtccgcatttttaaagggcaattcgcatgcaaagcagtagtagtcgcgaccaaaaattgctgttccaactccacaacggatgccatcaaaatgatcgttgttgtaatagagcgatattggtgtcaggaattcttctggtccatatttatatttaggtctgtactgacccgttgtgccgaagatgaatactttaaattttagctccgggtatactgcgttccaatggtccactacacgtggtacccacacttcggcgtcatacctttcttggtttagtggaattcctgcatcgagcattaggcgctcagcgtcttgttgttgtgaatgcattttgttaatataattactgaaagtttgttttggcatcaccatgcagtgatagattctgctgatctccaacgcgtagaatagacaataggaattattattattacgaatcctcagcagatttttctcttttatgatgtgatacgctccttttagcgttcggtgttcggatccgcgaccagtaattgtatcccgctgcggtagattgacagtgtccagagtggttactattacactgaagggtgcaccccacagtgaaccttcccgcgactttgattgtgccacatctaagaagcgattcaaaattgtgtccactgtgtttggagttatctgacggatcggaatccaaatgtcagggtccaataactgtgaagtaattgttgcaccaagtcgactcggttcaattccacgtctctgagcttcatctaatgacgattgtatgcaatgtccaaaaatgactcgcaaaagcgactcaggatttgatggtagagtctggatcatgaatgtacttttagcattcattagtctgaattttttgttgaacgctacgtcggtgttcagcgcgcgtacatagtgccgaaaattgcgtcttttgccattgttgttgttgttgttgttgcttccacttttgaggatgtttggcattcttcggcgcttcggtgggctaggttcattgtttgatcgattcctcatgatgatttttgggattggccaataaatgaggttgtattgaatttttcacttaatttataccccgtactagcagtaatttccataaaattatgaatgaatcgtttcgatactcaatacctctctttttacgatactcaatgcctctttttctctaataaattaaggactaaaatgctagacagctgacgcatcaaaatgagatagacacaggagaaatgtgtcagctgacgccttttgaccccaatgcccagagactggcactagctggtatatttttaaatcatgattcggaatcatccacctttactaattgaaggctcccccaagaagataaaacaaaattttattcacgtagtttttaattgcaatgtcacaattataatccacacaatacaatttcagttgtttcaaaatttcatcatataacattccggttgaagccaaataaataaaaaatatgcaatagtgcccacaaacgtctgaggtgggagattgaaatgccattttgtttttactgacatgagggaagtgggacagaaatttctgtacgttaaaaggaacaggaagggccaaactatcaaaataccatatggtgttcaaacgcggaatatacagtgcgacccaatgcgcaccctcttggcgagcctcatccgtgtagatgatcagagatgcgggaaagggtcggtgacgctgttgtaattctatcattttggggatccgatccacgggaaaacatcctctgaagcactctctcgttgtctgacaagtggaaagcatcctctctatttggatgttgttcatttccgctattattgttgttgttgtttttgttgttcctagcttcgttagagttggtgacttggtcttttgtctggtgatttatttttgttttatgtataaaaattgagcggatggcgtacagtataccgcacagcaatgtaagtagaataacaatacagcaaaatacacgtgtccatacccacacgggcgatccgccacatcctccctcctcagagccggcaacactgctgcacaatgatataataaattctccgatccatgtactgctactgccacctccatatgtagagtcaagcgagtcactgtataacaactgaatggttggtttcacggtagttgtagactatcctaatattgcagacaaagatgacactgatatagctgtagtcgttggagaagaagaggaggcggaggctaaccgtctcatatactctttaaactcgagtagggtggtaggagtgattgtaacggt

SEQ ID NO: 24622 - DNA, 1254 bp, Heterodera glycines
ggccctcgggattttggcctaatatttgaaaattcataacaaatcgaagggttgatcaattttacaggaataaagccttaaaaatagagaaaaatcaggagaattttatggactttatttggaatttctatcttctaaagaaaaaaagttattccagaaattctggaaattttagatttttcagaaaaaaattcagaactcccttctgaaaagtcattctgtaaaagtaaaatactacaaaaatccgcaatttttttctctataatataaattttatttggcatttttatcacttttttgagagatgttacaaaaataaaagtgattttgggattcgggaccaaaggggggtgaccaggatttttgagtggaaaaattttttcaccaaaaatcttccagaaacatgttattagggctattttatgacgctgatcacgaatacgtgtgatcagattttacttttgacatcgtttagacctcagaatccctgtgtgattggggattctgagtcatcttttgggggggggggcggcaggttcgaatccggccggtgtaaattatttttctttgtattttttgggttaattttcattacttttaataaatttaaatgtttggttttattttcaatgattttaattaatttaaaatattttgttgagttaataaataaaaaattatatttaatttaattttttttgataaataaattttataagtttaaattaattatttttttaattgatagaatttcatgtatttttttaattaaatttgttaaaaaatattttcgttttaatttaatgaatttactaatcactgttgtacctcttctaatcactgttgtatcaatttatatttaaagatttgttgtaaattaataataaaagaatttatgtaaaaaataataattatcttttaataaagaatttcatattttttttaattgaatttataaaaattaatttcatattaatttaaatattcaattcttgtacatttcaaaattctctttttaattaataaaaggaatgactaatttattttttaaaatttataataaattgcattcaatttttgtacctctcctaatcactgttgcacctcttctaatcactgttgcacctcttttagtcacttttgcacctcttctaatcatttttgtaaatcttctaatctctgttgtacctcttttaatctctgttgtacctcttttaaatcactggtgtacctccttttcatcatttttgtacc

SEQ ID NO: 24623 - DNA, 2164 bp, Heterodera glycines
gactagtaagtaaatgatcggaaattggggtgatgatgcgcgatcataaagataattgaaacattttgttcaaaaaattaagtaattgatcataaagaaaatactgatgaataaagcacacaatgggagtaacattagaaagtggccgtaaagtgatcggaaaaattgctgacaggtgattgatcagaaaccaaatgcttaaatttatttgcacaattaaacaaaatgatggaagaaatgcgatcagaaatatcaacatttatgatcagatattattaacatgcccaaagagaagtggggcgaccggaaagactgactgattagaagcagtgaacaaagcacttttatttcaatttgattatttttattgatcaaattcatttaataataagcatattcattttactttgcactttacaatatttgattagaaaagtgccgaacaaaaaatgatcaattaaactcaacaaaatttaaaaattcttcggggttgatcggggccgggatttagtctgggtcccgactcgaaatccttccggtcccagttggccggtctctactacaaatctgtcagcaaaaataaaaattttgtaatttttaaaaattagtattaaataaatcttagaatcgcttgacctaaagttcctttaaattttaagggtttttacgtgttcaactaaaaaggcagaaaaaaactgcaaaataggcactaaataggcacaaaaatcctcaaataggcaaaaataggcaaataaaattttttgttaacgctttttaggtagcaaaacacataaaaattttcagttgtaaatgaaattattaaatattttaaattccaaaaattttttaagaaaaaatattaaattttctggatcaattaggcacattaggcacaaaaaccttgaaataggcaaaaaaaaggaaaaaaaggagtccctaattattaggtatttgtattataaaaatatttcatttttttttattgccatttattattttattgatcgattcaatttacaattagcatatgcataatccatgccattttcttatgatattgggcctatttctttgtagtttatgcaatttgatgtctttttgacaactacaaactggataagaagatcagaaacaaaatacaaatatttgattagaaaagtgccgaacaaaaaatgatcatttaaatgctataaaatataacatttgaaaagtgccaaacaaaagtgatcatttacatgctacaaaacacgaaatagacgttcggcgttaaagctgatcattttttatggtccatgcagaataattttttgcataatgatcatttaaatgctacaaaatacaatttttttagagtgccgaacaaaaactaataatttaaatgctacaaaatacaaactttgaataaaattctgccccataaaaggggtcccttgacctcagtccccacattcattcattcatccccaatttccccctccccattcgttcaaattaccaacatatttccctcaatgaagaagcattttggcttttcactgttctccgttggcattgctgctgggctaatgccaatgcttttcatgctgatgataatgccttcatccactgatggccatgaggtgttcgtgatgacaatggatgaacagcttctcgaagagcatggcgatcttttaaccattgagttgaaaaagggagcgagcgccatttatgtggcaactttgaagcgcaagatcgcggaagagattgacagttttcactctattcgtactatttatgcacatcaactgacaattagactagacatggtagccattatgacattgcgcttgatgacaacaaaacaatgaaagattatggcattggaagactcggaatcgtttatgcttcgacttttgaatttgaaattttcgttttgcatggtggcaaaccgtacaccatcaagatgaacaatggaaacacggtgcaaacactgaaacaaagaatcaaaagcagaattggcattccgcccgagcgccaaacactgagactcaacaatccatatgccaaagtgcttgaggacaataaagaaacaatggaaaattgtcacattgaaaaagaaacaataattttcttggcattggatgaatgtgaaatcccatgtggattatttatcggagcaaacagt

SEQ ID NO: 24624 - DNA, 1460 bp, Heterodera glycines
  unsure (1)..(1460): unsure at all n locations
ggaaacgcagcagcagctaaaaatcagtagaatgtgtgtgatgacacccatggacttaccaaatacatttttcacaattatttcaaataaattgttaaaaattgttactgtatgcaatacggcncagagcagggtttccacgggtcaccattattactagatctgggatttttatttgttagaacataaaaacacatattttagtgttttgacacataaaagtgtatcgcacatatttttgcgtgtcttcaaagatttactaataaaaaaggcattaaattttaaaattatgaaaattttcgtcgatgtaaaaaaatacaatttataacaaattgaacatttttattccataatttacagagaaattgcatttgaacaaaaattggtttttttgtttttatttaccgggtattggccagagatgataatttattttaatgtttttaaactaataatttattttaattattaatatttatttttaatttaattggtatttaaaaagaataatcattaattttaaaaaatttaaaagatatttgcgttattgcaaatactgccaatgtgtcttttgtggcaccccaaaaatatccccaaaccaaaaattaatttaatcaaattttttagagccatttattccttcaaaattatagcaacaataaatttactcgaactcacattcaaaataaacacaaaaaagcaaaaaggggattatggcaaagggtcttctttcaaaaagcaactgttgcacttggttgctttttcgaacaccagaatcgaatgatcaggcccctgattcatcaactttctccgccgatcctgcagaagaagggcttggcaggccgaagcataaaataattaaataaatttgattattcatgttaatgtttttttggataaaattgatcattgtcattgatgttattattttttaaataaatttgatcattcatgataatatattgtttaattaatatatattttaaatttaatttaattattcattaatcattaattaaaaacacttcgaaaacgtacttgcactactgcaagtactgccaagctgtcttcatcatcgttagaaactttcaaaggcacactcatttcaagtttacaagtgggtaattgagctttttttattatttgctcaatgtccgtaaaagaaggcagttggccctgctgctgcttctcaagcttatcccaattccaaatcacaatcgttttttctaacaagtcagcgctcatcgacaaattgcgaacagcacttacgatcttaagagcaattattatgacctaattaatttgttttaactttgccttgaagactttgcttttcaagcgtggtaaggcgtttgaaaggcccaaatgaaagaaaattaaaaaataaataaatatggcattttcgacattatggcaactcgtaaaaaatttttgaanaagtatcatttatattttcaaaa

SEQ ID NO: 24625 - DNA, 1988 bp, Heterodera glycines
atatttcacgtataaaagcaagtaaatttgaatattcttattatatatatatataacaaaacattaaaataataccaaataaatccaattactaataaataaaaaattttgttttatatatttgttaataaaattatttattactaactactttgaattttgaaatgtaagacacctattgaaaaatattttcatttcgagaaaaatgttaaaataatagacaacttccattcttttgctaattctcaacgaaaatgaagaacgtaaacaaaagagcactgttgtgtccaaaggacaaacaaaaataatatttatttgacagagaaaagaaaatataattttaaagtccaaaatcagaaaattgggaaatgcgacgaatgaatgaaaaatgaggtagggttgggaaatgggatacagtatgaaatggatgatgttcattcgtgtcaatacataataaaacatttaaattcctatcaaacatctccccttttaaatcatttgtcctcatttccgttttcgtctttccacgggttcgggtgagtaacgaacaaccggacgccgttcacggactggacgtggagttgggggacaacggacggttttcggcgtttgtgggctcagttcgtcgggttcggctggcaaattttgttcgtggatcagttcaggctgatggatctgatcattttgaacttttcctgcttggtagggaacaaaagaccgtaattgattcacgtgtcgagtgaccgtaattcccaatgttggaatgtttaccttccaaatcaaacctttcccacttaaaattttgccttccaaccaacttggcttactgtgtttaccatagttcaaagcaagaaccgagttaccaggcacaaattgtcgatcttttgtaccgtgatggctgtcgtactgctttttcattccgtcttggtactgacgattttgttccggtttgttttgttgttgtgaaggtgccaaaatcgacaacggagttcttggagaacgaccaagaaaaagctcagctggggaaaacccatttaaaatattattcggtgttgtcctataggcaaagaggaatcccgaaatccaattttgttttttggatgtggaatttttcttagcctgtcttttgaatgtgtcgaccatgcgttcagcctgtccattacaatgaggctgataagggggagaaaatgtgtgtttagtccccttggacttgcaaaattgacgaaattcgtaagatgagaatggcggtccattgtctgacacgagttctttcggcgctccgtagcgatgaaagattttgttcaacatatcgatcgtggccgccgcatttgttgttctcatttgcgttatttcgggccacttcaaaagagcgtccaccaggatcagatatgtgttgccatcatgacaagggcctgcaaaatcaatatgaattcggccaaacacttcttccggtatcggccaaggtctcaatggagctttttggggaagttttgctgctagctggcagtccaagcagctttttaccatgacttcgatttcatgatccaaacccggccaataaacgtgttttcgggccagtgccttcattcgaacaactcccgggtgtgcgaaatggagggtcgtcaacggaattatgactctgtttcctgtcaaaaaggatccgcccacaaaagcgagtgaattacgtctaacgaaataaggcattaattcgttggtggggcacttttgtggccaaccatttcgaacatacgaaaacacttgctgtagaagatcatctgcagcagtttgatcgcgaatttcttcggcttcaacaggcaattgttccaaagttgtcagatgaacataatttgttgctgcttcgtcgacatcaaacacgtcattggatgaagcaaatgcgaccacgacatcttcttcagactgtaaacgcgaggcagtataaattggaaaacgtttcttacttccgaaaatggctaagagaggtttgtgat

SEQ ID NO: 24626 - DNA, 1465 bp, Heterodera glycines
agtgtttggtgccaacatattcgtggtgccaaaaactaaatgataattaattactactttcatctgtttttttaataataatttttcctaattacgtcgagatcaggctgaaggcaaggcgggaatttcttggtccaaggaaagcacggaaaaacattctgaaaaattcaatgaattctaaatttttaaaattcattgcctaaccccctttttagccgctacggaaaaggcaaggcctccaattttccaaaattgcttagcggcaataaacacacgcttggggtgtcaaattgccgtgcaacattttggcattgttgtgcaggtaagagaggccttcgatcagctaaaggacgacgcatttaaatccatttaaatcacttttcgtttgagtgccaaaattatatggacatatcgttttatgaatggcattgactttttgctattaaattatatttgttccgtttgctttgcttttggcttaattagcccaattaatggcctccaaatgggccccgtgcctggagaatgccccgcttcatctccagcttctccaacaagggtccgccggcatcatccggttcgaactgttcgtacagtttgtccaacgtgcattgaacaggttcagtagcaaacgcaagaaggtctctaagattgagaaaataaaaagatgagtcatcaatttgcattgttttggccatgtcaatgtgccattggccatgccaatttggcattgttttgaccatgcaatgccaatattttggccatgccaatgccattccctccccctcatttcccatgctttcacttgctctccgtcaacggcttcaccattcgcacaatacgcggatgttgcaactgttgcagttggttcagatcatagcgcaacaaatcgaccagtgaaagccgacttattctgccgatgcgcgtcggtcccttcacattacattttttgtcgaacaaaaacagagagacatcctaagaaagaggaatgaaatgggaatattgaaaatgcaaatgtttgctgctgccttctcgttgtcctgcgccatgttcgattgtgccaagaaatggtgccaatgtccgccaacaatgagaccggcactttgaatgctgttgaggtgcgcgtccaaaggggtgccgcccgggggcggcatttgcatgggccgatgagcagcagcggaagagggggactgaaaggagggggaagcaatcaattaattaaccaattaacattgattaaggctaattaaatgaattaaaaaatcgaacgattggtgaagagggcggaatggcgccaccattggcgggcagtgtcatggatgaagaggaacaggtggagctccgcttcgaattctatgtaaatcaatgtccttttatggcttcccccctcccctttgattaccatttttgcccattcattccaacgtttcatctcttaccgtattctgttgctgcatggactgtt

SEQ ID NO: 24627 - DNA, 1331 bp, Heterodera glycines
ctgctgcacaattattattattatttatttttttaatcaattaagtgcaaatctcccgaagagaatgacattggcaaaaatggacagcagcaacagcaagccacttcaaccgaatgaatcaaagctccaattaaatttaattagtgtcattagggtgggtcacggcgaccgtttcactgaaccgaaacaaaccggctttttgggccaaaagctgaagcccgacgggtcctaaccagaaaaccggcttattgggccaagagagaggtccaaaactggccttacaaaacattttgggggcttaaaattgatgggtccaaaagcggtctagccgaatagccgacagtgacccaccttaatattcaaatgtaatgtagtggaattttatgttgttaattttaaagtgctatattagtaactttcccgtcgaaccaagttttctgcgtgttttgtttaatcaaaaggccaaaggcatcggcgtgtgctaaaaatgtaaaaattttttttgttaaattcttatgaaaaaaaaccactcaaaaattttcggacatccaatttatctctcctaaattagtttttttttgttttgttgttgcgtactatatgccagaataatttaagatttgatgtattaaaattagaaaaagccaaaaccctggggtgcatttggtgaattagcgccatatttaggggcgaggaacggagcgaatttattctggtttcctctcacaaataacttttttattctcatcaatacgcgggtgaaaatgaagcacttgatgaaaagaaaaatcaatcgttgatgggtcgaaatcataaattagactaatatgtcttatgacagatatcctccggccccgtatgcagcagcggccgccgcgttgtagtaccattgggcgtatgccgcggcagacgcatttgaatacatgggcatttgctggaatgaaaaaaactttattaattatatataccttttaattatgtgggggataatagagtaaaattttaactcccaaaaaagcaccgtattttttccgtaaaatccgtaattgcgtgcagccctgtaaaacacattgtcaacaacaacaaaaaaactaaaactgagtccaaaaaaacaccgaatttgccaaggttcctcaaaccattcaatttgacccaaccttctcccccttgaaaaaagatgacagtatttggaaacacgattcccttacccaatcggatcatggaatcaaagttctccgacacaaataggatattaataaccattccatgaattaacgaatgaatgttttttttaacccaaaaatggaaaaaaacaaataaaaagcgtcccc

SEQ ID NO: 24628 - DNA, 1652 bp, Heterodera glycines
  unsure (1)..(1652): unsure at all n locations
gaaaaatgaaattaatgtgagacaaaagcgattttgtaattannnattcaggaattcnatgaaaagttgccaaattgggaacgggaattgaaatgggcaaaattggaactggaaaatgtgagtttgctataaaaattgagtaaaattataaatgcaaaaatttctaaattattttagaaaggcacttgaacaaaaagttaaagcaccagggaattggtaggcgaacagaaggcattgaaggaaaaagtgaccaaaattgaacagaaaaacggtaacggtagagaattataatactgtaatataatggcttagaatttaattattggaatattaatatttatcattaaaactggcaccacttaaataatttgaccattggataaaaacaaatgggagggattattgtggattttctataaaataatgtttatgaactcaggttatgaaacctgttcccatggattcggaatcactgtgttcacaaattaccatccattttgacaaattttccgaattatttatcccaaattcgaacccgattcaagaatccagaattggtagaaaccataaaaaaagaaataaccataaaataatttgacaactttaaaagctataaccttttataacttgacaacaattttaaaaaattaattgaaaatttgttacaaatttcagtttcggacggtcatttgaaagcaattttggagagaattggtcaattggagaagcagcaacaacagcagacaaaaggcgaggagaaattaaaatgaaaaagtattcaatcgaattaaatgcttccattttaaatttaaaaattaatccgatttttaagctactggggggcaattgtcaaagattttggaaaaaattggtgaaatggaaaaacagaacgaaaacacggacaaaggcgagggaattttagcgaagaataaattatcacttattaaaaattctttttttttgaataagtttcttatatgaattaagaatttcatttaaataaattataacatttttaatttttgaaaattaattttaggaactttggagcaattttcaaagatggaaaatgatcagaagaacattttggaaagaatcttcagtgaattggagaagcagacaaagaaaaaggtgaatgaattggaagagaaaataaaaataaataaatttaacggtaaaaataatttttaatttatttaataaattattatataataattattaaaaaatatcgaattatttatttcaggggtttttaaaattccaagaaaattgttattttgtgtcaactttttggctctaaattttaatgtcttacaattagtaacatttttttggcaaaaaaaaatcgtttaatttcggcagaaggcattccaagaagagcttgagaaaaaggtcacggaacgaattgtggcagtgcagtcgaaggttgacaaaatggaaatggcacatcaacagcaaaagggtaagtaaaattggacaaggattactgtactttaccgtatattattgttattattactgtcaaatattaattgaatttgttccaatttaagttgtcactgaaaaggcaatttttgagcgaatcggtgaattggagggacaacaaaaacaccaaaaacagcaagaggaaagggagacaaacggcgaga

SEQ ID NO: 24629 - DNA, 1637 bp, Heterodera glycines
  unsure (1)..(1637): unsure at all n locations
attttaagtaaaaaaagcaacaaaaaaattgttcgaattcgggttcggggttcgaaattggtcgaaatgaatattatattcgtgatcagcgccctcgagaaccctaaaggactttgaagaattgcataaaaccccctttttgcctcttttttgtgggacctgtaaaccatactattacgccaaaaataaattttaagatttattttgtgttacatagttgcatatgaatataaccaatggtcagtagccatcaactatcgatttgtattttaatatttcctgtaggaccagcgaaaatatgacataatgttggtccgataaatatcggcgggttcaaacattttttaaaaccgcttttggaagcaaatgccaaaatatcataaaattaaaacccaacaaaacttaataataatttaaatataacaactttttgccacttaaaacgatatggagacaggggatgaacacatagcagcgatacgacattataacatgaatagaaaaacaataataatgacgaaaacaataacaaaacgctccattcgtcctatgtgactttcgctattcttccactgcaaccaccgattgcatattgtcacggaaccaacgcgcattttcaagcagggcaccaagacggacatgcagctgttcccactgggcacgttggaacactcgctgaaaattttattcattaatacatcaatttaatcaactttttacaaaaaggagcgaatccctggggcatgatactttgccttctccatttccccgttgtaccctccccaaaattgagaacaattatagttttctttgtgaaatcgaaatttaattattttactttcttcgattggaaataattagagaaaattttgttgttcgagtcggaggcttagacctgatgaaaagattggtcacctgttggtagaagctgaccatcagttggtcgtccaactcgttgattttgccttggatggcattcgcgtggatggcatcgacgataaattcctccaaatgatcgcggtccgaaatgtctaacgcgttgaccaaagtggtcaatgggatgtgctgatggattgaagaaaaaatatttatttatagtttgtccttccatttaatggcacggattcatcccatttttgttttttaaaaattttctttaaaatgtttaattttctgcgttttaataaagtttcgaccacaaaaaaagagttctatcgctattgcttaaaataaaaacctgcgccttctcggccaacaaaatcagtgtcaactgtttcatttttgtctccagtgtttgctcgtcctccacccggagttggtcacgcacaaatgtcggatggtcggcgacgaaacggcgatagtccgccaaagagccgtagacgaaaataccgagcatttggaacattaacggatcagtctgttggtgaaaaagtattacttttacgagattaatacggggagacgaactgctcgccaacctttttgaggctgtttaccgcctccaggcccaacaaatggtcaaaacagaaagcttttgggtctacaattgttgtgcggacgcattcgcgcgcgtcttcttgcgcagtcggcgcgtcttcgggcgtgtacgtcttcaagagntgtgcacatcacctgca

SEQ ID NO: 24630 - DNA, 833 bp, Heterodera glycines
aattcatacactaacttgaaataactaatgagtagggcttccttttataggcacaaaaaatcgcgaaataggcacctaaataggcaaaaaaaaatttattaaccctttttaggtagtaaaacacgtaaaaacttaaatatttctatttgcggcgctgacatttgaggcgctgacatttgcggcgcgacacttgcggcgaggaaattagcggcgctgacatttgcggcgcgacacttgcggcgccgacaaatgcggcgcccagtcaaaaggacttttgcggcgccgacacttgcggcgcccattcaaaacgacatttgcggcgcaaaaaaaaataacctcaaaaaatatttcaacaaattatttaagttaacagaattgttattttaatagtttcttttttaacaatgactaataaagaggaagggcaccaacaaaaccgcctgaggccttattgaattgacccaactcgtaggacacaacccgtcagtgggccccggcacgtttgggccccagcggttttttgggtataacttttttctttgtcaaccaaatccgacgacattgttggtagctttctgttcggtccttcaataaccgaagcacaattaaaagtccaataataaacaaatatttattggagaacacaaataataaatattgattggagatgcagagaggtcggaggacaataataatgaacatgcaaaaaggacgggggagaaacatagctggggaatgtagtgtctgacattgacaataataagcagacacaaagaaaatagtgaaataaaaaaagggagagaaaaagaccaaataaataaatttaaataaat

SEQ ID NO: 24631 - DNA, 1652 bp, Heterodera glycines
  unsure (1)..(1652): unsure at all n locations
tttcgccccatgttgattacggacatattatgcttgtntaggacttaccagcacttttgtcggcgccgttctttggtttttggaacagcgcaccgcctttcgtcttaccaccgttttctccgcttgcatcgacgagttgtgccgtcaacacaagtcgcccggggcggcctcgcgttaccgctttttgctctgggcgaccgtgccgtccgcgtcgttgcgacggcgcgcatcactgtccacgcggtggggctccttcacgagtatcggccacgtcgaccaaacggtcggatggaagcgaaggcgacggacgctgcacagagaaccgcgcgagttggacgtgtacgagttgcagcggcgcggtgggctgcgcaaggtgaagagcgcgtcctcgcggcgctggtccttcctcaaccgcacgatcagcccctgctcgggcgcctcgtcgcctggcctcccctccggctccatctctccctctccgtccgacatcgtcgaaaacggaatcacgcccgaggcggaggaaaacgcgctgaacgaggcgatagcggccaactcccacgacagcaccgctacaacaatggcgggcggctcctcctcatccgcttccggctactgctccaacatctccggcgcttcggcatgcactcgcttatcggcatcatttacagagccggaggacccttcggcaccatttgacccgccgccgccaacgccccacccgagggggcccaactcattggtcgtgatgccgagaaatcatccaccaacattcactttcgatcggaatgttttggaacaaaatgaattggacggcgatgacgaaagggcgaaaaaatgaaaggttacccaaaattcaatttacgaatttttattggcttatgcttttttcagattatctcctttcgattgatggacggagatcgattgatcactcggtatggagtagtgatcaatcgatttaccaatcgattgatcactcattttgatccgttggattaaatcgaaaggatttaacggacaaaacattaaaatgaccagcacagaaaaaagaccgaataattaatgaactgggctttgtctggtcacatcgttcgaatttgtgctttgatctcagccgccagatgacataaattaaaccggggaaaaaagcgattctttcaaaaaatttccatgtgtcgttttttgctcaagaaaataaataaaaatcgtttcacacggagagaattaattgaccaaaagaaaattcgagaaaaaattaaaaatttgaatgtgccaaaaaaagcagaaagttttccaaagttttatagtcatttaatttgacgacttaaaatggcaaagggacaaatcattcccaaagcgcataatttttaaatgagaaaacatcgttcctaacaccagtaattaattaattaattacttctcaaaatccgctattgcttcgccccacacattttttttgttaaattgtggccaaacaaaatccatgctgatttgcacggcactgttcgcaatttcaccactcaatttgtttggctttgtccccttttgcgtttcgattttcttcggatgactcactcatcccacccgttccgctgatcgctcaccttcggatggatgaagtgagtaaggttcgaaggcgggactgacggacg

SEQ ID NO: 24632 - DNA, 1660 bp, Heterodera glycines
attttgaaaaaaactatcgaattttccttttttattttaccttatttaagtgaattctaaaccaaagagaaaaaatgcattaaaaattgactatttaattgttttcaaatggagcccttccgcttacgaccataccacgttgaaagcacgccatcccgtccgatctggcaagttaagcaacgttgggccttcttagtacttggaacggagacgtcctgggaatcgaaggtgttgtaagcttttttaatctttcctttttaatttttataggtgaaaaagaattaatttttttgttgaatttatctgctcaacatatgatttattctgtataaagatctatttttcttcatttaataacatttatttgttgtctcagaaagtgagaaaaaataaataaataaataattaaattgttaaaatgtatgatgaaaagtgaacaaaattttttctcaaaataaaatttgttttatccaaagggtcaggaaaatctttttgaattccaaggagcagctataaaagtcatgctaaattttataatttcagttttcttaaaaatcattgaattttccattttatgtccattattttttctccgaatatcttcagattaaaagaatgtcattcactctctgattttatcgggataaggtttaaaaagcgtttttagtttggttttgaaccattagtttgacttttatatccccattttgccttttggcattttgtgccggaatggtttttggatttcttagcggaatacaataaaattggcacctcaaaagaatgactttaaccactaaaaatggttgttggataactttcttaaaatcaccaaacctaattttcttatgaaattttggtttttgaggttttttctaattaaaaaaattgaattgggcctaggaaaaggcttcatatatgatttaaagagaaatttcaaaaatcccgaattttgaaaaaaactatcgaattttccttattatttttaccttatttaagtgaattctaaaccaaagagaaaaaatgcattaaaaattgactatttaattgttttcaaatggagcccttccgcttacgaccataccacgttgaaagcacgccatcccgtccgatctggcaagttaagcaacgttgggccttcttagtacttggaacggagacgtcctgggaatcgaaggtgttgtaagcttttttaatctttcctttttaatttttataggtgaaaaagaattaatttttttgttgaatttatctgctcaacatatgatttattctgtataaagatctatttttcttcatttaataacatttatttgttgtctcagaaagtgagaaaaaataaataaataataattaaattgttaaaatgtatgatgaaaagtgaacaaaattttttctcaaaataaaatttgttttatccaaagggtcaggaaaatctttttgaattccaaggagcagctataaaagtcatgctaaattttaaattcagttttcttaaaaaatcattgaattttccattttatgtccattattttttctccgaatatcttcagattaaaagaatgtcattcactctctgattttatcgggataaagtttaaaaagcatttttagcttggtcttgaaccattagtttgacttttatgtccccatcttgcct

SEQ ID NO: 24633 - DNA, 1866 bp, Heterodera glycines
aggtaaaacagtgattagaagagatacaacagtgattagaagaggtacaacagagattaagaaaggtaaaacagtgattagaaaaggtacaacaatgattagaagaggtacaacagtgattggaagaggtacaacagtgattagtaaattcattaaattaaaatgaaaatattttttaacaaatttaatttaaaaaatacatgaaattctatcaattaaaaaaataattcatttaaacttataaaatttattcattaaaaaaaaattaatttaaatataattttttatttattaactcaaaaaatattttaaatgaataaaaattgaaaaacacgaaaaaaatggtagaaaaataatgtacaccgcccggcttcgaacttcgcccccccccccctcaaaatgatgcctcagaatccccaatcacacagggattctgaggccttaacgatgtcaaaagtaaaatctgatcacgtattcgtgatcagcggccgaaataacccctaaaatcatatttttggaatattttggtgaaaaattttttcattcaaaaaccatgtgctcccccctttggtcccgaaccccaaaatcacttttatttctataacttttttcaaaaaagtgataaaaatgtaaaataaaatttataaaatagagcaaaaaattgcggatttttatattattttacttttccaaaatatcttttcagaaccgagttcagaattttttactgaaaattcgaatttttccagaacttctggaataactttttttagtttcatgatagaaaatctaaataaaacccataaaattctcctgattttttgctatttttaaagctttgttgtatgaaaattaacttaccctgaggttagttatgaattttcaaaatttaccccaaaatcccgagggtcaaaaaaaatgaaaaaaatttcgaatttttaaaaaattctaaaaattatgaaacgaaaaacaaaggtcatattcgtaatcagcatttcaaaataccacagaaaaaaatttttcacccccattttcaacccaaaaaaaattttcaaaaatttctagggggcctagctcgaaaatttttgaaaattttcgaacatgtagtacaccattcgatagcattttaaaagctctacaattttgctctaaggcaatttttggctagaaccaacccccgacgagttatgggcccgggactcaaatgtcccgcttaggccaaaaaatttttctatttcctggaaaaaatcgaaaattttctaaaaacatcactaatcgatagagctcgaaaaacgatgttttggaagtggtcttcgttttccctggaaaaatcgttaaaaaatcataaaattcaaaaaccgaaaaaccgaattttaggcctaactcgaaaaattttgaaaattttcgaaattttaaaatttggaaaaatcaagctcattgagctctacaataagtctgctggcgacccctcgctccgagcaaacccttacgagctattcgcctggtactgaagtgtccaaaaaaagtgattcttacgttgcataacctacaggtcaggcctttgatcagatcaaaaattttttgctggcaaagttgtaggccatagttggggcatttcgcttttggggtccgctaagctatgaaagcaaaagcaaaaaattttgtaacactgagactgacggcaaagtcggtttttgatccgctggtactcagttggtccttggaccggaaaacctatattttttatcggatgcgcctcaaaaagttgtaagacctttccactactttcagggcgctcccggccttcgacctgggagattttgtattaacaatcgaaactcctcgtcaatataacatatatagtaa

SEQ ID NO: 24634 - DNA, 2073 bp, Heterodera glycines
  unsure (1)..(2073): unsure at all n locations
agcccgatgttctgcttttgaaaaattttncggtcgcatcttgcatttaaacaacaaaataaaattcaaaactaaaaatgaacagaaaaaacaacataaattcaatgtcatacataggcgcagatccattattaattcactgttattttgaagtgttttcatttttcaggtcgattttggcgatcagttcgttgatcagtttgtcggtatgcaaaactaatctttctttggcgacttctcagcctcacgcaatttgtttaattcgttcaaaatcgtttcagttttttcgtgtgcaaatcgatcagatagatggacaagtgcttgggaagcagggctggctgggcgtaactggattttcaattatggaaatccgtaattacggcgaatttctcaattacggattccgtaatccgcagggctcccaagtgtgcttatttctaagatttgtgcttatttcagcattacgtgcttattttgggatttgaaaataaaaaaaatgcaaattttaatgaatgttttgaattatcgtcttttattgaagcgaatatttgaattactaattcgattttgaaaaaattcaaatttatttcgttttattgagtgtaaaatacccaaaatttcagagaaaatctgtaaaaaacagtcaaaatttctatttttcctccggcggcgcttttcggctccgcgggtccccaaaacttatttgttttcttaaaaattggctcaaaatctcaaaaattggtcattttctggcggaactctgttaacaaattgggcgctacttaaaaagagtattcttttgaaaatttcacttttttttggtcaaaaattttttttgttagttttgatacagaatttgttttttttaacagatggaacgaatgacaaaaaaaaacaacaaaaaaagtgaaagattttgaatttatcaaaaaatcatagagacccttttgttttgcaaaattttgtgaaataaaaaattgtgaatatatttttattcgcaaaattatgctcaatgcttaaatgtgtgtaaaagtcaaaaattctctaaaaaaagatcatttatattatttttagaccaaaaatgcgaaaatttgagctttcgactttttgctcgaacccgggttcggggttcgacataggtcgaaattaatgtcagattctgattctccgacccttaaaaccacttatacaatgttttctcgaaaaaaaaaattttttggggggtataaactggaaaagtacctaaatttctaatacattttccccgcattttcagttggctgtgcaacgacatttggatggacattttgccgctttttcgtcgtcctcaactcggccgaaaattggcacttctttcgccacgtttcaacgcgttggtcgacaaacatttcgacagcaaaaacgaactgacaattttgaaacaaatcagaattgacaagatgaaaacaatgccgaaactatgtgtagttaagaggggcattggaatttttaagcaatttccaataccagaccatccgatgcacaacaaactccgttttagcaagcttcagattaagtaaatcaaatcgctgacctacaaaatgtccaggccacgaaatgtcgacaagagtaaaaacccacgaaatgtccagaaaaaaaaacaaaattaaattttataaaaatctggaaaataagttcaccgactccgaaaaccctaaaatagacttacagacttatttttcggatttttataaaatttaatttcgttttttctggacatttcgtggcttggacacttactttgtgggggcgccaatcaaattcaaagaataaagcattcatcattttttaggtacattgaacattctgtcatcacatttctctgtgccaaccagcaaatttttgacaacgccatcaatttggatttgcacgtgtcgcctttctcctatacccccaagaatgtgcacccaantttggagtgtttttgcccgcaaaatttggnccatttttgcgccaaacattcgccatttgaaacctttgctgatggtcgtcaacttgaaaatttgcttcgctacacttcgccgacaattcttt

SEQ ID NO: 24635 - DNA, 1389 bp, Heterodera glycines
  unsure (1)..(1389): unsure at all n locations
aattttgtagtataatagagatcacttagggctatctaaagattccaagattattggatttggttgacaaagaaaaaagttatagttcaaaatctcgccccacgcgaaaacggccccaacgcgaaaacgaccccgactccccattttcatggtttttgattaatgtcccagcaccgcttcaaacaaaccgtgctaggatgaagtccgaataatgcaaataattaaattgaagcaaaaaaaaaaattatttaaaatgttcaaacactagtaattaatcaatgtttccacgcattgttttattacatcaccatttctttagaaagttcaaaaattaggaattggatacataatgagtaataagaaatgcacagaataatagccagataaattaaggcgcctttcggcaccgccgacgccccaaaatgcgtcactttattttttgttaattgactcaaaaactgcgtaaacattaagaattgaacaatcttttttgaatttaaaaaacacattaatgaataaaatcagaaaataggctgaaaaaatattaataaattggctaagcatcgattgtttcttaatattattaaagaatatttacgtaccacagtttaagatcaatttatttttatcattttaaataataaatttataatatttacggttaaaacatgtttttttaaattatataaataggctttacaatttaaataatgaatatataaatatttatagttaaaatatgtttgtttttttaaactaggtgcttgctaatacattatattaggcattataatctattattcttttaatgacgaaaatggatttaaaataataattgcggccggaagaaagtttcgtatttatgcagaaaattacaatttatttgaaataaaatttgtgtattacaaagggagctctaatttctacatgataatatgaataaaatataaaacaaattttgggccaaaaattcataaacaaaattcctaaaaaatttaaaaccattaaaattccaaaaatagaaacattcccttttttaaaacaaaattttaacatttctgattttttttttttgtttgttttgatttaaacccaaaaatttttggcctagaatatgccataaataattattcataataatgatttcataataatgaaaatgataatgctcgtcgtctagtagagataaagcgaatcgaacacgccaagacccgccccgatgccgccctcgttgctggatgcgcacttggtacggatcatctgggcaggctgtgtgtactctaccagggtgcctgccttggtgtcantaacacagtaggtgtacacgcccaactccgtgatcacatcgctgaagatcggcttttcattggnccaaatcaataattctga

SEQ ID NO: 24636 - DNA, 895 bp, Heterodera glycines
taaaaaaaaccaatacatatgcacatttaatataacgtaccacttcctaagaccaagtgtgttccgattgtccctttctcacctcgcttctgcttcaacaaatcttcattttcgcctcatattcgctgtttttgtgttttgatttgaggtggtttattgcattggatgtgttgcctttcttacatataatattcttacaacattcggcacattcgtactcgaaatcattgttgttgctttttttatgaagcccgatttgccaaatcacacttccagagggcatgttgactattgctgtaatgttttagatcaataaattaaaaaaagaaatgaaaattagtgataaacttttcaaaagtccgaaaacttaatcaaaaaccatcgaatttcaaacagtatattatgccaaaaattgttattaacgggttatgtcgcttcaaatcgccagtcggtttttttcggtttttgaaaaaagtcggtcggttttttcggttttttgattatttcggtcggtcggtttcggtataaaaaccgaaaaactcaaaaatttctcggtcggttgttttcggttaaaaaccgaaaccgaaaaaaaccgaccggtccgatctctaatgtcaatgtgatgcactaacctctacaccacattccaaatgtccgaaattgagcaaattttctttatttaataaaaatttggcaaatggttaaaaaaattcaaatttcgtctaacttttttgcattttctcccacgaaaaagccattcttaggggtgtatatttaaccccgaccccgatcggggttaagggtcggggttcggggttgtcggggtatgaagcgtcggggttcggggttttccccgaaaatggccaaaaatgtcggggtcggggacgcaacccta

SEQ ID NO: 24637 - DNA, 1894 bp, Heterodera glycines
  unsure (1)..(1894): unsure at all n locations
atcaaatggaaatgcnngattcgtggttcattgggcttgctgctgcaattggcgtggcttaccttttagcccagtcttacaagaacatgaagcatgtgtgnaagcatcagtgagtcttcttttgaagccattttcttttttattgcgagtcaaaattatggggtttattttaaaacagaatcgtaattaaacgtggtgacgccattgcccgtgagatgaaccgaattctgtcggatgacaaaaagatgtccaagaaggaaaaggacgaacgcattttgtggaaaaagaacgaagtgggcgactacgaggcgactctttttgccattttctacaacaatttggtctgttttccatctttagcaccattagaccgaaattagaagaattagtcaattaatactatacaatgcttatttcactttccattcctattggtgccccaatctcagctctttttcgtgctgctcgtctttctctcattcttcattctctactccatttcgcccatcttcaactgtcttgtctcgatgtatggcgctgcgggcattgttttgctattctcaacttcaaagaagtaaagtgatgactatcattccgataatgtataatttgttattcgggagtaaacaattaaagattgttgtaatttattttaaaaagaatagcatatacatcatttgaaaatgagttacattcgttcgtacaataaggaggattcagttggcctacattgcttgttgaatgcagccaatgtcttttcccgttttcatatctgaatcccttgtttttcttcatattattgtacaattcgatcaatgccttggtaatagtaccgatggtagcccttactcttcgagaacaacttccaaatttttctcgaatccgggttcggggttcaaaattgagcctaaataaggctagaatcgtactaagcgctcggattacatctgaaaataattttctcaataatttaaaaaaagattttcgggaccaataatctgtagcattgcagccttagttaccctagcgttttaaatccaaattttcgtgtaactttttgcaaaaatctagatatagagttccattgacattgtacaacaccggcaaatttattctataaaagtttcgattgtacaacatttgcgtcgtattcatttgtaattgtccatctccgaatgttaatcatgctttcacactgcaaaattttttgtctgattaagagaaccacaactttgattaggtccaattcatcctcctaaattttgtttattatgctttttgacttcacgcattttcaaataatagcctaaatttccaggggacaaaaattagaaaaaaacccgagaatgaaatacctaatactgaaatttacatttgatttttataggggttgaacaatagaaggcccgggcctttaaatagcgaatttacggatcttgtttttttaaatgattttttttctttttagtcattttctaaaatgatttttttgtcacaaaattaattaaattttctaagcagtgattttaatttgttgattttactggaatattatcgttaaaaataagaatttttgcgctaaaagtgtgtttttcgtgcgtttctctccaacaaagcagtagaaaaaatagttaaatcaataaatgccggcccgactaaattattttaaaattttggatactaattaaacaacactcaaaataagtcaatttaaaaccaacattaattgatcatcatcaaaggagttcgctgctgctcgcaatcaaacgagcaaaagtccgttgcaagtttagcctggtcaaataaaataatgaaataaaattggtaatcggtcaatttgaaggatgagttttccgtttgtttagcaaaaatataatttttcatctaatgaaac

SEQ ID NO: 24638 - DNA, 1702 bp, Heterodera glycines
tggacaatgtttgtcttcttgaacggaagtgagtgggctgacaatgagaatgatgagtaagggaacggaatgaatggaagtgaatgatcagcggaagtaaggcgcatcatccgacggaagagcatttgaggcgagggagtggtatagatggacgtggaagaagcggaaaatgaccaatgaatggtcagcagtagcaggggcatcgctaatgaaggactaatgagtgctctccaactgaatgagcagtattttttaaatctcatttcaattcctattcgaaaggcccggtcccatcgaatttccaatcctttaaccgtctcgggagcctgtaaaagtgtgctttgtcggcctcggtctgattggaacttatcccacgcttgaggtctgatagaacttaggcttaagatgtttaagcggtctttttccgtttctccgattcgactgatttttgagttttgtttcggtttgcccccccccgcccttctgttggttggttcgttttttcattttatccaacaacaattcttccggtccaatccaattacattttgtctttgtactatcttactgtacccttcctcctcccttttcccttcccccatttgttcgtctttgtctttcgcctttcatttcatttctcatcattttgttttgtttcttccctttgcttaagcgtgggaagagcttcgtgttcgaacccttgcaaaaggggcgtgattattcgtttcatttcttgcgaatggtcatgaagatttgattagcccaccgccccactaatgacggcaccgttgtgggaaattggcatttgttggcattgaatggcactcttcttgtcctcctcctcctcctcttcccattccccctgcttcttcttcctcttccctcatcttcatccatccaatggcataacggagtcagttggttgccctggtgatccgctgaaaaaccagcggatgggaggacaaatgaggacaatgttctgccaatgaatgggccacataatgcaataaaaggacggcacaaatgttgggatgagaaaaggaagcatttaatgttggaatgggcacgggcagcgaaaggcgagcagaaggggggaattggaaataggtaatattttaaatcattttttgacattccaaaaaatatatcattcggttggatttcaaaagttgaaagtgtttcggtatattcaatgtgtgatgaggggagctccgtccgtaaagtaaggagaagacgtcgttattagtgcgattcgattgggccaaatgcttggccattcactcgtccgaatgtcctccctccccccccccctccgtcgtcccctgtcactcctcccccaacaaattctcttcggatgatgacatttttctcgtccgtcccaaattcagtccttctctccgcacttttgccctttgtgagttgcccagtgaatggatttggacaggctcgacttgcccctcctttggaatgcaaatttgggcgggaaaaaaagggataagaggcggaggaggggcgaagatgggagggatggaaagggatgggaagaaatgggagggagtcggacggggagtgggacggagtgatcgaaacccctcggggggggatatttcttagtcgttacggatatattctctgatcaacaatgctctcaaaaaaacttttccagactatcttgaacaaatctccaaaggttggttgtctg

SEQ ID NO: 24639 - DNA, 967 bp, Heterodera glycines
  unsure (1)..(967): unsure at all n locations
ttttctcgctccccatagtttgtttgagtaccccaaacagacacttgaaaaaatctatttttttatttcctaaatattttttcataaaatgctctgaaactcaccaaattttatttacatgatataccacgtgctctgatgatttttctatcaaagagggacaacactcacagtttgaaaaatttttaattcctttttaaacaggccaaaaagtttaggcttaacttttttttcagaaactgatcagaagcgccccaaactttccagggatactgaaaggaaaagaattaacctgttttatcacattagcttgtcatcagtttttataaaaaattttcaaaattctgcgtctcctattattttatttttttttcaaaattttgaagggcggggggggggggggtccggcaccccgttttgcgacgttgttgaaacattgcgcaaaacgcgtgggatggcggactggttagttaaatggtatgtacgtacactggctcgccatgtataaaaggccgactaaaagtggagaaggtaccacattgtttctttcattgagagaacagaaggatgtcgtcattcttttatttcttgctgatcgccttcatttttttcaatgttctccatctatcttccggcgaatggattaatgtagagctgagtgtggacccaccaaacttttttgaccgttcattccgcaccatttccaagacttcacctgcgcaacattggttcggctataaccgggacaccgcatgtcatgttgaactggagaggaatatcaatcggctgtacaccaacccggatacatggaacattgccctgacagatgtggataatttaatgagcttaggacggacaacaattgagataccgtcaaccgcattaccatgnngcatgtttttgggcatggncggccatagttnttgtaattttcaatctttcaaatgacgcggggtgaggtgaccgt

SEQ ID NO: 24640 - DNA, 1504 bp, Heterodera glycines
  unsure (1)..(1504): unsure at all n locations
aagatttacgaattaaaaaaaacagctatttttttcgagtctcattttgcaatattaaatatttggaaaaatatgaaattttgttttggaaggtgtccaataattccgggtgaattaagaaaattgatcagggaagtgtcggaatgccgatttcgacatttttgggtttgaaattccgatcaatttttataaattttactttttgttgattgctgcctatcattttgctaccgctatgaaatggtaaaatgatggatgaatttttgtaaggaaaaaatttctcacttttggcaacaatgaacattcgggggggggggggggggggtgaattaattcagcacgcatttagtcaataattgatttgcttttttttcgcatttgctccgctgttgaaaatgcgttatgtagggtcggggtcactttggcgcgggccattttggcgccgcgaactttcaagtgttataacttttttcttatccaaccaaataaaataattttgataccattaaataggcctaagtgttctttattagcctgcaaaatattagaaaaaataaattctgtttgacaaaagatatagcgtgcggcgccaaaatggccagaaaaagtcagttttttgaggttttttggccataacttttttgtgtgtcaattaaattttttgaaattttgcagggtgtacggacatttcgcctactcgacatctcgcctaccgacatctcgcctactgacatttcgcctactaagccaaaaacattcatttcgcctactaacccaaaatcggtcatttcgcctactaagccaaaaactttcatttcgcctactaagccaaaaactttcatttcgcctactaagccaaaaacattcattttgcctactaattagtaggcaaaatgaatgtttttggcttggtaggcgaaatgaaaagtaggcgaaatgtcagtaggcgaaatgaatagtaggcgaaatgacagtaggcgaaatgaccgattttgggttagtaggcgaaatgaatgtttttggcttagtaggcgaaatgaacgtttttggcttagtagggaaatgtcgagtaggcgaaatgtcatgtagcctgtcagtaatggtcgcactcatttatgctgtttttaacgatgcatattattactagggattctttttttatgtaaatacattttttttcctggattctccatagcctaattagtaggaaaaacactttcttttttgggtttgcgaacaaaagttgggacttttatttgcatatttttacacattttgggatttttctacatattacatatgtacatatttttatacatattttggactttttcgtacatatttcgcaatttttcgtacatatttttcattttttttacatattttgaggatttttgagaatttatagaaattttttgtaaaaaattaaaaaaattttttttgaaaatgtatccctaaaaaatcggtttttttcaaaaaatgatatatcaanaaattaattttt

SEQ ID NO: 24641 - DNA, 1634 bp, Heterodera glycines
ttggcattttttcaggttaagttagtcctttacaatgtttaaggcctgcaaaattctggagagattatatcgattttagtgcgctaggttcgatgaaactttttaaaatataagcctaaactttttggcctgtttaaaaaggaattaaaaatttttaaaatatttattcatctcccttttgatagaaaaagcatcagagagccttatttaacttttaattaacatttggtgcgtttcagagcagtttgtgaaaaaataaaaaaatcgattttttcaagtgtccgtttggggtactcaaacaattatggggagcaaaaatccaacgcagaattaaagtacaggctatagggaagctattcccgaaggattcggtctccccataaatctgggcgcatcggttcggggggactgccccgaaaacaaaaaaatcgattttttcaagtgtccgtttggggtactcaaacaattattaaaaatttttagatttttattcatctccctttttgatagtgaaagcatctgagtgcctaaaataacttgtaaataaaattggtgcgtttcagagcagtttgtgaaaaaatatttatgaattaattttgctaaaaaaataaaatagtgaagctttaaaaattaataaaaaattttaaattcagaattactggagttagcatcatagcagtgcttttccttgtctttttgatgccctcgcaaaatctggttcgcttctgatcagtttataaaaaaaaagttaagcctaaaatttttcgcaaatttaaaaagcaattaaaaatttttagattttttattcatctccctttttgatagtgaaagcatcagagagccttatttaacttttaattaacatttggtgcgtttcagagcacgttctaaaaaatatttatgaattaattttgcaaaataataaataattaatgaaaaagtcagaatttcgaaaaattttaaaaacaacaagcgttggcattttttcaggttaagttagtcctttacaatggagaaggcctgcaaaatttggagagattatatcgattttagtgcgctaggttcgatgaaactttttaaaatataagcctaaactttttggcctgtttaaaaaggaattaaaaatttttaaaatatttattcatctccctttttgatagtgaaagcatcagagagccttatttaacttttaattaacatttggtgcgtttcagagcacgttctaaaaaatatttatgaattaattttgcaaaataataaataattaatgaaaaagtcagaatttcgaaaaattttaaaaacaacaagcgttggcattttttcaggttaagttagtcctttacaatggagaaggcctgcaaaatttggagagattatatcgattttagtgcgctaggttcgatgaaactttttaaaatataagcctaaactttttggcctgtttaaaaaggaattaaaaatttttaaaatatttattcatctcccttttgatagaaaaagcatcagagagccttatttaacttttaattaacatttggtgcgtttcagagcactttctgaaaaaatacttatgaattaattttgcaaaaaataaataagtaatgaaaaagtcagaatttcgaaaaatttaaaaa

SEQ ID NO: 24642 - DNA, 1077 bp, Heterodera glycines
  unsure (1)..(1077): unsure at all n locations
tttgtttttatatatgatataaataatatttgcttccctagatgatatataattttaacaaataaggttatttctttctcgttttgtgcatcaaattaataatttttttattacgattttttaatactgtgcagtattaaattgcgactaatttttattattaattataaaaaattgttcatttgaatatttaggtgtagattttttatttcttgactgttagagtctgagaaacacgtccttttcgatcgaaattagcgctttaataatcttattaacaattaacattatttttctttggattatgattctcattatgattacattaatagaatcttgttatatattcagaacatacatttcaagagtatttattgtcctttatctgctttgcataataatatatcttgctctctcgctcacgaatgtattatttgtatcattctctattatcttaaataaataacgaataacaataattatttaaatagaatcataatctaagactaatagaatttaaactagttattagaaaagaaatgaatcaagctttttatgttgttataccgagtatgtctatgtgaagaagatttgcacttaatatattttttaaattatttgtaaatttaaatttatttaaatattattaagcaatataattttgtttagtcttttaactatattataatctaaatatgaatttatgcaatcttatgttttgtatttatttgtatcttattaacatgcagagtttataattaagtgtattagtttattttattttttgttgataaattattttatttatagtattttaaaattttcattttgaatcatttattgacttaggtaatattattttttattatttttttgaaaattttaagtttttaaataaattaaaagtaatataatttagtttacatncatannaagcaatttaagttttcaaaaaaattctccataactttaataatcatgacaaaataatgtttgttctaaacaaattaaatttttataattttgttcagtgttgaaaaacaataatttttaaatttttaataaacaataattttt

SEQ ID NO: 24643 - DNA, 1081 bp, Heterodera glycines
  unsure (1)..(1081): unsure at all n locations
aaaattaggaaaattggctatctctttttctgctcaccagtaataggaatccanccgcattctcagaataatgacgccgatactaattgttctggaatttgtttctcggcgcgtttgtttgggaaaaatttggaaaattggctatctctttttctgctcaacagtaatagggattacaaccgcattctcagaataattacgccgatactaattgttctggaatttggttctcggcgcgtttgtttgggaaaaatttggaaaattggctatctctttttctgctcaacagtaataggaattccaaccgcattctcagaataattacgccgatactaattgttctggaatttgtttctcggcgcgtttgtttgggaaaaatttggaaaattggctatctctttttctgctcaacagtaataggaattccaaccgcattctcagaataattacgccgatactaattgttctggaatttgtttctcggcgcgtttgtttgggaaaaatttggaaaattggctatctctttttctgctcaacagtaataggaattccaaccgcattctcagaataattacgccgatactaattgttctggaatttgtttctcggcgcgtttgtttgggaaaaatttggaaaattggctatctctttttctgctcaacagtaataggaattccaaccgcattctcagaataattacgccgatactaattgttctggaatttgtttctcggcgcgtttgtttgggaaaaatttggaaaattggctatctctttttctgctcaacagtaataggaattccaaccgcattctcagaataattacgccgatactaattgttctggaatttgtttctcggcgcgtttgtttgggaaaaatttggaaaattggctatctctttttctgctcaacagtaataggaattccaaccgcattctcagaataattacgccgatactaattgttctggaatttgtttctcggcgcgtttgtttgggaagatttggaaattggctatctctttttctgctcacagtaataggaattacaaccgcattctcagaataattacgccgatact

SEQ ID NO: 24644 - DNA, 1607 bp, Heterodera glycines
  unsure (1)..(1607): unsure at all n locations
aatggaatttccatggacgcacannttcccaaggcatctgcttggggctccccactcgacgtgccatttggtcaccgccggtacattcgcaattttacttacattcacaattttctaatttcagccgaggattgccaagctctgatttgggatgtgcatcaaatcccgagggcagttgacgacccaattctcgcctacgcggcagccggggaggtgagaaacgaattccgacatggccatgtgactaaaaaagttcgttgacagatcaaccaggtgcagtggtcgtcggcactaagcgattggatcagcatttgctacgacaaaacactggagttactccgggtgtgaaactgactgattggatgtcactttgtacataatcactgcacaattcattttataaatatatagtcagtaattcatacatcacttgcattttaaataaaattcaaaaagcgcagtgcatttgaaactagcgattcatgttgatttcctcaaccggattatcctcggcttcatttaaagcaataaataatgtatgaaataaatcatttatttgtttgtggtggtaatatttttgaaaatactgaattcacttaaaaggaatggataaaatatacatttaagcaaagcgtgttatttgataaagcattgtaaaaataaccaagcgagactaaataaatggaaatgacccaaaatagcaaaaataaaaacattccttttgtgtcggtggcaattcattcattcgacaccctttctttgaccgggccactgaatcagaggcgagaaaatctcccaacgagtcgcttgcaggagggaccttgagaagaggaataaacggaaggagaggaaaacattacaagtgtggagaacatcgagacaagagtcgatgcaaaaaggcaaacagctgggaaaagaaaggaagtcagcgcaatatttaagtgttcgatggatggactctttccccgtcactaacccaataaacaaagtcttagtaagtcaattaatcggtggattatgtgttggatatattataaagaaatggggttattccaattacattaggggatgcaaataattaagagacgaattgtacaccccagggaaaaaaccgaagaaaaatacaaatcaaacgaactctctgtcggcaacgtaagaatccgaaaaccttttgggcggcacattcccggaaaaaattatatttcgcactatttaacttttggagttgtgattaatataagcgaggagaaaggccctgaaaatcaaagattaccaaaggcaccacggaatgagcaggaaaaagccgagaacgaagcaaacagccataataatccaaggtaaagcactgaacagaaaatgaaaaaaacaacacataaataaaagagcaccgacccggggagttgttgagtgtgagaaactgaagggaaagaaaaaacgaaagaattaactcgaatggaaacgcaaaaaacaaacaaacaaaccgatgtgattgcgacagtacgggctaaatgttatgggaaaagctgacaatgaactgacacattcacttcaaccgaccagtccatttccactggaaatggcccaaaaggggcggtgcgcgcccgaat

SEQ ID NO: 24645 - DNA, 1968 bp, Heterodera glycines
  unsure (1)..(1968): unsure at all n locations
cttgctattttcgctgttctgcgaaaagggggaatttgagcatggcccaaagggaggccttttcaaaagatcattctgataatagaaagccgccgactaaacgaaagagaattttatgggagacattgtggcttcccacagctttcaggattttctccgaaagtatttcaagaattgcttataaacctcaaaatgggttcggaatggctccattcgaataaatccgcctcggtaacttttgataatattttccaccaatcgctgctcacccaaaggagacaaagtgttgagttcgctgaatttaatttagaaaaagaaaaaatttacacaatttttactttttgaagatttccaacagacagttcatctttggtcgaaaaggcgcaattttgggggtttcctgtcgaaatttatataaaataatggtaattaacaataatattaaaaagtaatctgggaattgcgcgattatttacggacagaccttaaagcttccccagacaacagcgaatttaaggagcacaaaatggagtcgatgatgaatgtcatcgtcacacgaattggtggagtcgtagcacaaaagcaaatcgaatttctgaaatgaaatatccgttgcgtcacacataaaatatttcgtgaatttagcaaataaaaaatgactttggagttttttttatggtggtcaaaaaaaatattaggaaaatgacttagaattaaaatattttttaaaaaatggaaaactttttggagcttaaactttcgaatttttactgacgagatgacaaaaattaaaataatttaacaaaaaatgttggaaaaatttaattcaatttggtttttcgccagtatttaacaaatattttggctacaatttctatgataattttttatagtaaaagagacaaacatgtgcacaaaacagttgcccgatataagggttttggcgcaaaacatggacgaatttctctattcggtcgcataaccaatgtccgataagctccccaagtgcaggtcccaaggagtcggaagtgatggcaaaggttaaaaaatttgcacagaattccatggaatgatcagcaagtggcaacaagaactcgtgctgaaaatataaaacctcagaaggacgtggagtcatttggccgatattaaaaaaggaaagaaaatcccaatttcagtgacttatttcacaaaaaacttggcttacaagtcgacggttggttgctgtcatcacaaaaccatcaaccaattcggccacaatttgctccatgtaaacgcattttaactcgtcccgtgtaacctgaatttgtcataacatactcccttaaagcgccgaataagtattgaatatttcaccttgctaacccaatgtgcgacatgttcaaaaagtccataaacggggtattgagtggccaaggaacaaagcttaaccaaaaagtgaacacgcgcttcgtgcagatgagccttaagtgagaagagagaacaattgtaaaatgcgtttggttacctcaccctctcgcccacagaaaatgatttcgaaatgcatgtaacgaagcgccgggtcagtctcacgcgcgacttcccaaaagagcaaagaaaaatgaacagacaaatgaaaaacctttgaaaagtaagtgcagacgatgccgagcagacgaagtcgttgcaagtgattcagccgactttggccacggcgggaagggtcggagctaatggagaaaatgagaaaaaagacaaaataaaagagacgacaaaagggaaaacaaaacggaggaaaacgaaagtgccaatgaagcaaccgaccttaggcaaaacaaatcggcatctatgcatttctgaagttccttttgcttcgtccgattccatncccttatgctganggtgggcaccccattgtcggacanatcgccaatctganaatttttaaattctattngaattatttntgacatgataatctttactattatt

SEQ ID NO: 24646 - DNA, 1963 bp, Heterodera glycines
attttccaattattttgcccaatttcagtccgttccttccgctcactttcaatttcaaaatgttctccgtccgtttcttcgctttccttctgctgctggccgtcctttgcttttccctcgtcgagtgcggtctcatcggtatttcgaccgtttttacgcattaataatatccaaaattcgtccaaatccgtttaggcattggtgccactcccattgaagccgcttggtgcggcgtcgtcggccaagagtccacccattgcccgggaggtgcccttcacggcggatttcccgccgtcggcggaacatacggatttggccgatagaaagcggcgcatttggatacggtaaatcatttagtaaatcgtttaaatgcattgaaatataaatttaaggattcttttggactactgacaaatcgctgagagtgaaataaaataagttgaaataattgaataaatttggatagaatatcaagcttttcactcaaaattgttcatttatttgtggtttcaattacttaaaaatattataatttgtcagtaaattcccaagtgaaagtttgaaaaagaaaaagagattttgtatgaggtgatcggtccgcaattcaattttttcggcccatttgttttctgttcctgtcattattttagttttccttattttggtttaaaattcaaattttcccctaacaaataaggcgtctgtttaattttgcatcgtttgacgaaaatttatacaaaattttatttaaatttcgggtccattaaccgaaaggtgccgtttgtgcatttttgacaatgccatggttggcatttggccgcgttttacgcccccgcgcacatttccgccactttgctgcagcacgccttggcctccctcgtgcacttttcactgacacacattgcgaattcgtcttcctccccccgtttcgtttgtccgtcgcttttccccgctctctttgccccgttttgcttcttttcgtcctcctcgtgctgttcgggttgttctcctgctactgctagccaaggctgaattgtaacctttcgcgcgccttttccgcgcagaagcaattgcagcgaatgcatcagttgccgaagagactgttcattggtcgacggtggtgccattgactcaccgtggagggaggggacggagttgacgagagacacgtgcagaaacacgtcgaagttgtggccgggccatttgctgtaaatgtgcaagtggacgagacggaggttcgggaactgaaagttgggcaattaattggcactgattcgttttttgcttatccttcattaattatttctcctagaaggctctctgtgctttgatcaccacccctttcaaatatatcaccattctcaatcattcgtgtgttgctattaaattgtcctactttcttctcaatttccactttcagttgagtctctttcgccccctttggcacttcacataacaaaaagggcatattttgtttgactgaaaattagtgaaagtgatttatgaagcagttaattaattaataagatacaaatgggaagcacaacggcagaaagcagcacacacattccggcacccaaataacggtccaaacacgaaatcacttcgccagtttcgggactgaatatagtcatcgtttgttataattagagtgctcagttttcagcacaaaaaatcaccgattaagcactgtaaacagcaccaaatttttccaaaataaacatgaaaaaagcacaaaaaaggcaaaatcagcacaaaaaattggaaaaaagcataaaaattaagagattaaaggcaccaaaaattgaaaaaagtcctcaaaaaaacgtttatttgctccctgattataaaaaacctccaaaataggtgctaaaaatggtaatgagatacataatttttaaaaaatcaaaatcttgtcaaaaaataaattttggagatgaattatttttgataaatttttcat

SEQ ID NO: 24647 - DNA, 1184 bp, Heterodera glycines
  unsure (1)..(1184): unsure at all n locations
tgctctttctgttgcattcgcctcgactttgacaccgaatagtgtcgcaattcggcgctgtattcctcaaagtggggccaatttgtcgaacagtccacgccatggaggagagaccaccgcttcaaatctccgccaatagtcgcatcggtcgtgctgagaaagtgttgacgaagtttggagtgcaattggacgagtctgaagtgtaatttgagacagaaacacccaaagcaaagccaatgattctaccgactttggcgggttgaccaaatccacgaggattttctgcattcccgaaagcatttccaaaatgaagcgaagtcgtttcatttccatttgttggcatttctcaaaaacgaaggccatctgaaaaaacaatgttagaaaaagggagaaaatcatcacaagtgcacattttccatgtaaatgccattgtacgccgttatttccttcagaatttgctcgtacgccgtcctcgcccgcgtcacctgcaaattccgtctttattcattgcctccattttttccacctctttgtggcatttttcaaagcgttcccgtgccttcgcctccgttccgtccgtttgtgcgttgtccgtcttcgtgttcatgtattgaatgtacatagatttttcggtccgggccgctgaatggtaagtgcgtttcgtcacctccacccgatcgaacagtttcttccattgtttttgcgccttttcaaattcgtcttccatttcctttgcctctttaaaaccgcgaaatgtcgaccgatggtaattgtcgcgtttgaacagttcgatggtcttcagcacctgtgaaatcgtgagttccgaattcatttggcattccatgtttgccttttcctacctcgtcgttgaatcgctctttgaccgacgagtgcacttttgtcaattccttactctcgtccaaaatcagcgtgaaggaacgcttcatcgacccatccggcaaatgcttttccgaataatggttccattcgtcgttccatcgctccaattgcttagcgtagctaaaaaaaaaactgggtaaaactgccgttccattgagctttctacttattttcaatggtcattctctccttgataaacccgggaaagttcgtccaattggtccagcccccggtggattcngtgcacatttgctttgtaactaccgatttcccaaantccgttc

SEQ ID NO: 24648 - DNA, 1059 bp, Heterodera glycines
cataataattttttctgtcttaatttttaatttcttggtttttggctcaattctaattccgtagtgtggtgatttcaaatgaatttatataaataatatttagagtaatataaattttaattaaaatttttaaattaattattttaaaaatttatttaaaaatatgttttaaataattcatttgtgctctcgacattatttgatatttaattgcgaccgaatccagacctataataaaaaccgaagggccaagaatccaaagttgaacacgatagtgatttcggtcgcacgtatcaacaaaaatggttcttcaaaaataattcggatttccataatcatggacggcaaaacgatcaaattcattgccgacagtgatcagacatcaatattattgatgaaatcgcatacaaatgcatcggatccccgccgctaggaagaaagcgacgaagagggcatttttttcgatggacgccgctgccaattcatcggcaaaggattcgctaccttcaaattcaaaggaatcgaagtcaagcaaccattttatgttgccaaagcgggagcacttaatttgcttggggcagcaacaatggataagtttggattccttgaaggaatcaaaaatgcaatccgcggaaattccaatcaatcagatcacttccaaaaataatgagacaaaaattcgggaagcgatcaaagaattgccatcaaaatttgagcaagtcttctcagaaggccttggtctttgcaccaaaatgtaagcctctctgatgctcaagtcggacattaaaccggtgttccgacgagcccgtccagtgccgtattcagcgcttccaatcgttaacaacgaattggagagattggagaaaatcaatgtcatcaaaccagtggaacacaccgagtgggccgccccaattttggtggtgaaaaaggccaacggatcaacgaggttgtgtgccgatttctcaactggtctaaacgactgtctccagctgaacaagcatccattgccacttccgtccgacattttttcaactttaaatggctgaaaattcttttcaa

SEQ ID NO: 24649 - DNA, 1452 bp, Heterodera glycines
  unsure (1)..(1452): unsure at all n locations
tggaacgcaattccgcagtcacgaatttcaaaaattcacaaaatntaatggaatagaacaccttttttctgctccatatatgccgcaatcgaacggtcaagcctaaagaatggtagacacgtttaagcgggcattttcaaaaataaaaggggaggggtgtcaggagacactctcgaaattattcctcttaacttttcgcaccactccatcggaaaatctgaatggaaagtgccccgcggaactatttcttggaagaaggcctagaatcgctcttgaccttctccgtccgccgatccgaccaacagaaaaagacctcaaaatggaggcacaatttaatcggagacatggcgcccgatttcgatcatataatgtcggagaccaagtctttgcccgtcataagaaaggcgaagattggagagcgggcaaaatcagtgaacgaaacggtgtaatttacgctgttaatttcactgacaattcaactggacgtttccatgcaaatcaattgcatgcgagagcgatcggggacgaggacatcccgcatccgttggatgcaattgccgcagatcaacgatgtgccgcagccgccagacgagcctgtccgacgctatcccgcacgccaacggaagcaagctgtgcgtttggatattgctgatccgcgccggcccaaatacgatttcgtaccgatcagggcggaaagtgtcaatttaaaaggggaggtgttgggacgacattttaaatgttattcttttggcattttatttatgtccatttcagtccctcacacaattgtttatccgccattgacccagtcaattcattctgtccgcactcatcttctcctccgcattgtttttttttataatttaggtgttttttttgaacgaaagtattattgaaaatatttttaataatataaaactcctggcaattgtaccacgatgcatgtttatcttgttccaatctgcgcaatttatatttgcttcatttaattntaacttgttaatgtttttttacaaagttatcttaattgtggttttataaatttttaaattccaatgttcgaatttttattttttttttcaaataggctgtaataatttatataatatttttaaattttgagatgacaaatgaaatctttatttttcctggttttacagcaccaatagctctcacactttacaaaattgtttccagaagaattcaacatatgtgagcaatattttttcttacaattctcatttttgaaaaattatttttatttttgaatctttttattatttaattgcttattttttaattaaaatagagaattgtcttattatttccaatatatttatttagttttcaaactgcataatttttgtttaattctcaataaaaataattattataggtatatcaaactaagaagtctataattttttattatttttctttattttaatgtat

SEQ ID NO: 24650 - DNA, 1075 bp, Heterodera glycines
  unsure (1)..(1075): unsure at all n locations
agatttgagtcccagagattgacatgttggtgggttgagtctcagagattgaaatgctgctggtgggttgagtcccagagattggaatgccattganagttggtgggtgagtcncagtgtctggaatgccggagatttgagtcccagacatttaaatgctggtgtgttgagtcccagagattgaaatgctggtgggttgagtcccagagattggaatgccattgaaagttggtgggttaagtcccagtgtttggaaagccagaggtttgagtcccattgtttggaatgccggagattttagtcccagagattggaatgccggagaattgagtcccagtattggaatgctggtggcctgattttcagtgattggaatgtcattgaaagttgttgggctgagtcccaatgtttagaatgccgcagatttgagtcccagtgtttggaatgccggagatttgagtcccagtgtttggaatgccagagatttgagttccagtgattggaaagcctgagaattgagtcccagagattgaaatgctggtgggttgagtcccagtgtctggaatgccggagattctgttgagtcaccgagattgaaatgctggtgggttgagtcccagtattgaaatgctggtggcttgagtcccagagattggaatgtcattgaaagttggtgggttgagtcccagtgtttggaatgccggagatttgagtcccagagattggaatgccggagaattgagtcccagtattgaaatgctggtgggttgagtttcagtgattggaatgtcattgaaagttggtgggttgagtcccaatgtttagaatgccgcagatttgagtcccagacattggaatgccggagatttgagtcccagtgattgaaatgctggtgcgttgagtcccagagattggaatgccattgaaagttggtgcgttaagtcccagtgtttggaatgccagagatttgagtcccattgtttgggatgccggagatttagtcccagagattggaatgccggagaattgagtcccagtattggaatgctggtggcctgatttttcgtgattggaa

SEQ ID NO: 24651 - DNA, 1636 bp, Heterodera glycines
ttatttttgtaatttaactaatcaaaataattagtgccattattttttcgacaaaacatatttcaaatatttcctatatttaaattaaaaaatttcattatttttaattctttacaaagaactggaaatcgtaattgtaaaaataataattaattaatacaaaaatcaaatatttgcttgaatatctaattaactaatgatccaaactaatttgagttgcccttacgtccaatgttctccagccggcaaaaatgccagtgaccaaattgccagcactgtccgtacttcccataaactatgacaaaaatttattttttataattaaatttaaatctttttttacctccggtgtgaacaaatgtgaatcggccggtgttggcagtgccgcttctagcgttgaatcccaataaggaattgcaacagttgggtccacttgacggagcgcaacttcaactcttaattggggaacaaaaattaattagtatttttatcattttttaattagggattattaatgcccatcagtcttaattagtgtgctaattggaaacaattagcgcactttctattctccggcattttcgaaaagaatgccaactaaataaacaattaaatgaccttttttcaattaagctatgcatacatattacaaaatataaatattaatttatttgtgttgttacagccgccgccgttgccggcggaatcgaaaagtttggcggttcggccaaggcccttcacctcatcggcacgcgtaaaatttataatttaaaattgaaattaataattaatttttttaaatatatattattttttagttttcatgttacaatgagcatgaatgttgcgagacgtggtcattaaagggggaatgtcaacgaaatccggtgtatatgaacgcgtggtgccaggccagctgcaggcaggtggcatttgataaaaagaaaatttattattaaaattgcaaatttttattaaaaaaagtatttttacaaatatgtattataataaacagattcatgtttttgttttttaaataaccaaatgcaattaaattatctcttatttttcattaaatttttagcttattaagaaaagttacctaaaaaattaaaattttaattaatttttaaaaattttacctcattaaaatttgcatacattaagaaaaagttggacctggcctgaattccgtattggacttagatctgggttttctggtcaaaatccaagaaaatccaggtctaggaaaagtctgggttaccgaaaaatgacctggacatggtccgaaatcacgaaaatccaggtccaggccgatctcgatcatatattattcaacaaaattctatcttttttattcattaattataaaaaaaatttcaatgcatttaatttagataattaaaagaatattaatttatgttttaacatttttagtgccaagttgactacgacatgttcacgggtaacaaattcaaaaattgttctgatcatttcccgctgatcagaatgcaatgatcgccacgtgaactgtgcacaatgggcaatacgaggcgaatgcacacgaaataaattttggatggtaattaaaagcaataaaaaattaattattggttgattttgtaaggccgaaaat

SEQ ID NO: 24652 - DNA, 2901 bp, Heterodera glycines
  unsure (1)..(2901): unsure at all n locations
tgattagaacaaaatttttttttgatcaattacgaaaaatgctgaggggagggatggactgatcaaacattgcccaatgattgacgactgactgattgttggcattacaaaaatttccccctcattttgttcattttccggcaacaaaatttttggcgactgtgctgttctttcattcttcattcagcgtcccgagaagtttctcaagagttttactacattattttctgtttgtttgtttgttttttgttaattcccgccacttaaaattgtcgtacattgccctccctcacccatcagcagcatgtaaaattggcttttccttctgcttcaacataatgctttttgcttgcttcaatctttacattagcgcaggtcgccgacttccaatttgtttaaatttaaaattttgaactttcattggatagcggcactgttaagtgccgtcattgtgtttcgaattaaaagggggttccaaaatttgccgcttttaccagtcttgattaaaatttgtgcgattgcggactgcggcaaatttttggaaaattcgaaaccattttttgggatttgctccaaatttcggcatttgattttcatggaaagttctttttaatttatgatactccatcactattctcaagaatattaataaagtcccgataataagttatctgagcgagtaatacattattctggcgcaaaaatttctggaataaataatgccgcaatttcggtccccaacggaataaataatgccgcaatttcggtccccaacggaataaataatgccgaaatttcggtccccgaaaattggcgtaatgcgggatgcaaatctggattatgagcattcactggtcccataaaccggttttaatcaaaattaaaatttaaaaataagaaaataaattttgagttataaacatttggaacaagtcgtgccgtgcccttcattatttaatggaagcaacagcaccaatggccacttcaacggatgagggcggaagtccgagggcaaatatggaggagggattgttgtcattgccccgggactcggtgactttgtcagtgccaagcagcagactgaaaatgccaagacggtccaaaggtaagtaagtacaacttaattggcccatgagcttgatgggcatggcatattcctgcctctcgaaatgaatagtaaaaattttaaattttcgataaattatcaaattttttgtaaatttttgggccaattttttctcagtaaaatttaataaaagttggttttccccagcttttcccatatttgctgtacctttgcactctatccctcaagaattaaatgaaatgaatgtgaaaagagcggaagagagaaaatgaaaattatagatgcagagcggaagtgggaaagagaacggggcgagagagagaagagagggagagagagagagagcgatagaaattgaaaatagagaaagcatagagacaaaagtggcagaaattggagatacaataggcataaagaattgtgaaaataaatagctaattcatagaataaggtagcgagagagagagagatagacgagagaaagaacaaggagagagaaacatagggagagagagattaatatatataaagagagaaataaagagagagtctgagtgcaaagagatgtgtgccaatttatttgctaattgctttgtttgccgccgccactttatgccaatggccatgtaatgaaaagccatctttattattacagaggacaggttgttgtcggcattaggaccattcatttatttgttcctgccaaagtcatcccatcccattaaatcccctaatttatttaaaaaaatgttttttgttcgccaattagaaagcttggcgttccatcgcgacccgttcaatcggccggaattggtgcacaccttgcgcgggcgtgagcttgtactgtttgtgttactgtacgcaatcggtgtgattgccattgtgttcatatttggtgagtgcttttttgtgtggcattttgccgaaattggcattccaaattttttgtttgtagcacttttatattttggtttttgagttgcaacaaaattttttgtcctattttttattttcaatatttcaaaaaattgccaaaaaaacgnaaaaatgttcccttgagaattaatctatttaaaaaattgaattataatttctattttaaaccaatttttcccgtctaaaagtttttagtgattttaatgaattttaagaaattatttttgtctctgtgaaaaaagggtaaaaatttaaatgaaaaatatcaatttttcatttttatgtcaattttaaaatttttaaaatttaatttcaatcaaaaacaaaaaaaatggcaaagtttttcgataacaattacaaaaaacagagtgtacaatgcccgtgttttggatcaatgatcaaagtcgcgcagagcagcgccgtcgtgccgcaattgtggtccgatcggcacagaaagtgatgctggacagagaaatgccatcgtcaattggcccactcagaaagacatgagcaaaaagaactgaaagacaaatcagcaaatttgatcaaaacttttaatgcatgcttatagttaattagatttatttaataaagggtattttttattttcgaaaagattcgtaatgaaacaaatcgaaacataaattaatttttgttataaattcattttgttttttgcattaaaggaaattcatttatttttttataaaattgcttatttttaggctttcataaaatgttgttttagaaatttataaaaaattcttttttttcagaattttttttttttgatttagttatagaaatgatttttttatttattggaaaataaaaaaaggtgtattatatatttttgcatttcaatttttcgcatttaa

SEQ ID NO: 24653 - DNA, 1812 bp, Heterodera glycines
taaggtatgagccaagtccgctgatgttcagcgaacgcatcgacggcattctcaggtgatcgatccgattgatccgttcccgaaaatgagccaaagcaatttaattctgctgatagtctgatcactttttgtgtcttttcttactcttggtctaatcaattctatgcattcatttcgtctggtcaacttttttttttattccgattgaacgcattggcgttttcttctctgatctgttgccactttatttgtgttcttctgatcattctatgccttactctcccatccatgtgatcattatttttaaaatgtttgctctgataacttccatttggtccgctaatttctgatcgctcatttgtgccgtatattttccccttgctgcaggtttctgctccgtcaacccggtctgatgcccggcctgcacatgagtggcgaactgcgcgacaaactgttccgccagggcggcccccatgggttggacttggccgcactgatcgtccaaatgggccgtgaccatggcctgcccgggtacacgcgggtgcgcgaggcgtgcggagaaatgcgggtcagaatttgctttatttattttttgttgattcgaaattggggtttgccatacgtcattaaaatgggtgtcaacaatttaaaaattcatcaaaagttcgccatttctctggcaaagatttaattgccttcaattagcaataccaaaaattttaataggatttaaatataataaattttataaaaaataaatttagtgaacaaagtgggcataaaagcaaatgcctttaagtatccatattcttaaaactctgatcagcaggtgaaatccttcgacgatttggctgaaattgtcgtggagccgaagcgcattttgcccattttggcacgccattttcgccgtgttcaggacgtggaccttttcctgttggggctggccgaacggccccggcggggcgctttggtgggtccaactttcgcctgtctgctgaccgcacaatttcaaagggtaattagctattctaaaatgtaaatttaaaattgaattccacgcagacaaagcgcgccgaccgcttttggtacggccatcggatggacccgtgggcattcactgagcaacaattggccgaactcggcagaaccacattggcacagctgatctgtgccaacagtgaagtgccattttgaaaaatgatttaattgtaccaattcccactttatttaaggtgagagaagtgcaaccacgtgcttttgaactgcccgacaattatgagtcagttttcaaatttataattcattgctaatttttaaattttccattaatttaatcatttttataggcaatttaaatgagagtttataattatttttaattaattaagcattgttactaatttatcgatggcggatttttcaaattgccaatgtggacacagcggcccaattttgggctctcagtgcaaataggtttattatttatttagtaatcagaacgccaaaactttgcaaaacttaaaatttttttgggattttcccttgtaaaattagaagagccgatctcgatttaaaaacttaagttccataaaataaacttggaatcgctagaggaggtcaaaatattggcctatgcaaaattttaagaaaattaaacaataggaaaaaattttttacaagggcaaacatttcaatactttaattcttttttagccaagtccacaatttaagggcaaacccaataaaattttacatattctccagaattttcccctcaaatgagcataaaatggttttatttgctctagtatt

SEQ ID NO: 24654 - DNA, 1740 bp, Heterodera glycines
acttatctctactttatgcccaaattttacccatttccgttatcttgacttccaaagtgtacatcgactgatttccgtatccgattgggtgccacaattggaccgattttgccggaatttccattttcaaactgtccaactccaaatttggtccctttcccgttgaaacaataaattccttaaagcggtgttaattagctaatgaattgaaggacaaataattagggactttgtccattccgagttcgattaagctcaatttgatggaaatttgatggtcgacggcacaaatcaaagaaaggcggacggaaatcacaaaacattcatctaaactaattgtaaaatcacaataaaattttttgggaattttttaaccgttgcccagactgatcaccggggaaaagcgtcgaatggaaagcaaatcgaaaaattctaagcgaattggacgccaaatgccaacggtgggaaaactcaaaaggcaatcgagcaactaattagtgccatttaattggatgccaaatggacagacctcgggccccaatcccagccaaaattggcctgcattttgcgcaaaaattgcacatggcactccccgttgtaaatgggcggggtgcactgctgcaaaacactcgaaagcatttttagttatttaaacaaattttacggggggcaatttgtggccatgaaaagcctaaaataaaaaataaattaaaaataaaatttaatgaatttataaaattttgatttaattattgtttaatgtgagcataaatgaaatcctcttttcaatctgtgctttttctctctcacttcgtatttttccgccctgaaattggcctcctcaacgggcgattcgaattcaattcgaagaatattttcacggggcaaaacatcggaccaaacgtcaacggaattggacacaaattggttgtccaattgggcaattgtccgattgttcagcagaacagaggcgggcgaatcgatgccggacaaatggagaagcaaaaaattagccaaaaattggggaaattaattaaattaaaatggaatttaaaatggcaattattaattcacataaattggtcaatttcgaaatatccaaagtgaaatttctgcgcacgaaatgagcaatttactgcgcattgcctttgaccagtaaaactctcttctcgccttgtgcgcttcgtccggaagttcgaatttcttttcgtaaatccatcggtgccgtggcacccatcggcaaaagccgtcgccgttcccaaacaaagggtcctccaaaattagaaaaaattaaaataaaaaattaatttaaatgaatcaatctacttcaataaatccgttggtgaataaatcggcgtaaatatcgccgggcacttaaaaacgatgattatttaaaaacggcacttatgccgccactcccccccccccggaacctttcgcatttcccgaaaatttagaccaattttgagaagaaaagtgccaaattccatcgagatcaaagaaacgggaggagacaaagtgaaaggggctaattaaggcgaacattaacataattaattggaatggcatttgaaaatggtgccaaaaagcaaaaataaatttgtgcaaatcaatggcagaaagtttattaaaactcttgcactaaaaaattggtttcaaaattaatccctgatgataaaaataaaaatttattatttatatttattatcaaaaatgtaaaaatcgacaaataagcaaaaa

SEQ ID NO: 24655 - DNA, 1819 bp, Heterodera glycines
ctgttgtgtttggtaacacacatacacgataaatttattaaatgaataaacaataaaattagaatcacaaaataataataaaatatcgacggagtcaatttaagagcgtccgaaaataaaacaccgaaatgtaaaataacacaaatgcaaagaatgagtcgatgggagaggaggaggacccatcaacaaataactaatcaaaagtattcgtgtcgaacttaataatattaaatatcaacacatccaacagtgtcttaatcatcacataattttaatttatgcatattgaaaattttcttgtggacattcattgccctttagcggcttgttttgtaataataatattaaaaatatgcgtctgggaaattattaaaaatgttatataatattattctttatttaattattgattttcataaactagttgaactcatggctttttgtttcttgattttaattagtttctttgtttatcctcgtcggattaattcaatctattgttttatttaataatttgattttgtattaaaatgccatctcactttataaagtcttactatttatatacgggaacgtattttggtccactagtcggtgaatgctcatttgcgcctgcaacatttgcgtctccacatttgcgcctactacatttgcgcctccacatttgcgcctgcaacatttgcgcctccacatttgcgtctccacatttgcgcctactacatttgcgcctccacatttgcgcctccacatttgcgcctacacatttgcgcctactacatttgcgcctccacatttgcgcctactacatttgcgcctccacatttgcgcctactacatttgcgcctccacatttgcgcctccacatttgcgcctactacatttgcgcctactacatttgcgcctccacatttgcgcctactacatttgcgcctccacatttgcgcctacacatttgcgcctacacatttgcgcctactacatttgcgcctccacatttgcgcctgcaacatttgcgcctccacatttgcgtctccacatttgcgtctccacatttgcgcctccacatttgcgcctccacatttgcgcctacacatttgcgcctactacatttgcgcctccacatttgcgcctactacatttgcgcctccacatttgcgcctccacatttgcgcctactacatttgcgcctccacatttgcgcctactacatttgcgcctccacatttgcgcctccatattaatataaaataattaaaatactcaaaaatatttgctataatacattaagatggacaaaccacaatacatttatttattaatattttcttgggtctagaacgattttctaggtatattattatctcggctataaataatactggcaataatagaaagaagcacaatctagccaatgaattattccttgaagggaaacaaaaaacgaatgagcgcgtagatgtgccaacaatcgttaatcaacgcatagatttacacctgcctgaaaaaaatggtcaataagagtttggatgaaactattgtttactgaataatttttgaagcgaggcatacaccctattagagctgtgctgtgacgagaaccggcaggcaatggatgtctttcaaactgcactacatcatatagtcaaaatgtgaatgtaaaaaacttttgggtaaagaattattttttgaagtgagtcaaacaccgtattagtgctttgctgggtcaagaccggcaggtaatggatagctgtaaatctgcaataaattaaattggcaataagtgattggaaaaaacttttgggtaatgaattattttttg

SEQ ID NO: 24656 - DNA, 1844 bp, Heterodera glycines
  unsure (1)..(1844): unsure at all n locations
tagtttaggcactctgatgctttttctatcaaaaaggcatttgaataaaatttttaaaaatttttaattcctttttaaacaggccaaaaagtttaggcttaactttttagtgaaaattcgatcactcatattttttgctaattgagcagaagcgtaccaaactttgcagggatactccccggtaaaggactaacttacactgaaatgagcgccgagctagctggctcaaaaaaattttcgaaaatctgagtctttcgtttttatttattttttgcaaaattaattcttaaatattttttcagaaagggttctgaaacgcaccaaattttatttacatgttagtttaggcactctgatgctttttctatcaaaaagggagatgaataaaatttttaaaaatttttaattcctttttaaacaggccaaaaagtttaggcttaactttttagtgaaaattcgatcactcatattttttgctaattgagcagaagcgtaccaaactttgcagggatactccccggtaaaggactaacttacactgaaatgagcgccgagctagctggctcaaaaaaattttcgaaaatctgagtctttcgtttttatttattttttgcaaaattaattcttaaatattttttcagaaagggttctgaaacgcaccaaattttatttacatgttagtttaggcactctgatgctttttctatcaaaaagggagatgaataaaatttttaaaaatttttaattcctttttaaacaggccaaaaagtttaggcttaactttttagtgaaaattcgatcactcatattttttgctaattgagcagaagcgtaccaaactttgcagggatactccccggtaaaggactaacttacactgaaatgagcgccgagctagctggctcaaaaaattttcgaaaatctgagtctttcgtttttctttattttttgcaaaattaattcttaaatatttttttcagaaaggggtctgaaacgcaatagaaggcnncctgacccccccccccccccacattccccagttttttggaaaaagcacaccgcgaaacaaactattttgggattttcacctcaaaaaaacaagcagatattctgatcataaattagtcttaacaatttttagattggattttttaaatttaaaaattttttaaattaaaaaatttttttgaaaattacggattacgtattacggattacgccaaattacggccttttttgacccccgtcatgacggattacggatggccgtaactgaaaaaatcgccgtaatgacggattacggatggccgtaactgaaaatcagttacgtccagccctgcttgtaagcctaatttaatgcacattattaatttcttcgcttttcattttatatttatgaaaagaaatataaataaaaatatgcaagcaaaaagaaatgatgacaaaacgttgggaattttgtggaaatatttaaatgccataaatgataaatgatggtaaaaaacaacgcaaaacccgcgcaaatgatgatgaatgaaggaaatgaaacgaatgaatgtgaacaattataattaaacaaatatgcaaagagagagaaaagtaaaaaatttaaaagggcaaaaatcaaattatgcaattaaaaaaatgcaaaattggaatacaatcaattagcatttaattggcgtgaaattttatgattgagcgtcagtgtatggttgttttatatgctcaaaaatgcttggaatattttattaaattttttttatttcagtaatctcttataataaaataaacatttttgagcataatttcgagagacttttttacaatttttttgatcaaaa

SEQ ID NO: 24657 - DNA, 976 bp, Heterodera glycines
aggtttatgaaactcccactgtggcggatttgtgaaacgcatacgttggcgcatttacgaagcgcccattgtgcggatttatataacgctctcgttggtggatttaggaaacgcccattgtggcggatttacgcatcgtccacgttggtggatttgcgagacgccctggcggctttacgatgcgccctggcaggtttatgaatctccaggtttatgaaacgcctattgtgtcggaattacaaaacgcccccgtaggtggatttacgaaccgcccattgtggcggatttacgaaacgcccatcattggcggattttcgaagcccccattgtggtggatttacggacctccctggtggatttcacgaaacgccctgtcaggtttatgaaactcccactgtgtcggatttacaaaacgtccgcgttggtggatttacgaaacgcccattgtgacggattttcggaacgccctggcggatttacgaaacgccttggcaggtttatgaaactcccactgtggcaagagagaagagagagatagagagagaagagagagagagagagagagagaagagagagagagaggagagagagagaagagagagagagagaagagagagaagagagagagagagagagagaagagagagagattcaaaaaaaagaaaattgcaaatacgaaaagtaaaaataaaaataaacaaaatttttaattcgctcttgaaatttaattttaaatagacttatatttgttttaaaatttcaattttgtttattttctcgtatttctctttctcaaagtccaaaagtatcgaaaaaattttggtctgctcttttattttacaatgtaaatgttggaaataacctttttcaaaattctccaaaaaaattctgattcagtcttaaaatttcttgttgttcatttcgagggaggcttttacggtgtaaaagggctaaagcacaacaacaaatccaaaaa

SEQ ID NO: 24658 - DNA, 2058 bp, Heterodera glycines
cggcgttgcgaccgccggtgaagaagtggaggaaacgatattcagtttgaccattgaaaagaaagaattttgcctatttaactcttttctaaaaaaggaataattgttaaataaattaccagtaaaaccgccaaaaaatacaatgagaaatttactacaaataattcaatcaattcgagtaaagtgaagcggagtgagtctgagaaaaaaaggaacggcagaaacaaaagtatgtaaaaatggaaattctagtttttttttatttggcattgtgttttgtaattttataattaaattaaaaataagttctttccaggaaaaaattttttaattacatatgcccacccgaataaacatattaatataattattatctcccttttgtcaccatctattagtggccccgtccaaaatttcactgtttggaggaggttgacaaatagatagagccccggggaattaacagagtgaatatggtaacgtgtacaatactcagagggaatacggtatcgtgtgtgtacaaaacaaaatcaaaaaagtgggagcccagccgcttcatcgaagcaaaggagacgacactttattgtctgcatcatcgggacggataaaatcctccagtccgctcaccgacgcgtttcttgcccgcgtccctccgcaattatcaacgataattatcctccaggcacaggctgccgccaccataattttttttgtctttttgatgtcgcctcgccgcctccatccctccgcaaacggtcgcacttcgctctccgcacgaatcgcaccgaacgccgattcactgggcccgcgacggacacaaaaacggcaccatttatataaaagaaaagaaaactgggcacattttttgtatgggttaaaaagagggaaagagaaacaaagaaatgcacgcgttttttccgtttgtctctttcttttcctttgtcctatttctcttttcactgtgttcttttccccgtttaactaactgtgtcttaatgactggtaattgttgctcaccactaatttacggtaggggtcaactccgtctggccaactccgtctcagcaatgttcaaaaagctataacttttttctttgttggccaaacttcacaatcatggtatcattcgaaagccctagatgtttagaagatatttataagctatttctcagtgattaatcagctctcaaaaaagttgtcagtttaaaaccgcaaaaaaggcagaattttcaaagttttttatttctatctttttttatagttcaaaattttctgtaatttttagtaggctaatagagcctgtgaagaactttacatttaaaaaattaaaatcatttagttaaattcatttaattaaaacacagaaaaacaattattcgtttgtctaaataaatatttgtaatacacaaaatcaacttcggttagaagaattcgctaaattcgggcgaacgattaatcattggtcaaattgttttttttatttaatttctctcgctcgcttcgaatgaaatatttggtttaatttttgagtcagtaattaattaatttcactaattaattatttttttatttccatttgcgcaaattggtcgagcgagaagtgcgcgaacctgttcaactccattaaagcacattctcttcaacattggagggcaattttggtcaaattgaattgtcattttaataaaaggcgaccaatttgacgaattgatttaatttaatggacaaaaaattattttaaatctttcgatataaaagcgattatttttcaatatttgataatgtaattaattactaacaaaattgcttttaaaaattagaatttcagctttaaaatagatttattaaaagttttttggactgaaatctaatttcaataaatttataaacattttttaaataaaaagtgattaaaatatattttaattcagctaaattattttaaataatttttaaaaatgggtgtttcccattgctttttaaaactgcttttgtgtacttccataatttatttcaaaggcgcaattgcaactccacctggcctagttgcctcaaaca

SEQ ID NO: 24659 - DNA, 1679 bp, Heterodera glycines
  unsure (1)..(1679): unsure at all n locations
ttgataccgcaataaattttatccaaataaacggttgttgatcatctgataacattttattttgtcaaaaatgaaaattttgaagaaaaaatggtgaatttattgaaaatctctttaattcaataaaaatatttttttataaattttacaattttgcctcttttgaaataaaagtattgttttttcgttatacaataaatacaattactttttgcatagaaacactaaataaaatcttctttaattacaaaaaataatataaattctttacttaacctataaatatttttaaatttatattttaccaatttcgtgggaattttattaggctaatttggcgaacttttcgtcaataacaaattggatgaatttctaaatttctaaattaaaaaaacgttttttgcttcgatttttcgaattttaagacaaaattaaacgagtcaggcaaattttgacgaaaaaataaaaattttaaatgtttttttatcgaaataacaaaaaattgaagatgtttttcgtgaaattataatttcatttcatgggaggcaggtgctgtaaaattttccaaattaaactcgcttctgtcaattttcatttccgtgttattttttgaacagcaggtgacccaaaatggcaacttgtcaatgatcaaattgagaatgatttcttaattttgcaaaaactacattcacaaaaattagttgaattaattaaaatggccgaataaaatttattcattttctcagtcacctaaaaattgaatttatttgaggatcaattttttaatttccactttatttaagtaaatggaattttttaaatgattagctctttttttaaatgttttcccacccttttttacataattaaaattatttttataattcgctgattatttttatttttttaaattaatattttgaaagataattttgtaactattcaaattgaattaaattaattaatttaaattaaattcgcaattttcttttgagcgttctaaatctgtaatcattatttttttgattaccttcaaatgaataatgagagcgcatttctttgatgccaatacgaattattggaaaaaggcaattaacgaaaatgtttaaaaaatataaaaaaatttctttcaaaaatgggggtgccttcctaatcgccaaatttaattcgattttttttgcggaccctcacaatgtgactagcaaatttggcttcgtgtccttatcaaaatttgcacaaaaatcaaaaatgaaaatggcccagtcatctgctgatcaaataatgcattaatttggccttcccccatcttatcatatcattttttaattcatttaacttttctatttaaaattttgaaaaatttttcaaattctttcgccaattcaaaaagatctttgtcttttcaaagttttctattttaaaacaaaaaaaatcatttttcttatcggttcggattgatcttatattactaattgtgaagtgtccttgattttttgcgcgtcacttttgaaataaaattattttactctgaacacatccatttttattcgccaatttcaatttaatatttgtccatttttgngcatatattttttgttgcaatatgcataaaaattaaatcattgcctctacccaatgcatttttgccaactaaaaatttnngtaaatttcaataatac

SEQ ID NO: 24660 - DNA, 1754 bp, Heterodera glycines
acactagcaccaccaccaacaccagcaccaccaccgacaccagcaccactaccaccacaagcagaaggcgaagaagcattggaaaatgcacaagacgacgcatcgagtgggcgagccggcgccgaaaagagaccagtttggaaatttttcaaattataaatttaattacataaattaatcattttaaagtgccgttggccaaaattgtgcttccattggcctttcaatcgactcacaacagcgcaaaccgaaaaggagtaagtatttttcagacatttttctctttctctccccatttggtgagggccctcgcggcactccctcccctctatcttttctatccccaattggtgagggttttcatggcagtccctcccctctctctctttctctccccaattggtgagggcccccgtggcactccctcccctctctctctctccccaattggtgagggccctcgcggcactccctccctctgtctctttctctccccatttggtgagggaccccgtggcactccctcactctgtctctttctctccccaattggtgagggcccccgtggcactgcctctctctctctttctctccccaattggtgagggccttcatggcactccctcccctcccctctctctctttctctcttcccaattggtgagggcacacgcggcactccctcccctctttctcttccccattggtgagggccctcgtggcactccctcccctctctctctttctcttcccaattggtgagggccttcgtggcactccctccctctgtctctttctctcttcccaattggtgagggccaatgccgcactccctcccctctctctctttctcttccctattggtgagggcccccgtggcactcccctcccccctctctctcttttctcgaaattctttatctctttaatcggtttcactgttttaaacgcgaaaccgttcgggacgatagaagcaattacgcaaggccagcaacgatggaacgcacgatgctagttaaccgatttcgatttttgttattttttaaacttattaaataaaatgttgttgattattagctatcaaaaataggtgtcaaaaggtcaaaccaaaaatttaaacaaatgaattttattatagcaaaattaaactgaaaacattaatacatatagaaagggtgataaataaaataaaaaagttgcaaattcatttaaagttttacaaattcacaatggtatggtggacatattaggcaatgctaattacagtacacacttaaattgtcctatttgtcttttttttttttaattcgtcgacagcctactgtaccacgcaaaaaacaccttattccaagccagtgcccattcagtaaggcatgagccaattaatgttgcatgtagtaattggtcaatgccttgcagcatggacattgacttgggttaggtgagttttgcagatggtacagcaggcaacttcggcaaaggccaacatgcccacaacttgcaaaaaatgaggcctcatcaattgaacaaagacacataccaaatttgttcggatagaacaattttgatgggattttgcatccatcctccggatcaccccagcggaacagcgaacgggaatcaccgcctggctgaacagccgcctcaaatggagttgtggcgaacccattttgcgcagtctgcttgcggttcaatgggccgaattccaacgatagtcggccatgcggctttccgattcgtgccaggtcacggtt

SEQ ID NO: 24661 - DNA, 1372 bp, Heterodera glycines
aaggcacgaaacaataattgttcatcaaacttgagataaccatgaagaagcttttttacaaattcaaaaatacacttaattttttgagattatttcggataaaataaatgaattgaaataaattattcttctaatttttaaaattttattcagcaataattaatcgttagaattagccattattaaaccataaaaaattatattataagttatttatcttttcaattagtgaataacatttttctttaaatgtttgcctttttaaaatctttaacatttattttcccattgttcactaatatattttaatgcattcttttattggcagtagattatacgtaattggatcattaaaatcggcagaactcatcactaatttttaggataaccagtttttcacagtgacaaatttgaattgctagcttaattgccaataatatttcattgttgcccaaaattttgagatttgatttttcgaatttttgaaaattttcgtattttgaaccaaaatgagtcaattttcaaatattttatacaaaaatatctttatggtgctaattaggccatggtcatagtccaccggaatgggttgtaaaaattaggcaccgttttcgtttgctttcgccatcctcttccactgctttattcgtccaccatctgtcgtattggcattggcatcaccaccaatgccgccatgcctgttcgttgtcatgattttgttcaggtctgtgttgtcctccatctttggcattttcctttgaactataccgatgccaaattttgctggttccattgatggcattggtgacatcgtctttattttgaacttttatatgatttacaaaaattttggacaaagcttctcctgatcaggaactttcgaatgataccatgattgtccaagttggttggcaaatacctccaaaaataattcccaaaaatcggcgtttttttattttttggacaaaaataaataaaaatattcatgttgcacaacggactcgaacctccgctctctccctccctttgtcccattactatcttacaaaaaccactgagctacatatacaaatcttttctgcattctataacttttttctttgccatccaaatccaacattgttggtatcattcgaaagcttaatgtgtttagaagctttttctatgctattgcttgcgattatacaaataccaaaaaaaacatgaaaattgcgaaaaagtcgaaatttttgaagttttttcgcaataaaacttttccaggcataaaaaacttagtttttttttgtaaagctaatagagcatgttaagaactttcgaatgataccaagattgatggatttggataacaaataaaaaaagctatagtggaaaa

SEQ ID NO: 24662 - DNA, 1743 bp, Heterodera glycines
aattttgctgggaaaagatggggggggaggagccgcctgctccaaaatacaccgactcactcactcacagatgtgccaccgccggtgagcagtgcgcgcattttggagtgcaaccaaaccgacccgctggtgaccatcacatttgaccacttggagcccgaggaccggacaaagccggtcgaggagttctggctgcgttacaccgtcgaccaggatgttgaccagggcaaatggcatgtgtaccccgtgccggtgaaggccttccagcatgaagtgattggcgattcgctacgccaagtgaatgggcggctcagcatcatgttgaagccgttcggaactgtaagttttttttttttacttccattcccattttgccttttattggctttttgatgaaaaaaaacattttaaattctgagttttttaaatttgtgggtaattatttattttcgatttttttaattttgggtgaactgtatttcctccccccttcctaaaaatttttttaaaacaaattttctagattttaaaaaaatataaaaaaaaacttttcaaaaaaatatatttttagcaagaaaactctaagaaattttgaaaaatgaaaaattttcaatggtaaatgattttttgaccgatgaataaatgttttcgagaaaaaattatgcaaatattagtaaaaaaaatgctcataaaatttacaagctattttgtccccctccttttcgagttccctacagtataatacctccattccccttacagtatgcctttcaattgatcgcacgcaatgccatcggggacagtgccgcctacaacattgagggcgtgtgccagacggcacagcaagcgccaagtcggaacccgtccggcgtccgtgtgatcggcacacagccggacaatttgatcatctactgggacccaatgggccgggaggaatggaacggcgaaaaatttgcctacaaaattttctaccgtcgcatggatgaggacggtgcatggaaggaggtggtggtggaagacccgtttgccgaccagttcaccatcgacttgggcgacaacgcaagggcatgggacgcgtatgaagtgggttttttggcattgatgaataataatggaattttgtagggtatacattacgtttaaaaaaaaatttttttttagttttttaatagaaaaaaagccccattaagaaaattagaaaacaaaaaaaatatttcaaatttaaaaaattttccggtggaaaacaatgcggaggagggcagggtgaaaaacgaactcctccaagttttggtttagtgtggccctatctgatggcctaataatactgctttgatcagggtcatattacaagcgtacaataaaaggcaatttaagcacactaggtattattgggtaacgtaacttatatagtacaaaaaaataaaaacaaattttaaatcctttttttaagtctatatttctttttaaaattttttgagtatattatcccattgtgtaccatttggttaaaaaaatcttgtttttaatgatcctgggttctttcctaaaaaaaattttgcaccgaaactattttttaatatagtttaccgagtcaataaaaatggctttccactcggaccccctaccaaatccccatatttttatccagcaactcatccatttcccaataattgattgaccaaccatgccatgtttttacccaggtgcagtgcgtgcaatgaacggccgaggactgtccaaatt

SEQ ID NO: 24663 - DNA, 1826 bp, Heterodera glycines
tataaaaatattttttttaattaaattcttttcccgtattaaataaatactttgtgggatagtttgttttataaattatccttaattaacaattaattacctgttcaaaacgctctgcaacatcctcttttgttacgccttcgtcgtaaaaattgtcgccaacgttcaacaaaaaatggggtgccatttctccagaagcaattttatacaattcttttttcgactttttagaagcaaacacttttgtaaaatcctataaaaacaatttgtttaatttttacaaataaaaattgataggagaaattaaagaatttttatatcaaaactttagttttttgttgttaggattaattaattaattattaattacttttcgaggtgtcactccattactcgtagcaagcgaatccatcgcctttgccactgctttttgtgccacagttggacgataatactttactaccgtaggatttttctcacaatcagccaccgttccttaactcacagtggtcacatatgcgtttaagtgattattgtatattcctattttattttctctcattttaaaatgttattttgttctccctcttcaacttaccgtgtccttccaccgtacactgctgctgtttgccctctaccgtatactcctccccaccgatgtcaccgatgacaaaaaagcgcaaaacatttccctccacagaacagccataattttgcgaatttgaaacatttgtgcatttaaagccaagttgattttcggggtcggcaacagaagaaaggaattgaatagaaaatgccaaagcaatcgaaatgagaaacattttctaaaggtaaaaacaaaattattattttaaattatgataaaagaaaatttctgagtgaattaattgagcagtgatagccttttatgcagaattttctacttaatgatgtgaagaaatcctcttattgacgtaattagctgatcattcattgattggaaaatattatttaagcattatttccataaaataaagatgaattattactatttctgtgaattattactatttctattgctagaaataaatgcagaaaaaataaaatatagtgaatttcgatttttttttaataaaagggcattttcatggcaatgatgtaaagcaaatgttaatagcaggtgggaatgaaattattttttaaaaatgataaatatagcaaattttcgattttattttttggccaaaaagggcattttacatggcaataatgtaaaggtaatgttaagcaattaaaaaaaataataaaaataataaatttatttttccgaaaaactttttaaatttgtaaatttttatttattagtagggctgggaataaaaatcgccaatcacgaaaaagtcataaaaaacatcaaaaatctcgaaaaaaatgtaaaaaagtcgtgaaaaattaggaaaatgtaaaaaagaataccattattgaaacaattatagaatagcatttgcaaaaactattaatttcgattacaattttccaaacttgtcatattaaaacgcattgtaaaatgggacatggaattgggcaagacttcaacaaagtaacctttttgtcgaaagaatcggactgaaccgtcgtctctggactgggatacagcgctgcgcgctttttgagcttcgctatctctgtaagctattgggttgtgaaagaggtacaaccacgggttgaagaggtacaaccacgggtggaagtttaaattaatttttgaaggcgcaaaccaatcaatcacttttctgatcaattgctcaagctatatagtacagcaatttcaatcgttttgttcaccg

SEQ ID NO: 24664 - DNA, 1347 bp, Heterodera glycines
aaacaaatagacaattttatttactagggttataccataaaatcataatctgtttttttatgatcaactattctaatgatttagcaaaatttcaaggttaattagccgactgaaaaaagtttttatttgtctatcaattggtaatattgttaatttcggttctcttgctcaaaaagtcaccattataaaattggccataacattggtcaaaatcgcattttctatcccatggtacatattcattaatagggctccaattttttattaaaaaagtaataaaattaagccatatcagtcttgagataaacaatttcaaaaaagcaaaacttgtcaagaaaataaatttaaaataatttgagatgaattttataaaaatttttcatttcttagtggtgtatttttgaaaattttcgggtcgtttcttagggggtgtatttttggttgctctataaataaaacctagtaaattggcactaataaactcgaaaagtagtttaacaacaccaaaaaaacaacttattttcgtgcttttcaggccattaggagctcagaaaaaaataggcaaaaacctgaaattgtagccctcattattcattataatcttttcatcattagtaaataaaaaaatttgatcaaaaaacgacaagtttttatggtacaacctagtaaatacatattaatgataattagctagcaccttcttttggagcattgcacaaaataaagaaactcaaccacttttcatcagtgttctcatttttcttttctatttttgccaatattttccacgaaaatcctttgatgtgccaagtttcacttctccgttcactcccaataacttctcgctcaaattcggacaaattttcaatttccattgaaagtgttccgctggatttgttgggatcagaaatgaatttctcctgcgttttttcatcattcaacgtgacatcaatggccaatgtcactttgtcaacatttttctcgtaaaagtcatttttcgggttcatcaattccttaattggccaaaatttgtgatcactgatcaattgtggaaataacataaattcaattatcactcaccgcaaaagtaataaaattaccaaatccaaagatgcgtaaattattgaaaacacaatcacaacgtgtcccaatggaattcgtcgctttgctctttttcgatacaattcgaaaggttgccgaacaaacgcagggccagtggtcacctatcattagttgtgtatttagtatcattcggtgcagaataccgagatgaatcaaaataagtttatcgttgacccaaacttattacggatttttaatacgtaattagagctggacatttgaaaa

SEQ ID NO: 24665 - DNA, 1705 bp, Heterodera glycines
ggtaattaagagcgttaattggtttcccgtggcctcacgaaaccatgggcttcggtgttgccaagcaaagcatcgtcgtgaaagaagttctggaaaaagcaaaatgttcagagatggaaaacaatgaatcgattatttagactccgccctctgccaagagactgaaaacaaacaaaaattcaaatattacaaaattgggaaattatgccctttcagtgatttttagtaaggcctgttggctatttatttactaattaaatgcgcttttagtggtacagtacagtaatcaaatcattgatgggaattctcatcatgggaagaacccccccccccctcccccgatcaatttcataattgcgccatgtttttgatttaggcatgcttattagtgccttcatttaatatcactcattattagatcatattttttgggttggcgcttttaattctactaaaatttgtacattttaaataaaattttcattttttttgaattaaaaaactattccattaataaaaaaaatctaataattttttgaaattttatttttttttagagtttttcacctaaaagtgccagccttatactaagcatttttttaatttgattttttccccctctttgttgccttctttttccattttcactcaacttttttgtggtaatgtgtctgcttttagcaaattcaattagtcccttcatttaattacccaaccaattaattaatgattattaattagctcatccgttatttttggtgcctttcccccatttttgtgctctttcttctttccttttttttgcatctttccttttcaccaattcctttttcattcaaaataaaagcatttccattttcatcaatgccttttatttaaaatttcaataaataattaattaattaattttaattgtttggcccaccttcgtgccgaaagaacagccgaaattggagggaacggacggcccaatagagacgagcaaagccatcgtttagccgtttgttgcccttcagaagaattggacaaaaattaatgccatggcactgaatagattaaaaaagtaatcgtatgttttgggtgcctggttacggtattatttgactacaccctacggtgaatggtattttcccgttttatggccaatttgaatatttattaagattcgtagtgttcggtttttaagttaaaaattttgccataaaaagagaaatttaaaattaatttaaaaaatatataaattttcatttaaaacagaaattttgtaatagaaattcaaataaaaatttgggttgaaatccaaaatgtgtcaaaatttattaattcatactattaatgaattgtcccaaaaaattgtcggcccaccggaaaaatttgaggcggaacggcatacacagaataaagtgctcgacttgtatcacttctgcagaataattgaaaaaataaaatggatttaatttaaaaaattttaaattatgacggcatttttttttttggaaatttggcaccaaaataaaaaataatggaaacaatattatttctcatgggaccacagggttgccttgggacaaaaaaaagggagccgaaaaattggacaatggaaatttggacaccgatggaatattggatatggtaaattagataccgtaagatgggcacctaaatttacatttaaaaaataataataaaattaagaaaaaattta

SEQ ID NO: 24666 - DNA, 796 bp, Heterodera glycines
caccgttttaattttacggaatttgaactttgcatgcaatttaaaaaagagaaaagtgctggtcagcatgaagattttgcagttttttctctgtctccatatttctctcagcataatgggaaaggaatgaatgattctctttttctcattccgcacacactctttcgcctccttccccatctcatacttcttttcctctccgctcacacacactatttcctctgtttgcatcaatatctctgctcctccctatgtaccaatatgcacaacccatacattttcttttaattaatttccattttagttgcatattttgctgtctgttcatcgcttctcggccttttggctaagatcaaagtgtagttacagttctttacggcttaatctccgtaacggcccttaccgggtcaaagaggttaaccaatttttgggaattggtcgttgcagggggcttgctcccgctcggctgtgcgttggcccgttgtttcacctgcttacgggaacggcgcgtctcccctgcgggggagaacaaaattaattttttttttttgggcaaaccatcgtcaaagcaaatttggcaatggtacttgaaagctccccagggttacaagaaagcgggacgtgactttggccaaatcccataatggtaatcaaatttcgcccaaaccttcccctccatccctttcaccctctctctctctcccccgccccgctctctctctctctctctcctagctcccatcctctcttattttctctctctcttcctctctttattttgttttctctctctctc

SEQ ID NO: 24667 - DNA, 1845 bp, Heterodera glycines
  unsure (1)..(1845): unsure at all n locations
taatcacttgtaattttctaaaatttgtcatattttcaaaaattttccccgttgtcaatctattaattactggcttcgtatccgtaattaattataaaaatggaaggtttgagataataaataatttggaatttgttaaaaatccaattgttaaataaaatttatttccatattcatcaaacgctgtcactcatcaaaatgaggactttcgcttgaagaaacttttatccattggttttgccattcattcataaacaattcccaaaggcggaaattgctaaaaataaacggatgtgactttttgctctattccaatttaagcgtccaatggatgagcacaaaaaattttcttaaatatactcgaaaattctaatttcggatttctcattgcaatttctttcttaagtcagcgtttaccagagaatttaagctttttttgataccaagaatgtaggaattttacagccgctaatatttaatttgtcaaataaaattggatgtcaaatatggaagagcaaatggttcgataattaaattttataaagtactttttcaatttttgagacgttctcgagtttaaaagtttaaagactctcctcgagaacggaatggaaacgcactcatccatcgttcgtcacatttcatttatgcaaatttctcacacccaattttctcatgaaattggaccaccaccacccgaggcacacaaaagaggatggattaattaccaatttaattgaatgggaaagaacggcgaagagcagaaaaaattggggaaaattaaatagatcaccgaccgaagtaccgtttaatttcgctgaaatttgcgagtaatagtaaagaagtttttgagctgccgaatgataccagaattaattaatccttaaatatgctttttatggtcgtgtaaactgcaataaagtccaaagtaattcggtcgcaaataaagcatttttggcgttaaaaacttcagctgacgagttaaaaatgtaccgacctcttttgccactggccgagcggccaccagatctccaccatgtccgtagctatgtcccaccaatagctcctcagcggccttgccggccattgtggcacgaaggaccatattcagttcttcaatagagcaatcttggtgttcaattggtgttgagtgggttaagcccaaattgattgcttggaactattgttgttgaaataaagtcctctggcattccttccggcagaataattgccaatgaatggccagcttcatgtccagctgtcagcgcgggcgtgtcagtttcatttatccgcgccaaatcgatgccagcataaaatttgtgctttttgctccaccatctttttgcagcctttgaagcttttgatcttggtggcatttttgttcctggtatagtaaaaaacaacaagatttatttggtgtgacatccgacccttattgtacaattaagaaaacatagaacatgctatcttatataataaagttgagtgtgtgtatgtatgtatgtttgtatgtgtcattgtttgaattagtgtggcgttttgtttgagttttgcgttaaaaatgaatttgaaaaaagatgaaaagaaattgttttgaaaaagaagagaatataaagaaaagagacgaaaataaatagttaagaagaagaagaagacaaaagaaatagcacagaaaaagaaggtaaaagatttctccttctaggatgtagaggttagagggagnggatggtggngaaaatagtgcactgtctgattgtctgtctacgcgggcagcggcgggtgagaggggcatacagtgancagacgcgtgctgctgtgcagcagcagtctgttggacgcgtgcgt

SEQ ID NO: 24668 - DNA, 1410 bp, Heterodera glycines
  unsure (1)..(1410): unsure at all n locations
cggaggtgcgataggaaattgtacatgcacaaaaaagcatacaattgtgaatgcacaatgccaacattgcctgttcacaacattgaatcgctcgagcacaattttataaacgcacccgaccggatttcagcctaattgatccggtctcgataaatatccagggggaattcttggctgtgtcaagccgttttctgaatatttgaaaacaaaggggtagtccgggcggggggggggggttgatggcttattattctgaccatttttattcgaattttagcatccacagcaaccgcaacacataaacgaatccattgacactgtcgatttgagttgtttggaacagcagcaggaagagagtggggatggaagcggagttggggcggaacaacaacagcagcaggacgaggaacttgttaccgctgaaacttcgttttcaggtcaacatgaaacggcgatggaccaatatcagcatgaaggtgggggaacactgacgcgttgacaacctgcccctgcattttaagctattcggcaaagtcacagtgcatcgccgtcgtcgatgctctcttccggttcgtccagcatgcatgaactgctcgaccggttgcccaactgcatcaaccgcaatctgatcgatgcgggtgcgcttgactttttgcgcaactacgcacgcagtaaaacccatcggaaacggctggtccaacactttttgcaggtaattagttgttaaatttatttaaaaatggtcaataatgctcgctctatatgacaatgctttaataataccaattaaaaagcaataaaaagcgtctgatcttttgccagccattttaggcccccgtcgaccggttggatttgctgcctttctacgctcgctttttagcaacggtgcggcccgcttatcctgacctgacaatgcaggtaacggggcgcattaattattgtttgttatataagccaatagacatttttattcccaaaaatccatgtgaaatataaaccaatattccgtcattttggaaagtattagtgagataatttcgctnttatcccttctatcatacaacgccatagattggatgtcttgttttcagtcttcatgagcttttgctccgcttcgcattgtcagtgggcataacccaaccgatgggcgcgggtgccccgcaaaaagtgggcgaagtgttgacggaatgacaagactggaggccagctgcactgggcacctttcttgcggaactgtcagctttcgtttttataaaccaatggcactaaaaaaattcaacccattaaattaaagttttaaggaaaaggtttttttttttttttttttttttctctctatagaccccacccccccacgttttttttttttttttttttttttttttttttttttttttttttttttttttt

SEQ ID NO: 24669 - DNA, 1218 bp, Heterodera glycines
ctgccgaaacagctgctgccgaacaaaattcgctttgatcgactgaggatccagtgattgaaaatgttttaaaacattattgtattaattaccgtatttattgaaatataacccctgtggggttctacttttcaacccccctctcgaaaggggggtgggttctaattcagagcggctatactatatttcaataaaaacggtattcacagtgtacccaattgttcttatcctctagattgtgcttattttcaggtttcagataaaaaaaaattttttttttgtcaattttaattttccaaacattggcaatttctctaatcagaaaacattcatattttggagtcaaaatcaatgagtgagtccatttttcagttacatcgacataaaaagagtccatttttcagttacatcgaccactctgtgatcgcttttctccgtcgcaacaagcaaatcttcgacaaaggcaccaatttgttcttgtctctgattgatgaaggcacaatttgggaggtggtggcacgtgaagtttggcccatctttgagcctggcattcgccacttggcctttcggtggggcaaatgcctggacaaattgcgccgtctcatttcgccaactattctcactgatctgaatcccaacaccattgattccggtcaactgttccccaatctgatcgggccaaataattgggaaagcgcaactgccggccaagcgcttttcatttggttgcacacgccgagcgccgacggccgagcaaagcgattggcatttcgagacttgaacgggccaagaagcgtccaatgggtcgaaaatttcgtagatgtatgtcagggatggcattccgaggcaccaaaaattttcggaattccgaaacccaaaaatttttcggaaacaatataactttttaaattgttgaccgaatccaacagtcttgatatcattggaaagctcttcacaggctctaatagcctactaactattactgtaaggaagaagctgactgtgcgcttaaatcgtggagatacgatcagtaaaagaaagggcaaatgtgcctcggtagctcattggtagagctgcccacggattttttttttctgagctgcgtaatcccttataaatagcttataaatatcttctaagcatttaagctttcgaatgatatcatgtagtctaagttagtgaacaaagaaaaaagcatagcatttttaactttttttt

SEQ ID NO: 24670 - DNA, 1642 bp, Heterodera glycines
  unsure (1)..(1642): unsure at all n locations
ctctnnagagtcttgaaaanattttgtccaaaaaattttacgttggaaaattttcggtttttatcggtaccggtaccggtggaaaaagttggtaccggtaccggtggaaaaagttggtaccggtaccggtggaaaaagttgttaccggtaccggtttttgcattaccggtcagtaccggtaccggtttttttacaattaccgattaccgtgcaactctaaataaaacgaaaattaaaccccaaagaaacaatcccaaaaatttctgaaaatacacccttaaggatcgacacgaaaattttcaaaaataaaccctatgaataaaaaagtttcttaaaaattcaatgccttctttatattcatggttgctagcggtgtatataattttctttacatatgctaatataaaatatacatattgtatacatcaaatgccttctttattatctatggttgctatttctatataaattttcatttacacatcatagaaaattcaataaatcaattcgaatgtgtttttgtttgaatacaattaaataatttttcgggcagaaaaagcaaataattcttacaatttggtcatttttctaaattctattaataatttcccctctaaaattgaaaaatgagcatttaatgcctttaatctccaccattttctttatttaataatatccaaaatataattttgcatttcatataccgtacttcttcgaataaagccccaggggctctattgttcaaccgcttcaaaaatggggctatattcgagggtgggactgttttgttcagtcccttcaaaaatggggctatattcgagggtgggactgttttgttcagtcccttcaaaaatgggactatattcgagggtgggactgttttgttcagtcccttcaaaaatggggctatattcgagggtgggactgttttgttcagtcccttcaaaaatggggctatattcgagggtgggactgttttgttcagtcccttcaaaaatgggactatattcgagggtgggactgttttgttcagtcccttcaaaaatggggctatattcgagggtgggactgttttgttcagtcccttcaaaaatgggactatattcgagggtgggactgttttgttcagtcccttcaaaaatggggctatattcgagggtgggactgttttgttcagtcccttcaaaaatggggctatattcgagggtgggactgttttgttcagtcccttcaaaaatgggactatattcgagggtgggactgttttgttcagtcccttcaaaaatggggctatattcgagggtgggactgttttgttcagtcccttcaaaaatggggctatattcgagggtgggactgttttgttcagtcccttcaaaaatggggctatattcgagggtgggactgttttgttcagtcccttcaaaaatggggctatattcgagggtgggactgttttgttcagtcccttcaaaaatggggctatattcgagggtgggactgttttgttcagtcccttcaaaaatgggactatattcgagggtgggactgttttgttcagtcccttcaaaaatgggactatattcgagggtgggactgttttgttcagtcccttcaaaaatggggctatattcgagggtgg

SEQ ID NO: 24671 - DNA, 1217 bp, Heterodera glycines
caaaatccacctctcttcgtccaaaatcgattcaaatccatgaattcccctattttctattcaattcagtgcatttgaatcgattttgaacaataaaagtggattttggtgaaattttttttgtatcgacttttgttcgaattcgggtccgggcttcgaaattggtcgaaatgaatgccatattcgtgatcagcgacccgaatagccatggaaaacacacacctttttaccattaaaaacaccaaaatttctgacctggtcatacacccgttcctccagacaaatgatgacacaaaatttctccttgtaattttggaatttttgtggacattttctgaagaggacaaatgaacgcaatggaaaactaaaaagttttctcactttatccgtcgattcctgtccaacatgttcagcagaccgttttgggtatagctaaaattttatttggaaaaaattgaaaaaaaacacacacaaatttttatagtttcgttagagagaggtccaaatgctttttttcaactttcgttagagaggggtccaaatgctttttttcaacaagtattttttagacatttgtgatttttcgttgataaatttgaaaaaaaaaaaatttttttttggcaaacaaattgggacctcccctgccccctttggttataggcttccaatcagtgaccatctttagtgggtacaccccaaaatctcgccacccaaaatttcaaaaattttttttcaaacttagaaatttttcaaggaaaaaattcttagaaaattttttataagaaaatttaaaaaaaaattatttgttaagtttttttttgaaaatttttcgaaaaaacagtaatttatcattaaatttcaaaaaaaattgcttaaaaattttttccttgaaaaatttataagtttgaaaaaaaaattttttgaaatttctgaggcgagatttcggcgtcgagattttgtcccgtcccctctttagtttcctagagcataattctttttttttcttacttagtcaatgccaacattcttggtatcaaacaaaagcttgaagtctagagaactttttatttaaaagtaaatttggggcttaaggcaataaacaaaaaattattcttaattatacttgaaaaaggcggaatttcttgtttcctctttgtaattttttttcttaatgacagtatttgctcttttcttatatttctaaattccccaagact

SEQ ID NO: 24672 - DNA, 1203 bp, Heterodera glycines
cctatatccgcttcctttttgaatattttttttcatgttgtcgagtgcttcagccctacaacaaaaaaagaattagctatccatgtgaaacccgaaccaagtctgccttgctcgacaagaaagtaacgggagcgggtagcttctttttcgattgcgcacctccttccccgtatttttcttgctaccattgtcgtcgttctttccgctgttgccacctttgtcatctttgccggacatttcttatctgatttctaacgcaaatagataaaactttacgattattgtcaaaatattccgttgaaaatcagacagtaaatttagaacatgacgaataatttgtagtgtatttttattaaaatcacaattatttttattcatatccaaacggaaagacttcatactgctcatttattattcctttttggcacacaggcacatattttttgcgcatctctctcgtgataatgcgactatcacgtgtcggcattattttgttgtagcgaaatactgagggtgcatttccattattgtcgttcttccgcgtattggtgccgttgttcagcacagaccacaccgtcaggaaaaccgctggcctcaatctgccaaaaacgatgttccgttacgtaaatgtggtcacttaccttaagctttatgagaagtctgacgtagtctttgaatatttcgtcgctcctaaattgaaaaaaaatgtacaattaatcttcccgccggtacgcacccataccattcgtcgtagtgccaggctctccagaatctgtccactctgtagcctgattccaacgcacgttccagttcaatgtgtgtgtagttgccagtaaacgcacgttgctcatctgtgtgtatacatttatgtgttcggcgcgtatttgtctttcggaatgctgttgcacaatggtggcagcagcagaacaggaggcggtcgtcaattttgagtggtaaaacgggtattcgaagcccccgcggagggattatgcggaccctatagattccacgatattgtaattgctcagcccgagtccaatcgacaagcatctcctcagcggtcgggtggattaccgacggaacgccaaccggatagtcggcggaataatttacccatggatatagcgatataatatcgaaaactgatattttttcgtcctctttctgggtagcgatcagctgaagtggcccggttctaccgcc

SEQ ID NO: 24673 - DNA, 1092 bp, Heterodera glycines
  unsure (1)..(1092): unsure at all n locations
ttttncggggcagtccccctgaaccgatgcgcccagatttatggggagaccgaatccttccggaatagcttccctatagcctgtactttaattctgcgttggatttttgctccccataattgtttgagtaccccaaacggacacttgaaaaaatcgatttttttgttttcggggcagtccccccgaaccgatgcgcccagatttatggggagaccgaatccttccggaatagcttccctatagcctgtactttaattctgcgttggatttttgctccccataattgtttgagtaccccaaacggacacttgaaaaaatcgatttttttgttttcggggcagtccccccgaaccgatgcgcccagatttatggggagaccgaatccttccggagtagcttccctatagcctgtactttaattctgcgttggatttttgctccccataattgtttgagtaccccaaacggacacttgaaaaaatcgatttttttgttttcggggcagtccccccgaaccgatgcgcccagatttatggggagaccgaatccttcgggaatagcttccctatagcctgtactttaattctgcgttggatttttgctccccataaatgtttgagtaccccaaacggacacttgaaaaaatcgatttttttgtttcataaatattttttttcagaaagtgctctaaagcgcaccaaattttatttacaacttaatttagcactctgatgctttagtatcaaaaaggaagatggagaaaaaatttttaaaaaaatttttccttatattttggttatatcgttttgcttttggtggggtgcttggaacagtggaatcatgcgcacccgtccgatctggcaagttaagcaacgattgctgactagccaaaaggttcggtgccgtgatgaaacgaaccagcactgcttaccccgcggcacccggcacggtcaccccgaaaaaatggatttaattttctctccttcggggatttttttccattaagtcgtccgatagcgttcgattgctctagtcaatttttaaaaattttttgttgaaatatttgtcgtgctctgaagggcgggggggggg

SEQ ID NO: 24674 - DNA, 983 bp, Heterodera glycines
ttctttaaataataaataaattattaaatacaattatcttctatttattatttgctaaccggttttcgtgaaagaaccgtagcataagtttcaatgctagatgccacgttttgcgtgtttgtagttttctacagaaaataagtatatatttttgaactttattatattttttattttaaaattttttatgtgtatatttttttttgagaaattatttaatttttttttaccataattgacttttcgttgatataacactgccaatttttttcttacacccaggctttcgagacaaagaccttttttgcagacaaagtcttgttaacactcttaaatttttattatattcggtatgtttttgatgttcacctcaaatttattttcaacaaaattgatgcctgaccatccgttggacgtgatccatggcaagctgttttcacttttcgcactgtcctcagtcacagtctgcaaaatatttgcatcattctttttatttaatattttttaaatgtactcacttttccattcacaattacataagaagtttccatttttttgatagactccgataattgtggttgcgcagatcgcaaaactggcttgaaaacagttttgatctaatattttatataaaattagaaaattaagaaatatgttttactggagaatatccaattggtgtggaaagcttttgcgccacaatttacaatgccttagcaggaaccggctaaaattcgtaaaaattgtaagttaacagagaattaattaatattacttttccattttcacggtcatccattgatttttctttttttcacatttcaacggcatttttttagcacactcattcactaaattcttttctttgacctataaagatggacataatttgaattaaatataaaaaagtttgtataccggagccaaaccaacaatcggtccacagcgctgtgcgagaattcgctggttgcgctcctttttgc

SEQ ID NO: 24675 - DNA, 1032 bp, Heterodera glycines
agcatcaaatccagcatatgaccatagcaacatacgcttggaattcatgtcacaaaaaagttttttccgtggaggtatctcactccagttcaatagaatgcgcattttgttcaagtatttgggaattattttgataaatattggttttcaaaaaggaaaatttttttacggaattttttcaaattttataacaatgttttgtgaaatagcccattttaaatcatttactggtcgatggaccataaaaagcggagtcgtcaccctcgtcaaacgaatcctaaattaatgctaactaattcattttaattggtaatttactctttggccacgcgaacgtttagaccatgatttgcactcataatgaaattgaacctcgtcctaaataatttattattttttacatgatttatattgctattgcacctgctctttttggtcaattcaaacgaacgcgctatcgtcacactcatcgaatgagtcctatatttattttgttaatacttatttttaatttattttcattactctcattcctaacgctgccttagaccaaggctttggctgcttcttctaaaattgttgaatttaatatattttattttttatagattagactttttcagtgggttgtgttgagaattgagagtatccttttggacgctctacgggtggaaaatcagcgcgcttgtattgcgacatggtcctgtaattattatataaattatgtttaacgttttaattctttacaattctttcgggtcaacgaatgtgagcccgggtggtgatttttgcaaggcttttccttgactcgtattttggctttgtgagctgatttctaagtatagataattgatattcaattattttttgatcatttctacctttttttgggggttttttcaccaccttgttgcatatttaaataatataagtaattaaaacactataactcttaaaattgagcggaattttatatttaattataaaggattataggcaaatagcaatatagcaatagtggaaaattaaaag

SEQ ID NO: 24676 - DNA, 1327 bp, Heterodera glycines
  unsure (1)..(1327): unsure at all n locations
tctttccatactttnntcattcattnntataaaaataaactataatcgactaaagctactttttttggtttaaaaatgtntagaattcagtcaaaaatccataaaacgctttttaatgttcaatatctgttaccaaatcatgcaaaattttcgaatttccccggcgcatcctttatttcaaatttgaccaaaaaaattacctttgtgaaatatgttaaattcaaaattatctccggaggtgcctttcggcaattgtcgccctccatccatcagattttttggaaacaaaaacaaagtgcgcaagcgcaagaagaaagcctttttgaatttttttagcagatttcactgaagttacaaattttaaaaacattaaagttaacagtaaactaaatttctcactttttatgcaccgagaaaatcttagggaatttgaaaaaattcaatcccgaaacgtccaaattacgatgttccaattgttttcttatttttttaaattaaagactaatgattttattaatttgaaaaataattaataaatactttttttgatggccctggtttattgtcccggtttttcctaaaattcgatcccttgcatctctactcaatagatttttttggaataattgtcttcaaaaatttaaaacaaataattaaggaaaaattgaatttaaatacgaatttagaaatgctacattttccaattctcacgtgtttgcttcgacacttctgctggcgaatgttgaataaaaagggctcgtccgaagtttgagttcatctaaagtgaacaattaatgttccctataaaaaccaaaaataaaaaataatttttttttattcttggaaaaggctcaaaaaaattaatcagtgtaaattaataattttatttattttcaattgtgttttattttttctcccattaaattcagttcggcacttcctaaaaatttttgttatttcaaattaaaaaaaaaggatccaaattgaacaccacgacgggctactttcaagtgtaccgttgacatttaaatattaacaaacctggccttttatacattcgaacatcggccaatcggtcgatttccttggccatataagacacttgcttatacgcctgcatttcgccaacttgttgagcaactctttcggcagtttctgttgccacctttagctgctgaatcgcatctttgcccaatttggagtcttttacatttgatacaatctgaaaaagtaatttttaaataaaaaaagtggtaattgtgagacaatgcaaaaaacaaaacatcataataactgacccgcgtcatgtgatctgtgaattcttcaa

SEQ ID NO: 24677 - DNA, 1079 bp, Heterodera glycines
gagtggactttgggtccaaaatatcgccaattattatcattaattaaataaaaataatatcgtatttaaatccgttaaccttgccctccttttcccaaaatccctttcaatgaatgcccataattttccggggatgccctttttgtttttagagttgacttttggtccaaaatatccccaattattatcactaactaaataaaaataatatggtatttaaatacgttaaacttgccctccttttcccaaaatccctttcaatgaatgccaataattttccggggatgccctttttgtttttagagttgacttttggtccaaaatatccccaattattatcactaactaaataaaaataatatcgtatttaaatccgctaaacttgccctctttttcccaaaatccctttcaatgaatgccaataattttccggggatgccctttttgtttttagagttgacttttggtccaaaatatccccaattattatcactaactaaataaaaataatatcgtatttaaatccgctaaacttgccctccttttcccaaaatccctttcaatgaatgccaataattttccggggatgccctttttgtttttagagttgacttttggtccaaaatatccccaattattatcactaactaaataaaaataatatcgtatttaaatacgttaaacttgccctccttttcccaaaatccctttcaatgaatgccaataattttccggggatgccctttttgtttttagagttgaattttggtccaaaatatccccaattattatcactaactaaataaaaataatatcgtatttaaatccgctaaacttgccctctttttcccaaaatccctttcaatgaatgccaataattttccggggatgccctttttgtttttagagttgacttttggtccaaaatatccccaattattatcactaactaaataaaaataatatcgtatttaaatccggcaaaactgccctctttttcccaaaatccctttaatgaatgcccataatttttccggggatgcccctttttgtttttaaaagtgacttttggtccaaaa

SEQ ID NO: 24678 - DNA, 1173 bp, Heterodera glycines
ttggatcactggtatggcgcaattcccggtctcgcggcccgccttttgtcgcttttatcccggtcttacggcaccgttttcgaccatttcggggctcatcattttttattttcatttctgtgttgatatgaatgattttgaatttgtggcttttaatttgaaatcgtgtcaacaatttccaacaatttcaggacattttccactttttcaattatgctgatcagaaaataaacacccacaatttgctgctgatcagtccacgcttcagcttcaccaccgacacacttttccttaccgtagtagtcaatttctaggcatagactcaccggctactgtagcgtcaaaagactacaacaaaacaacaattttatcagctcccggcgatcattgacgccgctaggagcaaagatcgtcttctcggcattcttcgttcttcgtccgttcttcgggcaaagatcgtacgttggaaagtgaaatatatgatcaaagcctgatcaaaacattaccaatattacatttacccaaaaacattcggataattagtattttgcatttgttatgtgatcagactggccaatttgatcaattctgagtaactgatcggaacacaataagcaaaatataaaaaagctgagaatacataatttcgttcattgttttctggatttgatttaacttaaagctccaattactaaactcttccgttggccaaatattttttggtaaatattttttatcataattagactgaccattttcgaatatctgattggtcgcgctcttaaatcacctgtcaataattttgatagttcgaaagtgttcttgccggcttagtgtcatcctggtccattcatattcatttacaatctcttttttcattaatgctcgagaatatcgctttcgggtgtctcgacggactttctggcaaattttctgtatcgattaaggcttctttcaacatgacagtgccagcatagcagcagcagtgccatgcgccctctgtgccgaaaacactgacaggagagcctttgctggtcggtcttcgctccgctacgaactttggaggaccaccagcagtacgtaaatttgaaaagcattgcttttgaacaaatgttcaataatgtaaagatgtcaagcatttaaaggggattttgattttgagtctaaattaaa

SEQ ID NO: 24679 - DNA, 1455 bp, Heterodera glycines
aaaagaacggcccgcggaggttgcctttgtacacgacgtggtcgatgaagtaatggagcgagtccaaattgtccaaaaagccttaagggaacgaatgccctcctaattggacaccaattaacgcaatcgccaaagaccttcaaatcggggctcatcgtgcggagcagctgatcccagccaatttccattgtgtattccacctcaaaatgccgctttttggggggaagttccggcggggaatggtcaccagaaatgccccgtacaattcccacacttcctcacgactcattttggccaatgcgctgacactttcgacaattgcgtaagtctccgagtcggggtaatgctgatttacgatgttctccttgccactttcgaagcccgccttttgccttcatttgcaacactgtttacttttaattatctttatttttaaattgacaatgcttcgcgccaaaaatcgtcgccgaacattcggatcatcagaagacggatggattcgtggataaagccgaactgaacagaaagaagcgaaatatggaagaaggacaaacggacggaagggatcaattaccatttggaacagagaggagagaaatgaggaaataaattcaaaaattaattaattaattggacaaaattattgttttattcagtcagcccaaagcaaagcaattaattaagggatgggaaaaatatgagagattttgcaaattcccgccacttcttggctttctctgcttttatttcgtaaatatgacatactgttgaatggcaaaacattttgccataaaatattccacgaaaatttccgtgccaaaagggaaaatcgctgacaaatgaagccataataaaaatatccattagtgaaataaattggacgcaaatgattaacaattttcgagtaaatttccacaaatgaattcttttcactcatcaaattgggtggttgagaaggaactgactgaacgcgtagtccatttgctgtgctcgccattggggcgcctaaggcattttaattaattgactgctaattaagcaaagattcatttacaaaattcgcccaccatatgacccgcgcctcgaacttaaattgtaaaatgagtgaatgggtggccaatcacttggccaaacccgtgaggaaggtcaaaaagcctcgggcataaattgttttgaagccggcgatttgtctcgcgactttccacggctgtttgttgatggaacgctaaattggctaattaatttgcttttttcattgcaaacgcgccgaactttaagaccaagttgcgcagtgaactgttgaccaagcaaaaagttgcacgccatgtccgtgtcaccgtaatacaaaagcacgcggacgtgcgccttcagaatctttttgacgaacggcgaagtgtcatctttgacgcgggataattagctgataaatgatcggacaattaccgtattgccttt

SEQ ID NO: 24680 - DNA, 1423 bp, Heterodera glycines
aaaagattaattttatatttttataaaacaaacattataaagcttattattataataaaaattagtagcattcaaatccgaaatttaaaacattttatgggaaatacgttttttggaagagtcattctaattaaaatatttatcaatatgaattatgaaattcattagtatgaagcaatgcttttgacacattattcatcggatcatctatcaatttaacattagcacaaagagtcgtgcaagcaaattagacgagattcgaagctcaggaaatgtttgaacgcacaactaaaataccaattaattaagagataataccgttattaattataaattaattataattaaataaactcattgaataattaattctaattactttggtcagatcaaacaattttttctgaggcgcattattttcttcatcaccagcaaatcttgagtaatgaattgcattttttggttattcaacggaaattcactgacaatgcttctcaatttgacgatataatcctaaatattattcattaataaatcacaacgttttgacattttaattggccacctgttccatgccaatccgttatgaattccatgtccaaaacggcgctttggctccccaattgtccatgggatgtttgttgttaaacaacattcggtagagcagcaaaccgacgaaccacaccaagtctttgcccgttgttgtgcaacgattatcttgaatttcatttaattgtaaatttaattaattatttaattgggtaattaaatgggtaattaagtggttaatgacaaactttgatttgctctgggctcataaacagcacatcttttagccaaatcatcgggtgttttggtctctgttccgatggaagtgtcctttcccgtaggtctttgaccttttccaccatttcgttaaattcaattttcaaatttcgcgccaattcttcgtcgccaaattcaaattcattttgacgaatcaccgaaaaatattcaaatgtctcgggatacagtaagacaatctttgtcgccaaaacgcttttagtctgatcagtgggacccaattggattggatccgttgcagcgagtgaacttccgggtgctgaaaaagtggaaaattttaaattttgtaagaaaatttaaatttgcagcatttcctaatcgttgtttttttgtggtccctgttttcccaaactgtggaatcataatttataattaagacaataacttcttacaaagcacagtcaacaaaacagtgagtcatcatttcggcattcctcggcaaatttttgatggcacggcactgtgccgaagaattgatcagcttgaatatgttctggcgacacacaaatggtgtcaacatctgaatccgtcgtaaaagcatccaacatcattgatccgcttaacaacaaatcgctttggc

SEQ ID NO: 24681 - DNA, 1683 bp, Heterodera glycines
  unsure (1)..(1683): unsure at all n locations
aattttgccttgtcaaaaacaaaattggacaacatgaaacggaactgaaatgcaacaaaatgcccatcatttgattactaaaaattctaatatttatatttccatttttactttttgaatttcaaaagcctcaataaatatttggcggcggaatggcgacgggaacagtgtgaaaggcacaaaaacgcatgaatcaattcttaaaaatttgaaattaaaaaaacaattatcattacctatttaattaccgagttttcgttttgtctgctcgcgttaccatgccaatgtaatgggcccaaatgatggcatcatccaccaattcatttagatcagtatcatcttgtacaaatgtttccactaaaaacattgattcataaatttgtttttggcatttaacaaagtcataatttttgggccatatttttatttataattttaaatttaagagacaaatttaagtagacccaaaaatcgtaattctcgggccggctttctttaaattatatatttagattaatttaaatcgaaccaaatatcgtaattttcgggccatatttcattaaattttaaatttcagagactttaagtagatccaaaaaatcattatttcattcaggattttctaaattatgtattggaatttcatagacgaatttaagtcaatccaaaagctttgattatgttcttattgttgaaataagaatgtttttcttaaataaattttaccaatgttcttcacatcggttgtcccattgttcaaatgagttccgatgaccaataaaaatgaaatggcaaagaaaaatttaatcattttcatttattaggagtaatatttaaatggagaatgcttaaacatttccttttcctttttacataattaattaatattcataattttttattaaattaaaaaataaattgctatttcatatgtataagcaaattgaattaaaaaattctgaataaattaatttacaataattattcattcagtttttatataatttacaaacatatttgcaagtttggtttattcatttttacttccgccacaaattaatcaactaaaaatcaatgtttataaattaatcgtttttttgagaggatatgtgccaaaacaaataagcatgaaataaatgtgaagatttaatttaatttatttttttgaatgaaatgaagatcattgcaaatccgagcgatcagaattaaaattggagctaatgcaatttacttttactcttcgtcacaacttttttttatgataggcctaatttttttaaattttatgaaaggctggaggctgccgaaaggcagcgccatggaaatttttaagaaaatatgcaaaattgttggaaccagtaacttgaaaagaatgtttgtcacttttaacattaagcaaatattttgcaaattaaaaatattataaatattttatccaaaatattttcaatttccttttcagtaaataaaatatgagtcaattaagtaatagtctatatcattttttaatatttatcctttaaataataattacataatcaagaaagtcaggaattgttgttgaatttaatcccgaaatatgaaaaaatagcccgtaatacgaaaagactttaaaataggaaaaatagggatgccaattagnnaagataaggntcanatagcaaatatcatcatcatcactct

SEQ ID NO: 24682 - DNA, 1769 bp, Heterodera glycines
tcatctaaatttcaaaaaaattgttcaagttttagcaaagttatggccaaaagtacacaaggggccaggttttcgaatattttttgccataattttttgaaacttaatgaaatttttttgaaagttttcaggctaataaaggacacatagggttatcgaataatagcaagaaaataaaaaataaaaataatttttaactaagaatttttaattaaaaataaaattattttgatcatcaacaatttgatcaaatgctcaatgaacagcttaaaaagagctgcccattggttggcaatgggtgggcacattcgatggtcaagcgcatggacaaaaggggcacagaactgaaaagattaaccagcttcacgatgctttggcatttcgttgctttcaaacattcatccgtttgtttttgctcacttcgccaaatttggtgcacactctgtcgtccatgcaatagaagtaagtgccggagagattctcggccctatcggacagaagcagttccatcgactagaccataatggaggccaaatgccggcataaatctggtattgggtgccttagtttggccaaataccctcgtgaatggcattctgtcccccttttcggtgactccgttccccttacatattgtatcattccatttgattacccagcgatttcgctgatctctccgtgccgttccaccactttcttaagtgccatgacaatctcttctccccttcgccgcacacaaaagtcggacggaggaaaagcgcgtggaagggctgtcctcaacaaattggcaatctgtcattattaatcatttgttcttttcacatttcgcatcgtccggaagggttttcccgcatttgtctcgcccggccaattcggcctttgtccgctaatggccaagcaaaaatttggagggtaatccgcgatggatgtgctcagcgctttcgaacgttcgcccgggggaatgttggcgaaaacatcggaaagggaggaaaaaattgtgaaaacggaggaacgaattggaaaaaggggaaagagaaaatgccagtggacggacacaattgaattaggccattctaagtccaggctgccaaaaaaatttcggtggggtgaatcctaaggctttttagctcataacgggcctaaaaatctccaattgcagcgccgggcaaaaattgccattttgccaatttttgggttcaaaatttcaaagaatatggccaaattggagttcgtcattgccttaggcgccgccgagaaaattttttggaatataaaagaaaaattgaattgaaatttggaacttcaaaaaatctatttatttttggccagaagagaaaaaaaaacaattcttcgaaaataaactgtctttattttaataattgtagcactggcccacagtcgaatgagcatgtttttttccacaaaaggacaacaccaatttttgagcgcggtaatgctttataaaatagcttattttaatgttttaaaatttattttatattttttagacaaaaatcaatgtgcagaatgcgctcaatgccaacctgtttattctgtttgcgaatcgaaaagttggagatgaggtaaaaaaaacaaaaaacaaaagattttacctggttttttcgacttttacctacaaatttttaaacactaagtgttattgattctaacttaaaaacctaaaattggggaatgaatggcactcgaaaaccgaaattggtaaatattgatcataggccccaaactcaaaaatgcttaaaacggtcaga

SEQ ID NO: 24683 - DNA, 1993 bp, Heterodera glycines
tgacaattgtcggacaaaaatgggaatgagagagagagagagaaagggaaattagagatcgctaaaaatgcaatgaaatttaaaaattctaatgaaaaattacttataattccatgttcaaatgctttctcactttgattgtctctgcacaatttcctcccctaatacttaatttataattgtttaatgtttgctcgttcctctcacattttacaatttaccactttttcagattgttctttcaccattggcgaagtgccactaatccatctgtgccaaattaagggattaacgcattcaccggaggataaattcgtcattttcactattggggggattttgatttggattatatacggaaaaaacaaattccaagtaaatccctctcattttttgtttcttttttgggtattgaatttcaacattttcgtttatgtaaatttttcgttcctccgtaatttgcaaaaagaaatgcgatctttcgataatttattggatattatttttttgtctttgcgtttttccaattacaataagtctaaaagtggaaatgccatcgtcactaatctgataaaaatgccctcccccccaaatccccccaaatcccatcatccatcattgttattgttcccttccccttttccccatttataatttacgtttttctccgattttatctacgccttgttttttttccaaattcattccttcgctctttcgttatgttttccctttgctcactgtccaatttcgtccccgggaggcaattatccgcaaaagaatcagtccatttgggtaactttgcccgggggaaaggaaagggaaggaaaggcacacatttgtggaacgattaggggggggggcacgtaattgactgttgaattggacagatggtcaaaagtcgagcgggtaaaagttgcgaacaaagggacgggggaaaagaaagcgcacatctgccggggggggggggggggaatgccccgggggaagggggagagaatgtaacggaccaatgacagacaaagagagagagagagcaatgggacagaccaacggaatctgttggcgcgaatcgttggcattaattaaaatttatgacgcacaaatgtcaatttggcccatctgttctgaaacttttaaaggtcgaaaaaagaaactttctacccctttccctctcctatcctcctctctctccctatctcttgttttctctcccccccccctctctctctctctctttctctctctctctctctttctctctctttttctcaatcttgtttccccaacaataaaaggttgaaatggaaaatcggagaaaattggaagatgatgattatgaaagaggaaggaaaagaattaatggaattgcaagtgaatttggcatggtccgatgggctcagagaaagacgaatattttaaggcaaattataaaaattgagatgaatgcgcaatgtttgaaatgggatgtttcttcaggaaaaggcaaatattttttagccaattgaaagagaaagggggggggggagcgatcgaaggatcaccagagggagactgatcagtcccttctgttcagtatcatttgctatccgatcggtcccaccttagctttacgccgtccaatttgtcactcacccaacacaatcacatgggccggttcgcttagcatttgctgtcgcgtctccgtgtcgatcaaagcgcagaaaaagcggccgttgtctcgtgcaaattgaatgcttttcagccgcaaatggtaggccccgttctgatcacaaatgggaactaatcacagaatgcgtttgcttttcccacctgtgccgcagtgtctgtcaacgaatagccatctttgccggagggggaaacagccgttcgttccgtgaaaccaaactaaatttaaaattaaatcccgtcacatcaatggctatgctatttaaaacatacattgccgtttcgccacaatttggtcattccatttctatcggcttctgtttcg

SEQ ID NO: 24684 - DNA, 1295 bp, Heterodera glycines
aaaaatcgattcccaagggcgccctttggcattcaatcttcttgctgggctatttttggttccagaatttatacccaactgtgcccttggcgtttcaatgactatttctgtttcctgactaaaaaagcaattcccaacgacttccttggcgttcaaggactatttttgtttcctgactaaaaaatcgattcccaagggcgccctttggcattcaagaacgatgctgggctatttttggttccagaatttatacccaagggtgcccttggcgtttcaatgactatttctgtttcctgactaaaaaagcaattcccaacgacttccttggagttcaaggactatttttgtttcctgactaaaaaatcgattcccaagggcgccctttggcattcaaggatgatgctgggctatttttggttccagaatttatacccaagggtggacttggcattcaaggacttttttggttccagagtaaaatgaaaacgattcccagggcgccctttggcgttcaaggacttttttgtttcctgactaaaaaagcgattcccaagggcgccctttagcgttcaaggacttttttgtttcctgactaaaaaagcgattcccaagggcgccctttggcattcaaggacgatgttgggctatttttgcacttaccaatgtcttttttcatcgacaatagccattcacgagtgttcaacagatcaatcaattgatctggtggcaaatccgtatgtttcaacaaatcattcatttctttttcaattgtctttttaaattcgatgatcttcaccgtttgattaggatttttcgattttcgcaaaattttttgcatgcattcagcgaataattgacgactttttttgtattcatcaacatatttttcaattattggttcaaggaatggaattttcatcgaaggactgaaatttaaaatttgaatattcaaaaaaaaaatttttttttcggttttctgattatattcattatcctaaagttattagcatactaaataatgttttataaaaatttttaatttttttataaataattttaaaaaattaataataacagataagtgctaaaaactaggccaatcataatttggtgtattgatggaaaaatatctatgaatttttaatttttttttaccaataaatttttttaaatatataataaaacataaaaacatacatataaagaactatgataattatatatttgaattttctattaataatttgttaaaagatcagataactaagccaaccatcataatttggtgtattgat

SEQ ID NO: 24685 - DNA, 895 bp, Heterodera glycines
gaagcatcccccctctccaatccaatgcttaatcacttcccccacctctccccctaattattagtctgatcagcccatcccgctcccctaatcttccattacccttcacatttccctccgttttcttacattgtccccaagagacacgtgtttgtacacaatgtccacacaaaaccacgagccctcattgcctattctgtccaaataaacgcgcatcgcatttctctcctgtcgggccggcgaattcttttgcatcgtcaaaaatttgttggatttcacatgcaataactgatcaattgggggagagaattagttgaaaaagcgaaccaaatacaaaatggaataacctgaatggaggagccatactgaaatgggaagaagggcaattagacaaaaagtagaagcagcaattaggaaaacaggggactaatgagaaggggtttacgacagcaacctgccaattgtccccctttattccctgccgattggtttctctctctatcccctgctgatcaaatcagtatccattcccttgtgccccccccttcgatttacttggaccacactgcccagcattttgctgtactccaattcgttctgctcccgctccttctccgccgccactttgagcttctccaacatttcctcgtccaccgtttcgcccatccgtgcctttttctgctctgcccaatattgcttttgtgctgcgtagcgattcacagaacaaatgcgaaacagacagtcttttgagggtcaaatttggcatttttcattggcattcgtttggaaaattcagtgatttattgcgaattattttcatttgtccacaattttcacctcggaatgttttcggtggcgattggattgtgccctttccctcctccacgacgcatcg

SEQ ID NO: 24686 - DNA, 476 bp, Heterodera glycines
aaaattttcaaaaaaatcaataaaatcccgcataatcccgcacaaaaaatcaaatttgcggatcccgctgcgggattggaactcaaaattctttgcgggacgggatcccgcgggattaatcccgcaaatcccgcaatcccgcaaatcccgcattttccaaaaaatgcgggattgcggactgggatcccgaaaaatcccgcgcgggatcccgtcccgcgccggtctctagttgtgaccatgtgccattgggacgaggacgcccaacataattgtccaaaagcctaaaaacttattctaaaattgaaaattttatttgctgaccaatcaatgagaggtcgaaaagccgccaaatttccaaattccatgtcaagtgctgtcactgcattcctgacatcacaaagcggaacgaatgcgactgatgtgagcatccgaacattcaaagcaaacaccggatcagaacaataacgcttaaattt

SEQ ID NO: 24687 - DNA, 1484 bp, Heterodera glycines
acatattagattcccgaggttcctttacggactaataatcacaaaagtcaaatttatgaattcataaaataataattcttgtattattttgtaaaaaatgcactagaagagttaaatgaagaaagatgggatggttcacttatatttatgatggatggcgagcacataaaataataattcacggcaaaacggtgacccaaaaaagaaacaaatttgaattggattttgcttatccccccatattcccattgatttttatttcagcaaaatgatgacccacaaatgtggggagagattttctcaaaagaaatactattacaatgtgcaacagatagagaattttgtacataatcaaatgtcgagggttcaagatgaaaaattgaaaaatatttaaagaaatttagagaatactttaatttaaaaattttttgattaaaattaaattttaaaagaaaagattcataaaactttgaaaaatatttcataacattaaaatatcaaaagaaaaattatcaaaaaagaataaatatggaagagttcaatgaataaaatgaaacttgcgacaattcatctgaacatattttatttttttaaaaataaattttgggtcatttaaaaaaactaatcttaaaatagctaatacggctacgccatgtgacaattcttaatcacatttttacgaaaaacttgcgcaaaaaatagcatgtcagaagaaaacgaaggtgccaatgccacaactaataaatgaaaaattgtagggagagtttcattattctaaaaagaatatttatcatcggttttgaattttgtaaaaatattaaagttgtgaagtaatttttagcaaatcccgtcaaaaaatgatttatcttgaaaaaagcttcaaaataattttttaagtgtaagtcaaatgaaaagcaataaacaattattgcagggctcggattcgtacttcgatgccaagtacatacttagatttcggcttttgtgcttggaaaattttaactgtacttatttccaagattgtacttggaatcgggatttttgcatatgaatgtaaaaaatatacattttatgaaaaaaatttcaaatttttggcattttgtcaaaataaatattaatttttgctaaatttaacccaaaaaggtggctggacatttcgacaatgaccgtttcgacaatgaccattacgactatatcaaatcgccaaaatttaaaatatcaaattaaaaaataataaaagaatataaaaataataaattaattataaataattgtttattatttaatataattgattaaatttaaaatcagggttgccatcgcatttcacaagcttatagccgagatttaaaaagatatatcaagataaattacactaaaataatattctgaaattatgtgcgaatttggactaccttttacaaaaaataaacagatgatttttgaaattaaaagaacacccatgatttgcacagtagaagccc

SEQ ID NO: 24688 - DNA, 1709 bp, Heterodera glycines
agccttacaaataagtaaatagaagtttttcaaacttcttaggttttaggttataaaaaaacagaaaataggccctaatattcagtatcttaacaaccaccaacaaaatgttttgcatacgcttcagaccatagggaactctgaaaaaataaataaaaacctaaaaatcgtatcttattgattacgattctgacacctattcaatcaattccgaatttttttcccaatctgaaaaccaaaatttgtaataatttaattttttggatagggattggtcaaaattatattaacaagcatcgggggccaccaataaaagtgctcaattttccacaaaattcaaattttttggtccaaaccgtttcagaatttttgaatgccatttgtaaagaataaaagtatttgtattacaacccaatataatcccaccaaatggttagctgtatttagatgttttttccaggcaaaattataatcagaatttaaagaatgaattatatatttacaaaaagcaattaaaatgtttgtgaatgcattttactaatactaccgatgataatgatacctcccccgcctttcgaaaaaaaactcattttcttcttaaggaagttgatatatttctcataatctcttgcacgataatcactgttaaattatatagtattatttcatgcattttcgtttaatttgaaattttgttcgagtctgggtcaggagttcgaaattggtctaaaaattgttgtcagaatcgtttctcagacgccgaaaacccgtttattccgaaaaagggggtggcgagtaccatcggtagaaaatattcactaagttcaatgctccgcaaaagtacggcgtcttttgggcgtcggtccgcgccgtccgaccgcggcactttccgccgccgcttctgcggttcgctcgtcattgtcgctcctcgattcttccgccataagcaattcatcttgtgaagattcttttcgcggctgttgatggtacgaacgggcggaatgggaggaacggcccaacgatttgtcaccattcaccagaaaatgctcctgcaaaggcacaaaaccttttttaaatgccgggtacggatttaaaaaatacaaaaccaatttaaatatattaaattacggactttgggcaatccgccgtttggagggttccctccttctgtcgaagaggcaattccggtgcccaactcgagcagccgggaagaaatgggcgaagtgaccgaagacagcgaaaaaatcctgtccatctcgctgaactgctgcttcggtgcctttttctgtttcgcgttggcggacgatgagaaaaagctggaggatgacgaaacagcagaagcggagctggcggacccatttacggagtcgagcaatttaccaaaacttaaaaaggcattactcggtttaacgccaatttcgaaccccgaatttttgttacgggtaaaaattcgtattaaactcaactcggataacatttccgccatgttccatggcctcctccaaatacgttgtttcaaaattgtaaatttgcttctccaagtttgcgagagcaatctgaagttggagggtaaatagaggcaataatctcaatatattctgataaaattgacggaaatatccgttcgtcgcttaacagctcgacattttcttgttttgcgtctgcccttgcgttagtcataagcaaataaaaaaaacgaaggtgcgcgc

SEQ ID NO: 24689 - DNA, 1928 bp, Heterodera glycines
  unsure (1)..(1928): unsure at all n locations
tcatgtctaagaatgtacatatgtgtaaaaacaaaaaatatttttctgaacgaataaaaaaataaataatttaataacaataaaaaaagaattttctacaattattttaaaacatttaaaattaattttgcaattttctttttttttaataaaaacattacacataaaaaaaataaatattttcttaattcaaatcaaacaaaagtaaacaataaatatttgagcaacttcggaatgcaacaaaatcatttatgaagaacaaaaataaatgcaactttaaataaattaaagctaatagtcatgtacggcagaataagaaatatgacgccgattttactcttcacaaggtacattggccatgaaaatttttataaaaattactgtaacactaaaagttaaaaagagaaataaaaactaattataaaaactaaaataaacatcaaatcgacaactaattcttcaaaaacaatgctcttctataagtttattatatcttctaagaaaaatattaatgattggtaaaaactatatttatagacaaactgatgagatgtttatctatcatttcccgggcacaaaatatataaatttttaaaatcatttaaaattaaaaattctaaaggaataactaaccaattttatttaattggtcattgttattgcaaaataatcggtttgcatatatctttttttgtaataaaaccttgtttttgtgattaaatattcctaaagattatataaattgcatttagttgttttcatttttagttctcagtcactcctcctaaattttgtatttatttataaagagaatttatttaatagcattttaatcagaataataaaaatgcaagtaaatgaaatgcattctttttgttaagatttaatttattaaattttcgcatctcaatttttcgataatttctaagtttttaatttattcattttgatttgtaaaataattatattttttttaatttattgtaaagtcttttaaatttaaaaaaagatattaaaattttatttaattggccattctaagaattaattaaaatcggaacacattaaaaattagtaaaataaataaagtaaaatctaaattttactaaatttataatataataaaaaaattagaaaataaattaatttcgaattttgttgattatttaaatattatctattaaataagcgtttcttttttagacttcatctaaattaatttaattagacgttattaatttagtaaaattaccataaaaataacaaaaattaatttcttatatttattttattttcttcatattaaataaaaaaatttttattaatagaaaatttcaaataatggttattctgtaacaatagacactaaagtttgtttcaaatctttataaaaattcgaattcagaaatattttaaaaataaacagaattaaattcattttattttaaaatttttaactttaacaattattgactttgctaatatacaatggcatcatatttttgaaaaattttttaaaaatatttcacagttaatttttgtcatttaaattttattttatatttttaacttaagacagatattgggttgctagacaaataaatttaaaaatttggaaaattaaaagtaaaatttttttatctctttaatttcactaaaaacacacgcctaatgatttaatatgctattgtatatatttaataaagaattgttacataaaaataactgagttttcgaaccaaaaaacttaaaataaaaatcaagagattatccaaagaaaataatttttaaaataaaatttaaaatattaaattacaatggataaaatattanataaaccaaaagaaaaaaatacttaggcaaaccaaattcaaaaattcaaatgaaagcanaaatctaaatggtggcatgctaatttacatattacg

SEQ ID NO: 24690 - DNA, 1487 bp, Heterodera glycines
tatagtgaaattacgaagaaaaaaaacatgattgctaccttaaatcataacaagcaaaaatttacgacccccccccccgcctcgccggccttttttgcgagcaaagggggtggatcgacctccccaaaataatgtaagcatattgcagtattttagcaatgggatgccgacaaattccatcggatacaaacattgaatggccacactgatcaaattgatgctcttgcaatcacttcggatggaagaaccttggtaaaattgccgaatttttcgttagcttatcattcgttatgttattaatgcattattccctcccattgtcagatttccgcttctcgtgacaaatcagttcgcctgtggcaactcaccgatgaactcattgtgctgcaagaggaggaagagcgcgagagagagaaggaatacgaacagagactggtcgacgaggaggacatcgtttgtgaattcgtaagccatttccaattgcctcccaattcttcagatacctggcgaaccatcggacactcttgaagggggtttagcgccattaaaaagcatcgacaccataaaatccaccgaaggcataatggaggcgattgaaattgtgcggaacgaacgaatgtcgcgcgaagccgaggacgaccacaaaaggcatccgctgctgatgggctattcggcaggtgccgaacatcgcttcattgcggacggtatgcaaaaaatccgacacaggtgcaatttagggattttcgggtaaatgggcgcattttacaacatttacagtcacttggagaagagtttgatgacgcttcccttcacttttgtgccggaccttttgaaggaaatgggcaaatgcgtgcgttccaattacaaatccgacctcgctgagcgtgtcattcttttccttaccaggttatctcggcgtccgccttggttttacttctgaaaagaattcctattgtttttttttcagaatccatcacaatcagatcatccattctcttgagctgctttcactgatcgacgacctcagaacagttttgccaaaacatatcgctgacactttggttggtgttgcgatgttttagagtgatcaaagggtcattaaactttgtgcttgcctttttcagaattgcgttggcctcaatatagctgcgttaaaatttcttcaaatgcgattggaaagccgacaaaatgcaaaaatgtttgtcgctccgcgagcagaaaataacgaaaaggcttcaaagaaaaagaagcagcgacggaaagtgaaagaaattgcctttgtttcatcagttatatgataacattttttgttgcattcaaatcgttgttcacttttcaatacaagaaacactggtacaaaatgagaacttgcaaaatcacaaataaggaatataacccgttcaaaaaatcacagataagaagccggacaaacaaatcctttctttgatcacgacaatgttttaacatttgtctgtgcacttgtgatt

SEQ ID NO: 24691 - DNA, 1172 bp, Heterodera glycines
aaaaaaaaagtccaaaaattataaaatggaaaaaataaaaatggggaatgatgtcaatttagaggagttactcaagattttcggtattgagcagaaaaattcaaaaaaattcgggaaagggcggcaattttttataagaaaatctcaagaaaaaaatctgaaaaattttttgaatttttttaattgaattttctttaaaaaaattttgacagtagattttttcttgaagaatttttatgtatgaacccccctcccctccaattttcgggtacaccccaaatatcgccgagacaaaaaatcgccgcagaaatttaaaaagaaaatttcctgaaaaaaacattgaaacttttttttttgtttgaaacatttttttgaaaaaacttgtcaattttcataaatttcgaaaaaatcgctgataagtttttcaaaaaattttttcttaaaattttcttgaaatttcctaagaattttttatgaaaatttctatgttagaaaaaattttttaattaatgcggcgatattttgtgcccccccccccaattttccccctaccatgtgggtagcacgtgaatccggccaccaacttggcggtctcgccggccaccatgaattgccaaatgttctgcccgtcctgtttgccgatgaatgtcacggaggggtcttggattttgctggaaaaataggggtgataaatttaatcattttttaaatggcattaagcaaaacaattttttcccctcaatttccacaagtttaaacgggacgagacaaaatcgcggcgctgaaattaaaaaaaattttcagaaaagaatagaaattttttttaaaggatttgtttcaaaaatgtattgttctttcttggaattttcctataaaaactttcagttttcttaaatttttcttatggcgcacacttttaaaatgaaaactttcggaattctttataattttaatgctgggtgtaaaaaaatccattcatttttttcggttttctattttaaattaaaactccgccgccaaaactccgtgccctcctcgcgacggatgcgacgcgcacactcaaaggcacgcacgtgcaccgggctcagctgcagccgcgtctcaccagccaaattgggttgattgcggtggcggtgaccaacgctaaacaaacacagcaaatttagtgtttt

SEQ ID NO: 24692 - DNA, 826 bp, Heterodera glycines
ggggggggggggggtggtttttttttttttttttttttttttttttttttttttatataaacaaaaaaaaaaaaaaaaaaggggggggggggggggggggggggggggggggggggggggggggggaaaaaaaaaaaaaaaaaaaaaaaaaaaaaaaaaaaaaaaaaggggggggggggggggggggggtgggggggggggggggggggggaaaaaaaaaaaaaaaaaaaaaaaaaaaaaaaaaaaccccccccccccccccccccccccccccccccccaccaaaataaaaaaaaaagaggggggggggggggggggggggggggggggggggggagagagaaaaaaccccccacacccccccctttctttttttgttgttttttttgtttttttttgtttttttttttttttttttaaaaaaaaaaaaaaaaaaaaaaaaaaaaaaaaaaaaaaaaaatattattttttttttttttttttttttttttttattattatatattatatataaataaaaaaaaaaaaaaaaaaaaaaagggggtgggggggtgtgtggggggggggggggggggggtgtggggggggggggtgataaaattccccctccccccccccccccctccccctcccccccccccccccccccccccccccccctttttgggtgtggggggaggtgggtgtgggtggtgggggtttgggttttgtgtttttttttttttttttaaaaaaaaaaaaaaaaaaaaaaaaaaaaaaaaaaattaatataatttttttttattatcttctttttttttttttttttttttttgtgggggggggg

SEQ ID NO: 24693 - DNA, 1544 bp, Heterodera glycines
taataattttccatgcaataacccttccgagcacatttttgaggtaaaaattgaatgaaaatcgttaaaaagaacttgatgaaatcataaattttacatagtcattgaccgacattctctagcaaaaacgttgagaaaccgcaagctgtagtaattatttatatagatatgtatagggaatggaattatatggatataaaattgcgaaaccataaaatatggtcaaaaaatagcgaaatatggacataaatagcaaaaatatggacataaatttttcaaattaagggtatactttttcaaaatttcttcaaattcgctaaatgaaaagttaacgctaaaaatcggaaccccgtcagttgggcccgtcacgtttgggccccagctgttttttggctataacttttttctttgtcatccaaatcaaatattattggtgtcattcaaagctgtaaatgtcctctattagcctgcaaaattttgaaaaattatgtaaaggttcaaaaaaattatggccagaacaacttaaaaaaccagattttccaacttttatgcccataaatttgttcaaaattgacgaaattttttgaaaatttgcaggctaatagagcagggttgcgatctcaaaatttttaaagtcctcatttcagacataaaaaatactcatttgccactaaaatacctcaaaattaaaaagtgaaagatttttaatttatcaaaaaccaaaggggggggggacccttttgtttcgcaaaattcttttgacataaaaaatcgtgaatgttcttttattcgccataatttataatttcattcgccataattgttctgttaatgtttaatattcattattatgtgtaaaaataaacaaaaaaaaattgaccaaaaaaaagtgaaaaaaaaaattcaaaaaggccctctttttaaatagcgccgagtcatatttttcgtttgtgcttttagattagggttgcttccccgaccccgccccgaccccgacatttttggccatttttcgggtttaccccgacccgaaccccgacgcttccaaccccgacgaccccgaaccccgacccttaaccccgactcgctcttctcttttctctctcttttctctctctatcttccagtctctttctcctcttctctctcttcttttgtctctctccttctctctctcctcttctctctctcctattctctctctctccttttctctccctcctctttctctcccttcttctcactctctcccagtctctctaactatctgctcgtttctctctctccccctctttctctgcgtctctctctcttttttcctccttttctcacttctctttacctcactctctctccctctctctattttttcgtccttttctctcctcaccacatactctctctctcttttttcctccatctctctttacctctctctctctctctcttattatctctctctctattttttctttttctccctcctcacctcactccatctctttctcactcactctctctctttttctttttctctcttctca

SEQ ID NO: 24694 - DNA, 1558 bp, Heterodera glycines
  unsure (1)..(1558): unsure at all n locations
aaagtgcgtgacattggcacaactgctgaagattgagcaggaagagtttgatcagtttgtgactgatctgagtgaaaatgagcaattaatcggcaccgtgttcaagccaaagacggcgggtggtggaggaacaatcaaagtatcgtatttcagagcttgttgcttttttcaatcacttttcaaaagagggaccgtgtttttatggggagggaatatattttttgaaggtactgtaattgcaatgtactgttgcgtcaaagaaaaattaaaattaatatttttttatttcaattaaaaggaattgaaggggaagctcgtccgaacattttcaaaacgaaagagcgtaaaagagaagaaaaacagtgatgatagaatggaattgggagaaaaatatgaacattttcttagcataaaagagaacgatccggcactgagccaagtgatcgaaaaattgcagtcgtacagtaagaaagtgatgtcagcagctggtaagaacagtgccaaagatgctactgtacaatggtaatacatttcaggaaaaagcatggacgaaatgttgaaaagatatttaaaatttgccataaaatttatggcaaaacgccagcgaatttccgaacaaaaactgaagctgcagggaataggcaaattgcaagcattaaaagctctaataaaattttatgttcatgaaaaatgcgagaaagaacaggcaaatgatggtcagcaaccgagcaagtccaagtgggagcgattgttgccacttttgacgacggtggtggaggacgaagaggacggcacaaatgccaattttgcattggaatgtaagagaattaatttataaaaataaatgacaaaaaaagctaaaaattaaaatatgaaatttagttgacacaaaaaagaagaaaaagaaaaccggaggaggaagaagaaggaggagaaagaagcgcgaattagcagcctttgccctgattttgtgcgtcgcgttggcagtggcaattctgttgttggcgctaaattgcaaaagcgttggcctctgtttggcaaatcgttctggagcacaaacgcaacgccaatactcaaacgaaaacgaagcagcagttggtgtggaggcaaccgaagaagcgcgcgtcacaacactttttgaacttttacaaagcaacggttagcgcatttctcggatttttttttgtttgtttttagcgttaaaaattaataacctaataaataagcgtatttatggccactaaaacccagcagcatggaagcaatgccaccgaattgaaagcgttttcattgctctattcatcgtatctaaatattttgactccgaatcggacatatggaaactgattgggaatttatacagtttaggccacatgaatttntttttttgttaaaaagattaaaaaatgtaacaatggggcgttttggggtcgctggtcacgaaaatgacatgacacccatttcaaccggtgctaggacgaagtgacaaaaatatcagtgagagaaaaaagatacaccaagggtttcgagagcagtgctgcgtgtaggacaaagctgt

SEQ ID NO: 24695 - DNA, 1145 bp, Heterodera glycines
ttttttgaattgcaaaatttttttccttttttgaattgggttcaaaaaaaaattttaagagaatttttgatttattaatttgaagtcttgaatttatttgacaaatccaagacttaaaactgggagaagcaaggggctgtggctgggggcctaaaatttggccacattggagaattaattctgatttctgaaaaagtcccagaaataactattttttctttccataccttcttgtagagctcgagctgctctttccaatggtcttatcccggtctcgatccgtgccgaactcacaaagttatggagtgaaatgtgaaatattgttttcaccacaaggcattttttctgaaaaccggattcaaaaatctggggtttggtataaccgttttagaaatagcgtagaaaacagcttcgatatcaagaaaccaagtcaagtccagaaaggaatattttaaaacgatttcgttttgttttggcattatgataccgaataactttcggaaattatggaaacaaaattggagaaattcgaataattttttgactgcaaatttttttccttttttgaattgggttcaaaaaaattttaagagaatttttgattattaatttgaagtcttgaatttatttgacaaatccaagacttaaaactgggagaagcaaggggctgtggctgggggcctaaaatttgggccacattggagaattaattctgatttctgaaaaagtcccagaaataactattttttctttccataccttcttgtagagctcgagctgctctttccaatggtcttatcccggtctcgatccgtgccgaactcacaaagttatggagtgaaatgtgaaatattgttttcaccacaaggcattttttctgaaaaccggattcaaaaatctggggtttggtataaccgttttagaaatagcggagaaaacagcttcgatatcaagaaaccaagtcaagtccagaaaggaatattttaaaacgatttcgttttggtttggattatgataccgaataaatttcggaaaatatggaaaacaaaatggagaaaatcgaataattttttgacgggaaattttttccttttttgaattggggtcaaaaaaattttaaaagaatttttgattattaatttgaa

SEQ ID NO: 24696 - DNA, 1465 bp, Heterodera glycines
aaaaagtgataaatttttttattttgagtaaaatttttcaacaaaaaatttatgaattctgataaattttagttttttttatggttttttgtcaaaattattttgaaattcataatttttcatgatttagtcaaaaaattaaatttttaatttcaacgaaagaaaaattgggttcaatacgtcaataaattatgccaatgatgaccaatttttatgggtatttttgtttaaaaaccctataaattaaaaaagaagtcaaccaggatccgaactcatgacaaaagtagtgcatgtgctaacgcaattaccactacaccaatattacacatgaatggacaaaagcaaattactttatttaataaaaatttggcaaaatggttaaaaaaaattcaaatttgtataatttttttcttttctctcacgaaaataccattcttaggggtgtatatttaaccccgaccccgagtcggggttaagggtcggggttcggggtcgtcggggttggaagcgtcggggttcgggtcggggttaaccccgaaaaatggccaaaattgtcggggttctgggtcggggcggggtcggggttgcaaccctactatagaatttaaaggacatgagagagagaggagaggagataggaaaagagagagagagaagggtgaaagagagaggaagaaagagcgaaaaggagagagagagaggaaacggtagagagagagtgaggataggagagattagaggagagagagtgaggagggaagagaggaatggagggagagagactgaggagaaaagagaggaagggagaaagagggaagagagagagagagaaaaggagggaaagagattgagagaaaagagaaggagtgagagaaagagaggaggagagaagcgaataaaataatggttaaagtgagagagcaagagagagagagagaggaaaggaggaaaggaggaaaagagactgaggagaaaagagaggaaagtaatgagagagagagagagagatagaagagcggaaagaagagagtgagagagagagaaaagtaaaaagagatagagaaaaaagaaaagaagagagggaaagagaaagagagagagaggaaaagaggaagagagagagagaggtggaggagagaatagaagaaaagataaagagtgagcgagagaataagtagagaagataggaaaggagggagagtaaggagagaaaatagggaaggagggaatgagagagaaagagagaatgcaaattattttctttaactttttaaaaatcatttgagaataaaaacagagaaccgctcgttatggttaaaagatattttaaagaaacttaataaaagataaaaaaattaatttaatttaaaaatatcacctaaaaataaatattttattatcctttaaaatattgtttaaagaaaaaagacaattaaatgaaaataattaaaaagaaaaaagtcaa

SEQ ID NO: 24697 - DNA, 1095 bp, Heterodera glycines
tagggtcgtcgctattattccgaaaatgtggttggaattcatgtgagtgttgagcagaaaaagagatagacgttttttcaaaattttcaaagccaaactcgcccagaaagaaaatccagaaaaattagggtcgtcgctactattccgaaaatgtggttgaattcatgtgagtgttgagcagaaaaagagatagacgttttttcaaaattttcagagccaaactcgcccagaaagaaaatccagaaaaattagggtcgtcgctactattccgaaaatgtggttggaattcatgtgagtgttgagcagaaaaagagatagacgttttttcaaaattttcagagccaaactcgcccagaaagaaaatccagaaaaattagggtcgtcgctactattccgaaaatgtggttggaattcatgtgagtgttgagcagaaaaagagatagacgttttttcaaaattttcagagccaaactcgcccagaaagaaaatccagaaaaattagggtcgtcgctactattccgaaaatgtggttggaattcatgtgagtgttgagcagaaaaagagatagacgttttttcaaaattttcagagccaaactcgcccagaaagaaaatccagaaaaattagggtcgtcgctactattccgaaaatgtggttggaattcatgtgagtgttgagcagaaaaagagatagacgttttttcaaaattttcagagccaaactcgcccagaaagaaaatccagaaaaattagggtcgtcgctattattccgaaaatgtggttggagttcatttgagtgttgagcagaaaaagagatagacgttttttcaaaattttcagagccaaactcgcccagaaagaaaatccagaaaaattagggtcgtcgctactattccgaaaatgtggttggaattcatgtgagtgttgagcagaaaaagagatagacgttttttcaaaattttcagagccaaactcgcccagaaagaaaatccagaaaaattagggtcgtcgctactattccgaaaatgtggttggaattcatttgagtgttgagcagaaaagagatagacgttttttcaaaattttcagagccaaa

SEQ ID NO: 24698 - DNA, 1380 bp, Heterodera glycines
  unsure (1)..(1380): unsure at all n locations
cccatccaacctatntcgcccaaaaaaaaattatttttcttcctgaaatattatttttaaattttagttatggtcgattctatcacctaccgtttgagcgaagtgtatttgttgtggcgtgatgcaaaacaggaactgattgacaccatattggagggtgttacggttgggttgaacaaaaatattatccgattcttttgtgaaattgaactggcatacaccgcattagggaacacttggcaaatcatcgaaaaaacaggtggggctcattaagaagaaattaattgacttggctaaatggcctttggccggctccatcctcctgcatttatttacgatttgtttttaattttaaaatttaataattagacgacccatggaaacaagaagctgcgccgggtcgtttcataaaagtgccaattttaaataatttttgagaaaactcataataacttttttccaacatactaattaaaaacaatttcttggtctaatataatagctcttggattgctgtattagcatgataaatttcaaaaaattttattcaattttctttgaatatacttgaacacaactgttttaaaactagagaaattttcttatatttctcctgctaatagagcagcaacctaagagctattttaagaaacaaaaattatttaatttagttgggtttacgaaaactatgacgagtttttcttgaaaatctgtaaaattggcacttttacgggacgcacatcgtggcacttttttgcgaaacgacctagcaccgaaacaagaattcatttatttattaaaaaaaataaaatttattttcgagaaaatttgagaaaggcaccgaagcaccgaaaaaagaacatttattcaaattaatgaattgaaattgggaaaatttataagtgaaacatgttaaataatatttcgtataaatattttaataaataaatttttaatcattcattttgaaatcaaggaaagaaacaatttgtgaagaatgcaaatgaaattaagcaactaatgactgatttacacaatatacgtgactcaattcaacaccgaattagttacactcaaatgcatgaaatttttgagtttattcttaaaaaagaactgctaatgttatttccaaaacaattggaagacattttgtctgaaatgaaaaaaatcgcaaaaattgaggggtccaaggtattttttaagcattgacaaaaaatttttgttaaaaatttaaaaataaaattatggaaaaaaagaaaaagaaacaaacaaacattggtctcttgagataaataaactctaaaataatgtccaggaaattcagggtgttcgtgcataaccaggaaaccaggcatcaagggcgtagctaggggggggggg

SEQ ID NO: 24699 - DNA, 1158 bp, Heterodera glycines
atcgaatagtcaagtgatcaaaatcatcggtttaccttctcaatagtttaaagtaattggaaaatttctcggcaaacttttattaatccgattaattaaattaaaacctaaaacaaatttttgggtatttttaaaattgctatcaatatgtaatacctggacagatggtcatcagcgtttttaggatgaattttgcgtccgtcttcacgcggttgagaccggcgatggaacgcgaagcggcgtcagtgaacagacgagctgagaaaaggcaattacaatactaatgagacaattagtattaattaggtaaattttacagtggagaagcatcacccgacacagccaatacagtcggaagaacattactgtaatggaattggaaaacaatcatttgaatgaaaaacgaattggatggaaatttacaaattgagaagagaacgtccaacggcattcgcattggcacctaaattaattaaacaaaaaattgtaggcaaaaataaattaaaatgaaaaaataaaataaattaatttaatttaaaatttgaaaaattttaccgtatgtccgtcggagtttactgtggaaacgaacacatcaatttgcattggcaacggacagatggcacaagcgattatttccaccacaatttgcatgcttttgcgaaaggtcagcgcaatttgccaatcctcggcactgttcgcgttcataaaaatctgaggggaaacaaatttaaattctacataaattgatttaatcattaaaattaattgcctgaatttcatggacatggaatttgacgacaaggccaaccagacaaacagtgctcagcaaaatgatcagcttcatcagcacacagacggagctgtgcccggcgtagacgaactcattttcaatgatcattagaactaaaaaaagaaaaatgaaattgaaaaagtaaaatttaaataataaatttaataatttctaaaatgaatccaaatgaggcacgtcacatttgaatcttaccaatgccaaaaatggcaaaaaacagcgcataatcactggtgacgcgccttttgttgaacaattgttgcctctttatgaaacgaccaccccttaaattgttggcttaatgatggaaaatagcaatttaaaagtgaaattcatttcatttttcgaat

SEQ ID NO: 24700 - DNA, 1576 bp, Heterodera glycines
atgccctgtgccaatggttgcattcgccgcggggggccgggcgccttaagattttgctgtgccaggaaatttggtcattcgctgacaaaattcgggaactaaaaacgggtaattatcttaataaaatatgaatgtctccgctaataaaaaagattgccggctaaattgcaaattaaggcattttgcgacgcctctgcccccgttagtttcatcattcgtttgtctttgagcagttttgctggtatgtggcattttaaaaatttctagtatttaagacccccaaacatttgttgttttctgtgcaggtgaacagtttgaattgcgcaatgatcggaccggggaaatgttgagcatggaaatggtcgcgacaaaggacgacgaagacggagaaggacaacaactacagcagatcgaggaggaggacaacgacaatgccgacattctgacccactacatcaagccggagcgcaatttgtggttgttgaagcgtcgtccgaccgttgggggaggaaaatggcaaaaacagtgggcccaatgggaggcggaggcaatcggatggaattggaccaatgcatggaatgtgatcgaagttgccaatgaagaggacgtggacgtgatcgaagatggcaatgaacacttggacatggacgaagtgacttatgagggagaggcgatggacgagatagatgagatggatggcacggacggatgaacgctttaaacagacattggacgacatttaaatgatgtgtaaaatgacaaaatttctacaatttattcatttttttaaaataaagcatttcactaaccaataaccgaagaaattgttgttttcgctgctttttcgctacacatttcaattcgtttgttttcatttgcttttcccattatgccttcagaatattcccgatgattggcaaataacaaaatggagaggaacaagagaaaatttgccaaaattgtttcctcactcaaaaaggacggaatcgaaatttcagagagtgccaccgatgtgagtgccgatgttcagtcccttggataatgaaatttccgtatcgtttcctttaatttcagactttgttcgtgagtaacagcagtcatttggtgggcgtccccttcgagagtctcgagttgcttttccgtcgttttgacctgcactgtgccttcaccgtttacccgaccaacaaatcctactcattggtccacttttccgaagtgaatttggcgatcgctgcgcgcaatgctctcaacggcaccaaacccaaagactttcccagtgaaaatgctgcacaaattcatttgttcttcgtcaggcaaagtggggtctgaaaaaataaaaatttttatcttaaaccatgaattttccgtaactagtgagatagtgcttcttttcaaggattttgtatcctatcattttcccattgtttccactgttccaaattgtcagaagcggcaaaccgttcgccgccagcggcattgccaaacggcctgcaaatagtgccggatttcatttcgacgcaacacgagtccgaactcgagcaatttgtggccaattgtctagcagaaaggacaaaca

SEQ ID NO: 24701 - DNA, 1391 bp, Heterodera glycines
ctattaatactcaattttcatcattatgtgtaaaaaactttaaaaaattttgaccaaaaaaaaaaagttaaaaaaattttctaatcggtgactttccatatagcgccgaattttggatgctcaaaaaatcccaggaattcagaataactgccaaattcagaccaaacatcactgaaatgagggctttaaaaagatggaattaactgtttttatacctaaaaattccatcaacaaaataaaaacgcaccggttttcgaggttcttcttcaattttacttgccaacagcagacaagcttggaccatgtgctaaaaaaatgcaaaatacaccgaatttgtctgaaattgcaacaacaacaaaaaaaacctcgaaattgtagcgcacaaatgatttgaggtagtaataacgttggaagagaatttgtgcggtggccgctgatgtttgactcaaccgtaacagaatggcaccggattgtatcagttctcagcacaaatagagaatgtcttaaacacagggtaatggaagtttaccaatgaaaactgataaaattcttcgaaaatgtctacgaagctaaatccctattccccgtttttttggccccccaattcttccccgttttaccctctccaattcgcgattgattccgtccgccagtgacggtgggttctcgagtttggccaacgagtcggcctcgtagtgcatcaaccatttctccgccgaaatgtcaatgctggagtagctgctccgttgcccgtatgctggacggcctcactttggcaatcagcgcgtccatcgcgcactttgccgacgattgcaccgtctcaaaaagccatttgtggtaaaatagatggaataggaggccccccccccccgcccttcagagcacgacaaatatttcaacaaaaatttttaaaaattgactagagcaattgaacgctaacggacgacctaatggaaaaaaatccccgaaggagagaatttaattaaatccattcctttgggggaccgtgccgggtgccgcggggtaagcagtgctggttcgtttcatcacggcaccgaaccttttggctagtcagcaatcgttgcttaacttgccagatcggacgggtgcgcatgattccactgttccaagcaccccaccaaaagcaaaacgatataaccaaaatataaggaaaaattttttaaaaaattttttctccatcttcctttttgatactaaagcatcagagtgctaaaattaagttgtaaataaaatttggtgcgctttagagcactttctgaaaaaaatatttatgaaacaaaaaaatcgattttttcaagtgtccgtttggggtactcaaacatttatggagagcaaaaatccaacgcagaattaaagtacaggctataggg

SEQ ID NO: 24702 - DNA, 950 bp, Heterodera glycines
cccccccccctcgccgccaaataatctttattatccctcaaaaaaaatccctaaaattagttaaaccatttagctgtgagtagtgcaatatttccatggaccacaacactttgcatgttctgtagtaaagaagtgatgaaacaacaaacactgacagatggatcagcataaattcggagacccaatgaaatggaagaaattcaagaaaacagccgtactcatctggcaattaaagacaattagggttttgccaattaattattttgggattcccctttgacattattatattgggttggtaaataagtcctggggcctattcaaattagcatcgtatcaacgatgcgatgatacgatgtgatggctcatcatagccccgatgcccgttcaaattaaaatcgtctcccgcatacgatttatcacaccaagtcatcacatgtacgttcaaattcatcgtatcatcgcatctacgatgcgatcgtcacatcgcacgtaaaatcgtctgaggcagacgattatttgtacgatatgtcgtatgtgcgttcaaatttaaacatttctacatacgacgagcccatcatacgatgagcctccctctatgaaaatcgtatgtagacatacatggaaggaaccagcgattttcctacatcgtatgtaggaaaaaaattcgtaaaaaattcgggagacaccagaataaataatatttatatatttcttatagattaaagtctcagctattttgtcatataaattttaaatttttcttaccactaaaagccagccaaattattaaaaacataaaacattccaaatatttttaaaaaagtaatttatttttcataaagataatgtaaaatttaatcattttgcgttttccctctattagttaggtttaatgtaaaaattttcaattttaattttaatcaatttggtcagtttttattttaaat

SEQ ID NO: 24703 - DNA, 1440 bp, Heterodera glycines
  unsure (1)..(1440): unsure at all n locations
gaaaatttgattttatgggtcaattaagttttattttttttgttttagatgattaaaatttttcaatttgtacaatttttagattgctagcaaatattttacttcttttttttaaattcacaaagcttttgtttttttaattttaagcttaaaaattgcatttccagaaaaatttgtttatttaatttgcattatatatgttttctcgataagggctcccaatcttttcttctcttcatgatgatttatgataattttgcattttgttaaatgaaatatatggtaataatgaataattattctattgcgataataataatttattttttttttatattgaattttgttcattcttcgtaagtttttgaagaaaaataatatagctctttatttattgcataatataacattaagcgatatttatataaaatcattatttttaaaattttttattgaatctaaaaattctgttatttttcaccatgattaatatgattacaattagcttttacacaaattatccagtaatgcataattaaaataaaataataatttcttttttcatttatgatttatatcatttcgtctgattgactcatgacaaatattcccgacgctcaccaaaatataagcagctatagatattaaggatatataattttagaaatacaaatctagatcttttcttcttaattcagcataaatattttgcagaaatgtgatgttttcatttagttttagttttatgcaatattaagttcaaaaattttattttaattaagtattttaaaattttttgctttgttaataaagtttaatagttaaactatttaaacgaaatacgatcccgagaataatcttaacaatctcgccagttgatgagaaacaatgttgtagcaggaaaattcggcatatatatttagggcatttaataaagtgtcaactatttttttatattgtagcttttttaagaataaaaaatgcttttttaatatattatttattctaattttttagcaaatttattaaaattatttaatatacattgaaagcatttttaataaaacaataaaaaattatataactttctgaaagttagtaaaattttttcttatgatatttcttacaatttggaaaaaattttccagcagcgcctaagtcaacaccgccggacccaaagtatactccttggtcaacaaaacagccaccaaaaatatttaggtgcctattttaaaatagtgaatattaaaaaaaataaatgaataattacacagttaaatatttattaaagcgattcaataaaaaaccccaatcacaaaaacaaataccaaaaataatttaataagcaaaaatgttaataatttaaaatttattattttttgtataaaaataaaccttttcgcgacataatggngtgaacgacgattgtcttagagccaa

SEQ ID NO: 24704 - DNA, 1139 bp, Heterodera glycines
ttgcatggcaaccgccgaaattcacaaatggcggaatccaaggttctttattatacaaatatttgtacagacggtaattgttagctttttctttttaaatatcctcttccgatatcaaacacactaaaactgatatttaaggacaatcagaatcgaatcctatgccatttggtggaggattttcatttacgactactgttcctccagcagctaacggtcctttccaatttggtgctgcacctccagtggccaacggaaatgtgttccagtttgctgagacgactgattgtaaggcaattattactttctgttagcattatgaaataatttagctgctgtttctacgaatgttcgacacggtgttacgggaaggaaattgctgcacgctcgaaggaagaagcgttgattgcattcaatgttagaaaaatcaccggttttgtttttgttcgttagaatatgttattttcatggaatattatgtccaggaaataaatttatttttgatttttttgcgaataaattgctgaaattctgttgttgttgttgttgtgtttcttttgtcggccgataggttagcatgttttgtaaatgtttgtgcattttgacataaaacgaaaaggtataaataaacgcaactcctccccatcataacctaattcacccaggcatttgattacgacgacggcattcattgtgccgtggatgagttgggcataaatatttatcatcaaaaaagatgaaaacattttaattgatagattctggcacagatgatcactagggcagcaaaaatatgggaacgcaattacggggactgattttgagaagtcaaaaactaaaaaggatgttttttagttttggcgttgtgttcactttggctagttttttgaacgcccccccccccctattgaagcggcccttttgacccatcaaaattgggaatttcttggaaaagattttatttgctattgcaaccctattcatcactctgagcagtgatcagtctgatcagaagtggtcgttttctcctccgtccccatgacattggcattttctcgtgtctttatttctctgccgtctcttccatatgtgctatgctctgtgtcctctcatctccgccgcttctcttcgcccctctc

SEQ ID NO: 24705 - DNA, 1108 bp, Heterodera glycines
taggggcttttttattatgattacaacaaatcagcatgccgtctcgctgatatggtatgtttcattaaggtttagccgatctacaaatttcggcactgtctattttgtaaaagcgaatcaaattcctttggattccaaagtggaattacagaattgcgacggcaaatcctaaatagacaacgacgctttcattataaagctttaagggaggaaaagtaatacgaatatttcaatttcttacttatccgaatagacaaagataggttacacacgaacatttttatagaaattccggctgaaactaaaatccctcttttggtcttaacctatgatttttggcccattatggatgaattaagtatagaaggcgtcgcagaaatacattcatattttctaaattcgggtttcagaaaattaagatttaaaagaggctgaattacagatgcttttcaaattttgggtgtatccgaatagaaagaagttggaaatcagtacttttcacgcctataaaattcgggccgaaaaatattggtgtttgtgactagaaaaatagcagatgcatatcaaatgactacagaaaattacagcctccaagaaaataattgctttgcacaagcaatattttgtagagcccatcaaacacattgtgcttataggaaaggcagaattatacaataggggcctttttattatgattacaacaaatcagcatggcgtctcgctgatatggtatgtttcagttaaggtttagccgatctacaaatttcggcactgtctattttgtaaaagcgaatcaaattcctttggattccaaagtggaattacagaattgcgacggcaaatcctaaatagacaacgacgctttcattataaagctttaagggaggaaaagtaatacgaatatttcaatttcttacttatccgaatagacaaagataggttacacacgaacatttttatagaaattccggctgaaactaaaatccctcttttggtcttaacctatgatttctggcccattatggatgaattaagtatagaaggcgtcgcagaaatacattcatattttcgaaattcgggtctcagaaaattaagaataaaagaggct

SEQ ID NO: 24706 - DNA, 1730 bp, Heterodera glycines
  unsure (1)..(1730): unsure at all n locations
agtcggcgatcagcagaagaagaaacgaaatgaaagactgatcaagcaaaggaagagcataccgtaaagagaggaagagcatactgtaaagaaaggaagaaatactgtaaagagaggaagagatactgtaaagaaaggaagacatactgtaaagagaggaagagcatactggaaagaaaggaagacatactgtaaagagaggaagacatactgtaaagagaggaagagcatactgtaaagataggaagagatactgtagcgagaggaagagatagtgtagaggaacgagaaaaatgtaaatgcggaacatttaaaaatatgacatcaaaaaatatttattgaccgaagaaaagttccgattcaatggaaatcacaaatttaatggtcaaagaattaaaaagttcggtgaaaggggtaattaatcagtaattattaaattattattttcaacaacgcttttcttcagctgctccaccaaaagttggcctttttcgcaactttcgtcccacctttaaaagagggaaaagcattttgaaaggctttttcagcgtggtttcaatttgctcgctttttgcgtccttttaataaaattgagcaccatttactccacggggccggcaaattgacggacggacgccgacggagacgcaaaagacggcacacttggcaaatgccgaacagccgttccgcggacggatcggtgaaagagttcaaaggcacgacgacgaaattggcacgccagcgaaaataggcactaagagagaaaaaggagaacgaaattggccatttgaaaggcatcgaacaaatatttatcggtgtttttcatcagtgaggacaaatggtgggccaaatgcgcaacggaagcgaagtcatcgacggcaatgaacgaatttggtggcaaaaggtgttgggccaaggaacggcggagaatgaccggcacggagagagtgccgaggcctaccaaaagcaacgggacggactaattgtaaggcaaaacggaaggaaaagagcacaaggatggacggcacggaaaatgggcaaaaaaggcaccaaaggacaaaaggaaaaggaaaaagcgaaaaggaaaaagcgaaaaggacaaaaggaaaaagcaaaaaggaaaagcctaaaaggacaaaagcaaaaggaaaaagcgaaaaggaaaagcctaaaaggacaaaaggaaaagcgaaaaggaaaagcctaaaaggacaaaaggaaaagcctaaaaggacaaaaggaaaagactaaaaggacaaaaggaaaagcctaaaaggacaaaaggaaaagcctaaaaggacaaaaggaaaagactaaaaggacaaaaggaaaagcctaaaaggacaaaaggaaaagactaaaaggacaaaaggaaaagcctaaaaggacaaaaggaaaagcctaaaaggacaaaaggaaaagcctaaaaggacaaaaggaaaagcctaaaaggacaaaaggaaaagactaaaaggacaaaaggaaaagcctaaaaggacaaaaggaaaagcctaaaaggacaaaaggaaaagcctataaggacaaaaggaaaagacttaaaggacaaaaggaaaagactaaaaggacaaaaggaaaagcctaaaaggacaaaaggaaaagactaaaaggacaaaaggaaaagcctnaaaggacaaaaggaaaagcctaanaggacaaaaggaaaagcctaaaaggacaaaaggaaaagcctanaaagacaaaaggaaaag

SEQ ID NO: 24707 - DNA, 974 bp, Heterodera glycines
tcgacaaatacaatttaaaaagaataaaaaatatttcctctagagctcaatttttaattatgcacaagaacaacgaacctagaggtttaattaatttgaccagaaaaaatattagcttaataaattgtaacaaaaaattaaaaccaaaactgataaagccatgaaacgctgatatggattatttaattaaatgggaggactaaaccttaaactcgaaaacatgtaacagagttatgttctatgtaaataaaaatattaaattagcaatgacattcaaaaattaaacatagctacaaacaaagctgttaattataattatatactaaaagtccttaaaaacataaaattaatagattgtttaatttattaatttaaacaaagcaatgatattatttgctatataaatgaaattctatgagtagtaaaaacaatttagtcttgcacacacacgaatcggttaaaaataaatgacacattttaaatcttacaaattctaagcacatgtatcggctaacataacatactaatataaaattataaggaaaatgctttaaatgattgataaatttcaagtgaacccaaataaaaggacttatggagagggatttggaccaaaatagttaattagcgcatggtattgacaaatcaagcatctgcacaaatcatcaagtaattaacctacactttaaacaaataaatttaaaattttgtgacccatattatacgctgtaagtagctatgtacggagatatcgaatacaataagaaaacaaagaatttggtattcaagggattaaaaataaattaataatttaaaataattgaatattaaaaaaggaaaacgaaaggagaggaaaatagaaacataaatgatcattttaaaccttttaaatttttattaggagtttaaattgaaaaagtcataacgaccacaaattaaataaaaaatgagttatttattagtaaattattaaa

SEQ ID NO: 24708 - DNA, 1273 bp, Heterodera glycines
  unsure (1)..(1273): unsure at all n locations
ttttcgtcacatncgatttttcaaaaaataattttttgatgaaaatatttttttatgactatagtaattatttttaatgatttcttaaattttattnntaaatggagaaacaaaaaaatcaatgcaaaaagacgcacaaaattcttgcnnccggggaggggggtcggtcgtgttccttaaaattttttccgacgccgtgccctccactcacagaaaaccttaaaaaatagctcaacaaaattacaatttcgaaaatttcttctagtcctgctcttataacatatttgcgattttcataaaaaagaaccgtcctaatgtcattcataaaagattgtcaataataactaccgtgagattaagaagaaatttaaagctagcaaagaaattaaattaaaatcactcgctactttaaataactaatcccaagctaaaatgtaagattaagcaatttttcatttttaattcagtccttaaattttgaaaaaagcttgggcccgattgggactccggtctaattcacgggacactctgttgcttttttgaaacctatctataaggccgagcacgggccttttagaattgatgtctctaatcaaaatctttaaattattttatttaataaacttcaattaaattaataaataatgaaatatttgcacgacaggaaagccaatttattattctcgttacaagattatttgattcgggcaaataaattcaaaataaatttatgaaatcgttaccaatattttttaataaaactttaggcgcttcatattcaaccctgtaaaatattataaaaaatttacagttaatttatcaatgaatatctgaattaatttacataatctattttataaccatcctttttttcgctaacataaaaagaattcggatttaaaagatttattccgctaatatttaaaaaattaacattgtaaatatttttaatgcgttttactaaaataaaactgaatatatagaggaaaataattacataaacttaattttaattatcgaaataacattgttaatgaaatattttgatttcaccaaatttatcaaataataaaaattgtgtaaattcaattggattaacaacagggctggacgtaattacggattacgtattacggattacggaaattacggcctttttgcagttacggattacggattacgggttacggatttttggatttttccgtaattttgatacgtaactggctttttagattatttttcgagacgatttcttgcaagattatttttt

SEQ ID NO: 24709 - DNA, 1326 bp, Heterodera glycines
  unsure (1)..(1326): unsure at all n locations
atgcggaaaaacatacttttattaaattctttcagcactttcataaaggaaattgcaaaatcttttgtcacagtcaagtcgtttttgaaatttatttatgtaacatacatcatggttatagcaacaacggtcaactatatttaaatattaagctaaacaattttctcctttataaccttgtttaaaattgcaaaaccatatcacgggtgctatcaaacaagaatcgaataatgaagttccacaatatgtacaacaatatttttttggaatttataaaggaaaagcatttataatattaaggattataccaactcgtacttttcatgtgtaataagatttgaaaagtcaaacgcgctactatccgtgttcactctaaatcttaatgttttggagtagtacgagttggcttaatttagttagttggcttttgcctgatattaatactgacacctaaatgtgaaagaaaaaattaatttatcttttgtggttgtttgatgagttcaaaatgttggccatgaaaataaagaaatattgatggtgaagacttcttctgactcacgttcgaaagcttaaaattcataataaaacaaatattttacaaagtctaaccgaagtttccaaatctgctggtgaatacatttgccaacgataaacttctttcttaacgagctcacatacaataacatttattcgaaacattttgctgactgctgctaaatctaaattgctcatccattcttcgatttcatgagcaccagcagcgggtgcaattgctttttcgatatgctcttgaatgctttctatactatcaaaaagtactgaaataaaagttatgtttttgataaatttataaaattcgtaatacttacaccaccattcattttcatttacatttaaatgtgcgtgttctgatatatagcttcttccaaaaactcnaataacatctctcncgaatttctgtgtgattccattcacttccggttaaagccagagagatgctacgccacccaagtttccatcaccaattatttcttttatttctccaggtccatattcatgagatgaaaattcaaattcatttgcataaattatattttctgtgcctaagatatttaatttattttttaactgattttctattttaaaattactaaaggtgtaaagccaagtttcgcacatttcttcccgttgatcttcattaagaggattaaataaaaaactcattgtagtacgcgccattgttttaatattctcgactatacgagaaaaaattttaatttttaatataaaaattattttatttaaaatttaattatgaattatttt

SEQ ID NO: 24710 - DNA, 1266 bp, Heterodera glycines
agcgagccatgccgcgcaagggcgacgtggcacgcgccttttgaagcggcgacgccaattgggaggaaggcgccgagcgatgaaagggcccgacggcacttgccaaggacgaacgtggcggaaagaacggacggacagagtccgctagcaacaaaccgcgcgaagcaaacggtcgatgtctgttcattttggtcaaatgattcgtatggaagcaaaagattgtcaaaggacagatggaaaggaaaggaacgaaagccaaatactaaattggaagtgaaaggggaggggaatcggagaagaaaaaatttaaaatttgtattttggggaggggggggcgacgtgggaaatttggtggggtgggggggaaggaggggaagggaggggactttgttgcgttttggttgacatggatattgttgtggtggaaaggatggcattggccggtcaatacaaatggggggggggagttaaggggtattagtggtccttcaaatggcaatgtgtgtttaataaacaatgaatgaccacggaaagggggggggacaatgggaaagttgccgagtgattagtgggaatggacaattttggcactttttggggaaagtgagtgagtgggtgggtatttgcggatgttccttttggagagagtttcaaaaattaattggcacattctctcccccgtcccttcggttattggcacttttaagagtttcgtctgctgaagaataaagcggaacattgttgctgtttttaaatttacataacacgcaaatgggaaactgagaagagttaaaatggatggacattttggcactccgcccaatgccaatgctttaatattcaaatgctaatgcattttttatgtttgtcaatgctttccccgcgcccgcttcccatcacagagaaccaaaccttcgttataatcgtcgaaaacgttgtaatatctgttggtgatgccaacgcttgatcttcgtctaattacgcgcgggtaataatgacggaaattttcgactcggacgcgcggactctccaaaaccatcgaaaggaagaggcgaataattaacggggcaaaaggagaaacggaaaacgaaggggaggataaagcggataaagggatggataaagcggaaaaaggggaaacaattgggcaaagattggagttttgaagagggcatggacagagggacgacagctgaggataattcggcctggggagaattcgacaccttccgtcgacagatggaccacggcggggagggggggggg

SEQ ID NO: 24711 - DNA, 1810 bp, Heterodera glycines
atttcaaaatatttttataaatatacattaagcatttttatttccacgaaatttcaaataaactttgcgcaggctttggatcgccatgaaacggtggccagcgatgggctcatttggcacgcggtacagcggcctctcaaaacaatcgtggtccgatggaagccgcgtgaactacggtagggcggagagagacgcgaccatctcaggccctggcggaccgtgggcaccattacagccaagttggtggtgtttggcaattcaacaattatatttctggcataatcgttgccactttcaattattttaaggttacaacgtaacgcccattgagacttgtgtgatgagttacgcattcagtgattattttggtaatttcggactcgagcacataggattaattaattatttaaatgagaatttcatctgtctcggtcgagtttggcattccaatctcgaaccaagaaggcattttcggtctcgaatttaccaaatttcccctacagtaaacccgtacaagttgacggaagaacgactgtacaacaaatggaatgacattgtgtgtgggcccgagacggtgacctttatcccgggggacgggcggcacatcaccggcacattggtgcaaggattgtgcaagaagcgggcggtgccgtgcaaagatggcgaggaggaggaagaggtggaagaatagcatgataaaaaggaggaggaagacaaaaatgtaatcgaatggacaggaacaggaaaatttgattaaaaaatgaccaaattttgtgataagtgtaccaaaactgcgactttttcttaaatgctggcacaaaaattgtattaacgagattccgattgaattttttgaaatttcaaatacagaatgccaaatattaattgaataaatttagaataattaaatgaaagtcaggttatttttctcccaactccaattcaaaatgtcattaaaaacaaatgcgggcaaaaatgagtagcgttttactagaaaattttcaatagtcagtcactctctcttccccaacccctttctctctctctctttctctttcgctctcttttattctctccttttctctatgttctattaacacaattttttatgtcctcatgttctctatcttgcatctctctttttctctctcactctgtttctttcccttcctccttttatctctctctatttctctctctttcctcactctatctctctctgactctctgttgctattttttgccagcaaaatgacacacaaaacgacgcccatccatcgcaccattggcatttaatcaattaaataattgttgattatttatcattttgttaactttctttaaatctaagcaaattttttgttttctcctattgtaaccttaatcaaattttgagctttcgaaaggagaccaaaaattcgatttcgaaaattacaattttcaaatttcacaaaggaaatgagctgaaagtcatcagcagggttgcaaaaaatatgcaatgcatttttttcctggattctacatagtctaattagtaagaaaaacatattctttttggtatttgcatataaaactaaggacttttatttgcatatttcatccatattttgccatttttcgtcaagattttccggtttgaaaatcattacgaaaaactttgattatgcctaaaattatttccaaatctgatggatgcgcgaaataggtcaacagtgagcttcactgacgaaaatcttgagaaatttttgtttgaaattacaaaaacaaccgataaaatttatgaggaataaaattttttaattaatttgca

SEQ ID NO: 24712 - DNA, 1116 bp, Heterodera glycines
tctagagtcaccatcgccgattctcgcattttgactcttttttgctttttggtctcagccgcacttattacgcttctaagccgggaggaggtggcgcgagagcgtacgccccgtccgcgtcccaacagaaagcggaattattcagagagagcggcaaaagggagcaaaagccacaagtgcagccacggctttcacaaatgaattcggatgcttacagaagcaattcggcagagcgagcgggtaattataatgccatcagttaattatgacaaatgggagaaaggagaacttattttaagattttaaatgcttgttaattgagttaagggcaaaaagcattaattaattattggttttatggccacatgcccttttaggttaagacattcaaatgattagccaaattagcgccccacccctaaagtgccattctcgtaattcaccatcggcaggtgtcaccgtcgtgccaattcgtcgcgacttcactctcccaactcgtcgctccgagtggagaacggccgaatggaaattgcggagtccaaacatgagccaatttgaggacagtaaaaaggaaggcgaagagttcaccagttttgaccgtgctgtccgctacaaccatcagcgaacggtttggccaccgcccccgaggggcccttttgggtacggcagaaaaacggagagaatggaaatggcgggggcaccgcggagggtcagcggcaacctttactacccggactcggcaacagcggaatattcgtcgaggaaaagccatcaggtggaacgcaaaacaagaattaagcaaaccaaaaaaatattagacgggaagcgatgcggcgtacagagaacatttccaaaacggacaccaacaacggcaccaccgagcacatcgagaatggcactcgggagcagaaaacgaccattacggaacaaggcggaatggcacggaacagtatcaacactatggaagagagaaagaggggacagcagcagggagggcggggtactatcagcagcgattccgggaggagagggacatgcgcagaatgggacggggcggaagcggacaggccgagtactcaaatgggtggggcggcgagtcggcgcaccattacgcgg

SEQ ID NO: 24713 - DNA, 1316 bp, Heterodera glycines
  unsure (1)..(1316): unsure at all n locations
atttaagtaaaccaagttaaacattcagaaaagaaaagggaaaataaagacgaggacggagaaggacatncggaagaaggagancagagggaccaaaagcaggtgaaggggggaagaaaggggactgaaaaaggggaggaaggaaaaagaaagcggggggagagaaataaggggatttgaaggagggcgcattcgccctggggcgcgcgtcccgtttggatactgactgatcagcccacccgaccccttcccctgaaaaggaccatctccggcacctttttggtcttccgcccatccgtcccgcctatccgccgcccctcgcgccgtccgccgttctcttccgctcgccgttgtccctctcttccccgtgctcttccgcttcgtcctcttccgcctcccacgtcgaattggtgccttcctcctttgtgccccctccttttctccctccccctgcccactatcttttccctccgccgccctttcactccctttttcccactcccccaccaattcactcactgatgcttcagcaacagcatcagttcaaaagaacagcagaaggacgaggagagggatcagcattaacaagtgaatggggggggaagggatttgggatttgaaagataatggatgaattaattagtgaattaattaatgaatgatccgaaaagtgagaaaatggcctagagggagaattaagctatttaaacatttcctttcgctttccccggtagtgccaatgtgtaattttgcggttgcaatgaatgccgcgatgaacgcggctgcttttgcagcaatgaaacacaacgattcagcaacggcatttacaacaaatatggcgaataaaatggacaacggcaaaaataaccaaaaggagggcggcaaattcgacaatatccgccgccattcgccacccaatcggtcggcaattcttcagataaacgaattgcaaaattatttttagcccatttcatgcgaattttgttcaaaatgaattggacgaccaaaggaccgatcagtcaaaagtttcgtcaattgtcgtctctgtgaattcgccaatgtccgatcggatattctcagattcgactttggtaagtttctcccccctaaattcatttgtgaatttgttgctcttttactcagatgtctccgaatggcgaaggaaattgcgccaatagcgaaagatcatccgccagtccaaagcaacgcaaaagcgacagcagtggaagcggcgccaaaggcggaactttgacatgcgccgtctgtggggacgtgtacaagcggcagacattacggtaaagagaacgaagaaacgg

SEQ ID NO: 24714 - DNA, 862 bp, Heterodera glycines
  unsure (1)..(862): unsure at all n locations
ccataaatctggcgcatcgttcggggggactgcccgaaacaaaaaataaatcgatttttcaagtgtccgttgngggtactcnaacaattatggggagcaaaaatccaacgcagaattaaagtacaggctatagggaagctattccggaaggattcggtctccccataaatctgggcgcatcggttcggggggactgccccgaaaacaaaaaaatcgattttttcaagtgtccgtttggggtactcaaacaattatggggagcaaaaatccaacgcagaaataaaagtacaggctatagggaagctattcccgaaggattcggtctccccataaatctggcgcatcggttcggggggactgccccgaaaacaaaaaaatcgattttttcaagtgtccgtttggggtactcaaacaattatggggagcaaaaatccaacgcagaattaaagtacaggctatagggaagctattcccgaaggattcggtctccccataaatctgggcgcatcggttcggggggactgccccgaaaacaaaaaaatcgattttttcaagtgtccgtttggggtactcaaacaattatggggagcaaaaatccaacgcagaattaaagtacaggctatagggaagctattccggaaggattcggtctccccataaatctgggcgcatcggttcggggggactgccccgaaaacaaaaaaatcgattttttcaagtgtccgtttggggtactcaaacaattatggggagcaaaaatccaacgcagaattaaagtacaggctatagggaagctattcccgaaagattcggtctccccataaatctgggcgcatcggttcggggggactgccccgaaaac

SEQ ID NO: 24715 - DNA, 1383 bp, Heterodera glycines
  unsure (1)..(1383): unsure at all n locations
gcttttattatgcaattagaacatgcaattaacgaaataattgaataattatttcatttcttttggacgtctttctccaggctgaccgactcggatcggccggcgccgacgaagtcaatgccgacggccaatacctgggggaattnagcagttgcagttgattggataattaattaattagttagttcgggaaacgaatgaaaaaacatgttcaattcagcaaaaaaattataaaaacaatgatgccgcataattttttcacctcggggaagacttgcaactcccaacatatttgggattggaatggcgattcacgaatacccttttatccttttccaccccctcctattgttgtccaacttttccactgattttgatcctgatcggaaagtttccactcagattgactgattgaactccttcttgattgatctgatcaaccgatcactgtctctcattcggatcagatcatccagtaaataaatgaaggcattaatgtgcataattagggggtgataaatgataattgataaattggaaagaatggacggctaatgaaaaggcagtcaccaaaataagaatgtaaaagagattaacagaatgaaatgccgaaatccaattaaacattagtgcatgaagtcgatttttcaaagtaaaattggtccataaaaaagttaatgtgcttttatgcttttagtaattactgttcattttttgaaattttatttttcactttttgaaggaatgaattttcggcaaattgcaaaattcacacaccaattcagaaaggaaacgcctcgtattaataatatagaaaataatttagtgcgcaaaatgattatgctttatgcagattttgtgagaaaaaaatttgaggaatatttaaattttactcattttgccaaattcagaagaaatttgttgagctccgatcaatttattctttgatttttttgtgcgacagaacaatccaacgaaattttgcacaaatacaaaaataacattgagaattgtccgatcagcgttttggaaatgccaaaatgatcgggaaaatggtgagagacgaaaggacagcagcctcgtggatcatcagtgggggttcttctccaattctcgatggtcgactgatcacactcagtagccgggggcggtgcggggcggtgggcaatggtctgaaagtcgaacaattttagaaaaatggattttggatttgctaaatccactcacagcattggccgctggatccctgtgctccgggctgtccgggctcgccgttgcctccggggttgccgggttggccggggcttccgccgtcgccagggtatccttgcgggccggggtttccaggctggccgggatgtcacgttctcgccgggatgtccg

SEQ ID NO: 24716 - DNA, 1586 bp, Heterodera glycines
ggcgatggtgcccggtggtcacggaaaggcgaagcggacacttttgagcaatcatttgcggacgatggtggtcaaaagcatatggcattgaaggtggtggcaaaaactgttgttcgttatgccgagatggggcaaaaatttgagttggaattgggcacggtgagtagtccgatgatgaagagcagcattttggcatgggaatggccacacactgaatgaaagttttaatcgcaaaatttactaaaaaaattttctctggcgggctgtaaaatgacaaaatttattcaaaaaagtaacaaaattaggctagatcaatattagataaaaagttttaaaatccaaaattcttgtcaaaaaatagaaaaataaatttaaaaggatttttgatgaaattttcattaaaaaacctaaaaattggagccctattgctaacctgatgctgaagagaggctgttaaagtttgaattggaatttgagactgtgctgaatggtcagcagccgatgaggagggcattggcacggaacttgttattggcaatagcacactagcagaaggcatccgcggcgaagaaacagttggcgatggcacaatgtttgatggcacgaactgttgttgtcgagtacggtagaagagacggcacagtaggcacatcacaatgacaacgattatcaaaatgcaaaagagcaagataatgatgccaacatcgaacccggaagagactgttgttggcgaagcgattgttaccaatgatggagtcaatggctgtgttggagccggtgccaccaaaacatttgtagggctcatttttggcgattgtgacgggctgtgaattgattaatgacaataaagttcgaatggcatccgagactgataattagcatctatttcgaaaatgttatagcacgtttaaagcgagagaaggtcctatgcttaagccttttattgatataatttctagatttgtcagcccgtgttttagtgtttcataattttttggactaaatttattatgtaaaaaaataactttaacttactggccagtcacaattatgccctctttcttcttttctactttgatggaaaaactaagtccaaataaaagaatgattaaaacggaaggtgcaagcacccttaaaattttaatctttttatcgcgattgtttttaagaagaaaagggataaataaaaaataaaagtacaaaaattctgtggtaaatagggatacgatttaaagatagaagagagagagagagagagagagagagagagacagaatgagagagacagaataagagagagagcgaggagcgagagagagaaagaacgagcgagagaagagagagagagagagagcgagagagagagttttaagcattaatagtcaattaattaaactcaaaaagcgacccgaaaatttagtacaagaaaattaaaaattaatttgataaaagttttaactaaactttctaattctaaacagataaaaagaatccgacaattaattcaccacataattaattaaatggataggcctaaaattttaaaggaaatgcaattagaattttattattcgaaaaatgataaa

SEQ ID NO: 24717 - DNA, 1533 bp, Heterodera glycines
aggaaatttttaaccaataaataatttaatattatcaacattaattaataattagggcgttttttattgttaatatatattttaatccaaaaacgttctattttctttcttcgggcccttaattctccaaaaatctccaaattattaaagtcacttaaattttggaaaaatttgaaaacaaaataggtcatttgttgggcaaaatcataattggggcaaaatcattaaaaaaagaatcaaaataaataatatttgtcgtccccttgctttagcaacattggcattggcattgtgccacgatcaatgtcattggacacatgggttggtcgctatccggaaacatacggctatttcgatggtggcaaaatttatggacacaacaccggcttcttcgatggatttcccgagttttcaagcggtgacgtcgtcggatgtggtgtcgattgtgcgacccatgagatcatttacacaaagaacggagaacgattgagtgagtgtgggaaacgaagagaaagagaaaaagggggagagaaagtgaggtggtaaagagagtaggacgagatagagagagaaaagacgaagaaaagggagaaaagaaagagagaatgattttgtttaaatattaaaaaaaaaattaatgataatttttttttaaatttttaaacaattttctataaattttcaattaacaaaatatttttagttagcgaaaaagccatatttaacgtgttgtgtaaacaatagtagtgattcgatgttcgaaaccaaaaattcaacaaaaccgagactcgacccacccgagactcaagagatagagaccgaaaaaatacgagacccgagactttttaacaaattttttgttcacttcaaaatcgattaaaactttcaataaatttttaggttatgtcaaaaaatgctattttagattgtggactgattttataatattttaaagaaattaagatccgctgaaaaaatcgtgcttttttaatgagagtgctaagaaaatacgaaaaattttaaccctccttatctgacaattttagtaaaataaaaataaaaactacttggagatcaatcatttcaataaaatggttaattaattccatatttcttaaataaaagacgtagccccccagaccctttggcttcgggagagactacttgaaatttttattggaaagcagaaattttgtttaaaactttttcttaaggaaaatggattgcttttcagaaatttattaatttttgtcaaaaaaatttctttttcttttttttgctttcgcgggggagcctttagccccctcagcccctctccaccctgataagcttttgcgttaatttccaccggaatttttaattttgtttttcaaaccttttcttcttccttatgagcatttttaacgtcaattaagttcataaatatgttttttttttgttgccggtggtgatggaaagcggctgtgttgacagccaatgggaaattttgaaagtttaatgagttaagttaattgatttaacccgaaaattttg

SEQ ID NO: 24718 - DNA, 2091 bp, Heterodera glycines
cgagaatggccccgtcgacgtgtcccttccgcgcgctctctaattttgtgtgccggtggtactcgccgaatttggcaccctatcagcggcaaggcaaacgcaccagtggctagaaaacctacagtctgtgcaaatcaaaatgttgatttgtgtggggagacatttaaaaagtgccaatcgaagggacgaaataatggccaaattacacttggaaaaaatgatggccattttggaggaggaaaatgatgaaaccgatgggccattcaaaggcattctgatcaatcacagtgagtgatcggtttattatcgctgttttgggaccaaagtttcctttcttagtgaagtgaaaaaataatcgttttaatatatttttttctgattcttataaatattcggaaaaagtaaattcagaaaaaatgaaggggaaaagtaccataaaagcgaatgttttccccaaaattattggacaataaatgacaaattaaaaacatttagaagaatcattcggcacaattctcaacaaggacggtattcaaaagatcaatgaatggctaaaccttgaagtaaataaaatacaaaacaaatacattaaaacaaagtaattataaaagagctaggatttttaagcgcaatcacccaaagaatagaccacaaaactcgaaaaataggaaaaataaacaccagcgtaaactttacagttttaatatgtttcaaaataaatttaaaaatccggcccgtctttaattattttattattacaaatttagacaaaatatttttcgttgaatgaaaagttttcatcggctgcttcttcttccgatgacgaacaaagattcaaagatgcgaattatgatgaacaaattgatgaagataatgagagtaataatccaaatgatagtgataaattagagaggaacaaacaaaaagaaatggaaaattcgagggaaaatttaaaaaatgaaaattttgaaatgaattattttatgggtggacaaaatcaggaagaaaataaatgcaaaaaagaaaagtgcaaatggagcaaaaaagaaagtgaaaaaatggaaaaagaaaagagaaacgggaaaaaagagacggaaagggaggaaaatagtgaagaaaaagaagaaaaagaaaacaaagggatggaaaggaaagaaaatagcgaacaaataggagagaaacaaaatgaaaagaaaagatggcgagaaaaggaagaaataaaaaggaaaaaattgctggaaaaaaaggaaagagaaaaagaagaaagaagtaaaaaatggatggaaaaagaaaaagaggaaagagtgatcaaacggaagaaaaacttaagaaaatcagaaaaaggagaaaattatcgctttttgtcaaaagaaagtgttaaagcaatgaagcaaataaaaattgaaaattattcaggtgaatattaaataaattatgtaaaatataattgttaagatttattaaatgaaaaatatttggccaaattttacgacaaatttttattaaatgaattggaagaagagaattgtgtgatatatttgcatgttgcagcatttgttagagcgattcattcaaaatcaaaattcatcaaaattcgaacaaaaaatcacgaaacgaaaatttcgaaaagttttgaggaaaaatggcgcacttttgcaaaaaatgcaatgccaaccgaaggcgaacaaatggaaattgaattgcaaaagttattttcattggacatcgcacttaatgagataatatatgggtaattaatgtataataattaactaattaatgataattattaattgtattaagaccaattgaacaaaaacaaatggaaaaagcaattgaaatgcttgaggaaaagcgaaagggcaaaagcaaaaacaaattgggaacatataaaaggggggaaattgaaaacattttagagcaattgcacctccaaatttttgggattttatgtgctaaaaaattgacaaattttgtggaaaatgaaaaaataataatcggagaaagaattaaactaattatgagaaaagaaaatggagaaaaagaattttaaaaaaatacgtagctgaaatggaaacaatgctaaaacag

SEQ ID NO: 24719 - DNA, 977 bp, Heterodera glycines
gccgtgatagttaagcaaagtctgtgatgacgatccgtcgacagaagcggcggagaaagatggaaatggacctacaatttgaaaatatttgttaagttttaattgaatcaccagcacgattataaaaattggagccgtgatagttaagcaaagtctgtgatgacgatccggcgacagaagcggcggagaaagatggaaatggacctacaatttgaaaatatttgttaagttttaattgaatcaccagcacgattataaaaattggagccgtgatagttaagcaaagtctgtgatgacgatccggcgacagaagcggcggagaaagatggaaatggacctacaatttgaaaatatttgttaagttttaggtgaatcaccgcacgtagaaaaatgacccggaatggtgttccaaaactgcaccgccaatgagggaggttcggcgttagctggtgggaatgtggcaaaatgagtaccttaaatttgaaagcatttggtaaacattggatcgaaatgcaatagaataaaatgaccgcggccgttccccggatgcattcctctggaatacgggttgaaccgttgatactgatggccgacattttctgaaaacggttgggatgtatacaaaattagacgcagtaaatatttattttaatggacactgcctggcagaaatcgacacgcttcacaatatttataaaaattttcagattttaaataagccatacgaatttgccgtcgaagtttcgtattttctcctcgaagctgcgcgatttgtccaccttgacgggcgatttctcccctaagctgcgcgatttgttgttgttgttgggcgataagttcactttgtccggcgataagttcgtcttgctgcgaaatccgcgttcgtagcgctccaatttccaaacggtggaaattttgaatggaatcaagcgctgacgtgaatgctccaagcacttaaacaaaaggaattttgtctt

SEQ ID NO: 24720 - DNA, 1641 bp, Heterodera glycines
aaaaatttcgggtcgattcttaggagtttattttttgaaaacatttttaggtcgattcttaggggtttattttttgaaaaatttttaaatcgattcttagggggtatatttttcgtttttattgcatttctgttaataattttggtcaacatgccaaaataggttaaaatatgtttttaaaattttttttagtaaaaacctagaaaatatgtgctaataactcaaaaagtagcttaacaacccccccccccccgcccaaaaaacatgtttttcgtgcatttcagatcatagggagctcaggaaaaaaggtaaaaacttaaaaatattagccctactaatgatacaaatacaaactgagttatgactaatacttcactttcaatgtttctttggacttttataaatatttctttgctttttaggctaaatttcattagtattataaatatatctaaatataaatcaatttagaatatatatttggtgaaattcgctgtcgaaagatctattttgggttagtaggcgaaaggttcgatttttggttagtagtcgaaataaacgtccgattttgggttagtaggcgaaatgtcgaataggcgaaatgtcagtaggcgagaagtccagaggcgaaatgtccgtacacccttttttctgccccctttttgagcaaagtctgatcagacgttttcagtcgagattttaaatttaaattttacaaattttaattatcttgagtcaagactttattccatcattgtatgacttcatttttggctcacatttttaatacactcgtgttttttaaaaatttatcggtgctgtcgaaatcactctttgtcgagtccacaatgtcgaaatcaatccctgtcgagatctatcattgtcgaaatcacctggcacgtgctggaacatatccctgggtggcaacatcaaagggttgcaccacttaaatgggtgcgggaaagcccaaaataagttaattaattaaaacataccatttttaaaactttgtactataaaaaattagatcatagcaatcaatgattaatttatttggctacttatgccataaggattaagcgttttgtcaaaatttccatttgtgcttttttgagtaatgcccattttgggtagttttgtagtaacgacccaacaccaataaaagcatgtattcctatattaaataaaaattagacaagaaatttgatttatttaaatttgtttataaaaaagttgaacatttccaaataattaatttatttgcatttaaaaatgaaaaaaaaagttaaaaaccccaaaaatttgtttcatatggttcatcagcagctcattaattcattcattctccgtcaatcctgcttaaatattccgccaaattcatcccatttacacagcatttttcaaattcttcgctcgctgcaattgcgtgactgcccaaaaagatggagtggcgacgccatggactgctaagcacctataaagcaaagatttattaattatacaataaattacacttaaattatgggatcatgcatttcaaatgtgccaaattatttcgattaaataatttgtaacatcgatttagcaattttttttgttttttattaaagaaaaatcgcagaaatgtcattaacttactac

SEQ ID NO: 24721 - DNA, 1482 bp, Heterodera glycines
  unsure (1)..(1482): unsure at all n locations
ttttctcaggttggactcctttgatgtacgccgcctatttgggccatcgcgaactgtgccaactgttggttctgaggggggccgacgtggaggcagccaacgagcgcaatcaaacgggggtaaatgagaggaaaatggaggagggggggggggggggacggaccctgagggaaagcccaattaatgttgtaatactaaatgccgaaatgtaacagattatgttggcagcctcttgtggtgccattgacgtggtaagtttttgctgagagacaaaagagaatttgggagtaggcaaaagttgcgagagtctcgagtccgacaaatttctcattgtttttttttggtctcagtctcgattctcggattaatttgtccgtctccgtaaaaatcttttctcgcacatcctggaatgcccagaataatcaaaattaaatgataattaaaatacattttgtacaattgtcccgccaagaaaggttcgaattttgttggacttttctgccgattgcaacagacaagaccaatacggacggagcagtctccattatgctgtgtaaaaatagttattatgttttaataacaaatattggtagaggccaggaattttgaaaaaaggtccggaagtctcgagaaaatgccggtgggaccccggccccattcggatatcattaaatatattcaaatttcatatattaattatggaaattgaatttagaaaatattatcatgccccggtggtacagttactgcttgaaaacggcgcagacccaaacttaccgggtgaaaaataattttggttgagattttctgtaattaatttgtcagatttcaatgactcgacgccgcttttggccgcgtgtgaaaatggagacgaaaaaattttggccttccttttggaaaaggtaaaaccacagatcattttgaataaatatattttttaatttttttttttttgacgggatgataatgataattaattaatgataagcggatgggaaatatttaatttttgtgtctttcgaatgaattatccatcaaattcaataagcagtagagctcgattgaacgacctggaaatgaagctttttcgctcctaacttgggncctgagttttttcattttcgacctggatttcctagacaaaaatccaggaaagccccaggcctttgtccatggccagcaggtcgtgctctaacaatgactgcttctctcatttgtggtgtttgttctctgttaagaaaggcgacccttcccgttgcaacaaacaaggccaaaacgcattcacaataaatgcggacgaaaaactgcaaattgttctgaaggtgaggtgaaaagcaattgggaaacgtttaaaagggaaggaaaagcatttccattggccagaaatatcggaaannaggattcggagttggacaaggtgctttgccangtggaaatgcagaaatattggccgaattttgcgagggngcggaatttggtagg

SEQ ID NO: 24722 - DNA, 1602 bp, Heterodera glycines
  unsure (1)..(1602): unsure at all n locations
cgtgagaaaatcttgacgccgaaatttaaaaaaaattgttccctgaaattttcaagaaaaaaatcttggaaaatttttataataaatatctaattacgcataattggattataaattttagcatccataattcggaatgcgacgcagcaacagctcgcaaatgttggccctgccgcgcaaactgctgacatggacatagtgcatgtggtcacttcgcagcaacggcagacgcaacattatgcgactccaccgatggtacaaagatacaacatgtggcattttgcgatatttactaatgctttttcatttcccgtaaagccgctctacacgccctatttgtacgccgccatggcaccgccccatccccaatacaatccatacgcgtattactacgcccccgttgccgctccttccgccgcttcgtcatcgtcctccgctgtgccgccgttcctccaccatccgccaccgccccatgtccatttgatgccggcaccgccaccgcctccggcaatgtttgcgccattgtcggcaaattccgcagccggcacttctgctgccaacaacacagcgtcgaccagcaattacaacaacgccacgggcacttccaattttgggtttgactgtccgcccgtcgactccaatccgtcccgttggtccgccgaaacgctgtgccggtggctgactgcggccggactcgccgactgtgcccagcgtttgctcaatgaggtgggaaggcggagggcacggaaacattattgggttgctgttttggcaaggacaatccaagctttggaccgaagaatttcacaaccttttcaggaagtggacggcgcctgccttttgctctttacgcccatcaactaccaaaatttgggactgaaattgggtccaatggtgagtacggttgtttttttgaactgaataccaaacattttttgtaaattaaggtaaaacttcagcaaatagcggaggtaaatgaatgaaaaaattttgattaattttcatttgtttttgtttacagtatctgcgacagttcacatttgccgacaaccgctaaaaagattaaaaattggagaaaaacagttttttggacgcttttttttgttaattcaaaattttctgaatttagcactttcattttatttatttaccgataaagaatttgccatcggaaggtcggtgaccattttttgcttatttgttagactgattttatgtgttattctaatatagaaaaatttggctccaataagatttatacgtcctacatatcaatcgaaaatgataacaaacaaagaacaactggtattgtggttcttaatttaaaagttcgaactccgtgaaagaattttaacaaaaagttgaaattttttataatatccattgaaatcaatcaaattttgccaagttgagaatttttatcgaattagcattgttttgcatcaaaataaattgatgttagatcaattcacagctttttaccccgcaacaatgcatattttgaaaaaaattcaactttgttgagttcggtctggggttcagaatcgggtaaatcagaacaggttcgcaatcaccaactcaatgngaaaccataaacaaatt

SEQ ID NO: 24723 - DNA, 828 bp, Heterodera glycines
cccctccctttctttccccccattatttattattcatccatcgcccattgagtggagaaatgggagaacaaaataacaacggtcgggcagacagaagaaagacaaaatagattttattatacttttatacgaaagaaattttgaaatgccaaaggcaaaaaaaggaggaaaaaagaggcgaaggaattgtcgccactttcaaagtgttaattaattgtggcgcctgactcattaaatatgtccatttgacaaatggggggagggcatgggcatttacagttgcattggcattggcactcgtgacaatgtcaaaaaaacggatagaacaaacaaataaatggggaaaaagtgtggggaaaaggggggggggtataggcaaattgggaccaaaatatgcaaaaatgttcaatagcaaatgaattgctttttctataaatatttcccattaaatattatttgtcttaattaatgattttttcggttaaataaaacggaaaaagcatttgaagagaaagggaattaaaaagaacattttgctagggcagtgaagtgcttttaatttctcttttaatttctaaatttgtttttgtccattcgattggattaattgggggaaaaagcgaattttgaggggaacgaacgaaagcaaaggcaaatggcaattccacttgaattgcgcggacaatttgggatttttgaaagagggcgacggaatttgagagaccaaaaaccaaattaaattgctaaagaataaatggggaggggggggggggttctaaacttagtaggagattgccatttttctcgcttatttctcgactttcttta

SEQ ID NO: 24724 - DNA, 948 bp, Heterodera glycines
taaaattattgcccttagtacgtaattgccttccgttttgccctttatttgatataactgctgtgtttctacgacgttaagatgtttatgctcgaaaaatgaaatatttttattctccggtatgttttttgttaatttttctttttttgctactgtaattttaatgtttggagccatggtagtagttataatattggcagttgcttttattattttctgttgggtcttcagaggtggcacagttaatatagctacagtcggtttgggtatagtatttaccattattgttgtaacatttagcacattttgagatgaggtggaatttgagttgaccaaaatagactcattttgttgtttttgtacatttttctgttttaattgtgctttttgtttaaacggtcttcccttttttgagacttccactttttccattatttcccttttttgcttctttgacaaagaatgaattaatataaaaacatcgtttgacattttgtacgcttcttccggtaccccaataatcccttcacgctcctctgcggtttctttttcaaagaaaaaaacgctctgctcactctcaaccacaattgcatcatccgtaatttctgaaaaaaaatcgcccactggaaaatgagtagcccaataattttcgcttggttccggtatttcccataaaaatgtttgtctttgcatttcttcccaaccattatatgggttgagtttgtacccaaacgaagttattaatgaaaagtccaaaattcccccttgtcctttctccaaataatcattaactgtggtttcacaacgttcacctgcccatgcatattcaattttctcgggtttttcagtggcccacaaattttcgctaaaccttttcatttgagtgtccattgcatttttaaattttcggcatctttccgcaccgacacccttcataactttttcctg

SEQ ID NO: 24725 - DNA, 1577 bp, Heterodera glycines
taggtgccgatcgcccagcaagcactcggtccaaccatcatcccgcaagtcactcaagcacgcggtcgggccgtcctgcttgctctacgtgccgctctactcactcccgcaacgtctcccactctgttccgaggtcgatcgcgcatttgatgggccgattttacattgaaatcactctcgtcataccgattccctttttatccaaatgtatcctaaattattaatatataaactcgatcttttgtaaatataatcgccatgatttgtactaaaatgcagtagttattccaaaatgttggtagttataacaaaatctttataaacatatctgagtctgtaatgtaatgtaatgtaatgtaatgtaatgtaatgtaatgtaatgtaatgtaatgtaatgtaatgtaatgtaatgtaatgtaatgtaatgtaatgtaatgtaatgtaatgtaatgtaatgtaatgtaatgtaatgtaatgtaatgtaatgtaatgtaatgtaatgtaatgtaatgtaatgtaatgtaatgtaatgtaatgtaatgtaatgtaatgtaatgtaatgtaatgtaatgtaatgtaatgtaatgtaatgtaatgtaatgtaatgtaatgtaatgtaatgtaatgtaatgtaatgtaatgtaatgtaatgtaatgtaatgtaatgtaatgtaatgtaatgtaatgtaatgtaatgtaatgtaatgtaatgtaatgtaatgtaatgtaatgtaatgtaatgtaatgtaatgtaatgtaatgtaatgtaatgtaatgtaatgtaatgaaatgtgacatttaaattatgggcgcaccgttgggaattgaacccaaacttcgggttattagagacccgcgtgctacccattccaccacggtgcccccaacatcaccgctgttatttgagcaaataaagaaagaaaaaaaatatgtgatttattcttcatcattgctgatttcgttgtcaaggacaagcaaaagtgcattattttcggggtcaataacaaatgaacgcatccaaacagcacatctatttcgacgcatcaaccattcccgagcgcgatgttaaatgataaaaatgttggcgaggaagttccgtggcattcaaggatcccaaagtaaatccaatctggcacacaacgcatctttcatcattttggagcatttgttggttcacttccaggttgggcaaaatactatcgcattgttgagcgagttagaccccctccaatctcaaaagtaggagtgggttcccttcttcttcgacgtagttgggtccgaattggttgggttctaattgcaacggactggtttcgtctcacggttggcggtgccccctaatattaaacacacacgtacacgtgtcgctcaaaatttattgaaaaataaaatatttggtgaaggaagtttttttttcttttgttttctcaaccatttctcaccgattcaacgggattttcacgattagtggttccacgtccgagaattgttgttgtttcgacggcgccgaacaaccggttggttctttaaaagaactgcattgaagtatttaataaaccataatgcttaccggtgtt

SEQ ID NO: 24726 - DNA, 1234 bp, Heterodera glycines
  unsure (1)..(1234): unsure at all n locations
agtgagagagcaaatgcttttgttgctgcgccaggttctttctgaaccatgtgacgcgtaatggtaaggtgtccaactcgttgaaagcaggtgtcaatgacaccaatcggacgatgcgcactgctcgaatatgcggctaaacgaaagcgaattgacagtgaggctattttaatgtgaacaaaattgtacactcatttagttcaattcttttgcatttcatacaaagtgaatttgtgtaattcattggcgtgctgatcaccattttgcgccaagtcccttttttgccacgagcatttctttccgtcccatttgaatcatgtcctgctttctgagtgtggcacataaaaattgaacacaccgaaacagttttaaaaagcataccaacgagtacacttcgaagtcgcaagaaaagtctggagaaagtcccgaaatagagataagatgcgagaattcgatgaagccacttctgatgccctggtcacttgaagacaaagttgtgtgaaagacatgttcgccgcatctgatcagcacaatgaagtaatagagactggtgtctgaagagaatgacttttaattcaagcgaagtaatcagcggtttttactcgaatggttttgggtaaatttggcaatgtattcacgggacaatctgatggcaattgcggaaaaagtcaacgtccctttcaggtcagtttctgttgccaaatagcgaccatttatgacattttcacgctctatcaacaaagcctttcgtctctccgtcgatatcagcaaagcccgttgagcatcaatctgaacaggcaataagacaaatttgaataatggccttcttatacttcttcacggctccctaggaatcgctcattttgtctacaaaaagccaatgcccttgatgcttgacagatttggtcttgttgaacgacgacggcctcatgaagtcgtttcaaaatagtctccctttccatatttgatctctgtgccatttgttgatttgcacttccatcgaaatgatcaatttttgtgtccgtttgtttcgaaatcactcccctttccaacgaaagatcggctctctgacgtttttccggaagcattgacaatgaatctaaaattgagaatttcttattgttttccactaaaaaattgatgccatattcaatccttgagaacagcagtccttttttctcattanaagtaagccactgaaaaatttactgaccatgtgatgaactgaatgctc

SEQ ID NO: 24727 - DNA, 1295 bp, Heterodera glycines
cagaaaaatggctatctctttttaggacaattttctatctcgtaaccccgatgctaatccgttccgcagagcctcttcaaaattttttccattaccgcaagagttgcggaaattgtgaattaattctcagaaaaatggctatctctttttaggacaattttctatctcgtaaccccgatgctaatccgttccgcagagcctcttcaaaattttttccattaccgcaagagttgcggaaattgtgaattaattctcagaaaaatggctatctctttttaggacaattttctatctcgtaaccccgatgctaatccgttccgcagagcctcttcaaaattttttccattaccgcaagagttgcggaaattgtgaattaattctcagaaaaatggctatctctttttaggacaattttctatctcgtaaccccgatgctaatccgttccgcagagcctcttcaaaattttttccattaccgcaagagctgcggaaattgtgaattaattctcagaaaaatggctatctctttttaggacaattttctatctcgtaaccccgatgctaatccgttccgcagagcctcttcaaaattttttccattaccgcaagagttgcggaaattgtgaattaattctcagaaaaatggctatctctttttaggacaattttctatctcgtaaccccgatgctaatccgttccgcagagcctcttcaaaattttttccattaccgcaagagctgcggaaattgtgaattaattctcagaaaaatggctatctctttttaggacaattttctatctcgtaaccccgatgctaatccgttccgcagagcctcttcaaaattttttccattaccgcaagagctgcggaaattgtgaattaattctcagaaaaatggctatctctttttaggacaattttctatctcgtaaccccgatgctaatccgttccgcagagcctcttcaaaattttttccattaccgcaagagctgcggaaattgtgaattaattctcagaaaaatggctatctctttttaggacaattttctatctcgtaaccccgatgctaatccgttccgcagagcctcttcaaaattttttccattaccgcaagagttgcggaaattgtgaattaattctcagaaaaatggctatctctttttaggacaattttctatctcgtaaccccgatgctaatccgttccgcagagcctcttcaaaattttttccattaccgcaagagctgcggaaattgtgaattaattctcagaaaaatggctatctctttttag

SEQ ID NO: 24728 - DNA, 1354 bp, Heterodera glycines
catatatatgtttcaaaaacaaaccccaaaatacgtgctaaaaacccccaaaaaagccaaaatatttgccaaaaactgaaaaaaactgcttaataaatacatgaattttgcataaaagtctcattttcatccatttcgctagcaaaatgcttattttcggattttttttctttaaaagttaaattttgccataaaaataaaaaaatcatgaaaaaggtcaaaaaataaaaaattttgaaaacttttaattttaccaagaatttgggtgccaaaaaaggaattttcttaaaaaaaaaattcaaaatattaaaaaaaatcgccaaaatatgtgctaaaaactgtcaaaccataaaaatatgtttttattcgccaaaagctcaaaatatgtttttatacatgctaaaaactcgctttcatgcgatggcatatgcgcaaaaaaacatgtaaaaacatataaatccgttccctggttattgaatatatattttttattgtgacgacgcgtttctagccaaattatagaaaatatttgttcattaatatctttatattttcataagggacattttgaactcattagacagcgacaaaaagttaaattggttttttctattaaatttccttgaaagttgcaaggaaattttgtggtacctattgtgccacctcacaattttatccatgtatgatagtgcctataacagggtttcggtctcaaaattttgaaaatcctcatttcagccataaaaatcctcatttgccactaaaatacctcaaaaaatactcatttggaatgaaaaatcctcatttttttaaacatcataaaattgcgaacaaatcagttaactgtcatatttttcgcttgaaacaatcaaattcatcaatttcttgtcatttataagcattttatggaagtctgagcacgaaagatccaaattgcacttcatctcttaaatttttttgcttttaaattgctctttttgtggcgcggtttcccaaaaaactttttgggaatattggggaagggggtccggcagtgccgataggcgctgccggaaaaaatttggaattttgagtgcgatttgttaacaaatttgtcaaaaaaatgattttggctgagcatttttcgaaaaaatgtttttaagatttgaagaaaaagttcgaatattttgccaaatatacctaatttaaaaaaaaaaatcatgcgtttttgtcacttttttatcaaaaaatcacaaaaatcctcaaatttctcaaaagaccacaaaaatacgcaaatcctcatttttcaaaaaaatcctgtttgaccctctaaaagaccacaaaatgagtaaaaatactcagatatcgaaaccct

SEQ ID NO: 24729 - DNA, 1167 bp, Heterodera glycines
aaaaaataattatgaaattaatttttgcaaaaaataaataaattagtgaacctttaaaaattcataggaaatttaaattcataggtactactgctaaatcaacgcagagacgcctttccttgacctttttaggctcctgcaaaacctggtgcacttctgatcactactcgtaaaattatgagtgattgaattttcactaaaaagttaagcctaaactttttgactgtttaaaaagtaattaaaaattttaaaaaattttaatcatcagagagccttatttaacttgtaaatagaatttggtgcgtttcagagcatttctgaaaaaaataattatgaattaatttttcaaaaaattggaaaagtacgcaatattgcaatgtctaaaatttttaaagaaacattatgggacagttaaataattatatgaataagcattcttctcagctgttaccctgcaaaacctggtgcgcttctgagcactactcgaaaaatgagtaaattaattttcactaaaaagttaagcctaaactttttggcttgtttaaagaggaattaaaaattttaaaaattttattcatcttcctttttgatagaaaaagcatcagagagccttatttaacatgtaaataaaatttggtgcgtttaagagcactttctgaaaaaataattatgaattaattttgcaaaaaataaataaattgtgaacctttaaaaattcataggaaatttaaattcataggtactactgctaaatcaacgcagagacgcctttccttgacctttttaggctcctgcaaaacctggtgcacttctgatcactactcgtaaaattatgagtgattgaattttcactaaaaagttaagcctaaactttttggcctgcttaaaaagtaattaaaaattttaaaaatttttaatcatcttcccttttgagaaaaagcatcattatttaacttgtaaatagaatttggtgcgtttaagagcactttctgaaaaaaataattatgaattaattttgcaaaaaattggaaaagtacgcaaaattgcaatgtctaaaatttttaaagaaatattatgggacagttaaataattatatgaataagcattcttctcagctgttaccctgcaaatcctggtgcgcttctgagcactactcgaaaaatgag

SEQ ID NO: 24730 - DNA, 1284 bp, Heterodera glycines
  unsure (1)..(1284): unsure at all n locations
ttttattttttttctatctcttctctgaaaggagttataacaatttttcacaccagttttgcattaccagacacattctaaaatttctaattagtatagtagtccaagcctattattatttttttgactagtctctgaatggggttatcccagttttagtatcctttttgaaaaacaaaaaattttaataactgatacggtagcccaacatccattgccncaatgtacccttcggtttgtcaacgggagctaacaattgatgagtttgtttggtttcttttttaagcaattttccgtcattgctcaccaactgttaggcgtacagcaacggcggcacttgcatccgatgcagctgttcacgggctctctaaccctatttttattttttttctatctctctctgaaaggagttataacaatttttcacaacagttttgcatttaacagacacattctaaaatttctaattagtatagtagtccaagcctattattattttttttgactagtctctgaatggggttatcccagttttagtatcctttttgaaaaacaaaaattttaataactgatacggtagcccaacatccattgccccaatgtacccttcggtttgtcaacgggagctaacaattgatgagtttgtttggtttcttttttaagcaattttccgtcattgctcaccaactgttaggcgtacagcaacggcggcacttgcatccgatgcagctgttcacgggctctctaaccctatttttattttttttctatctcttctctgaaaggagttataacaatttttcacaacagttttgcatttaacagacacattctaaaatttctaattagtatagtagtccaagcctattattattttttttgactagtctctgaatggggttatcccagttttagtatcctttttgaaaaacaaaaattttaataactgatacggtagcccaacatccattgccccaatgtacccttcggtttgccaacgggagctaacaattgatgagtttgtttggtttcttttttaagcaattttccgtcattgctcaccaactgttaggcgtacagcaacggcggcacttgcatccgatgcagctgttcacgggctctctaaccctatttttattttttttctatctcttctctgaaaaggagtataaaaatttttcacaacagttttgcatttaacagacacattctaaaatttctaattagtatagtagtccacctctattattattttttgtgtatactctctgagtggggatatcc

SEQ ID NO: 24731 - DNA, 1528 bp, Heterodera glycines
  unsure (1)..(1528): unsure at all n locations
ctctctctctctctctttatctctctctcactctctctccccctctttctctctctatctctctctctatctctctttatctctctctctctctctctctctttatctctacaccaggggtgggcgtaattacggattacggaaattatggcctttttggaccccgtcatgatggattacggcttacggatttttgggatttttcagtaattttaatccgtaattgggtttttggattatttttcgagacgatttcctgcaagattatttttttataaaacaattttttctgtttttatttaaagggctaccgtatttcatgatttatttaagaaaaaattcacttattcttgataatttgtagtattattaaggctacaccctaatttgttttagcctacaaagtagggcgtattttgtaaatttaaaactaatgtagttttggtaactttttgctccatttgcttgtttatatgcgtggtctagtgggttgtgctcttggtattttattcatttttgcgttgatcagttccccttcaagtagttatttttcttctaattttcaaatttattcttttttcggtgtgaattaaatcacaattttaacaattaaaatcataaaatattgttatttttggactaaatttgttcacaaattgcaattaaaaattcaaaattttccccggcggcacctatcggcaccgccggcaccccaaacctcatttttataaaatgttggctcaaaaccgcaaaaattcggacattttttgggctaaatctgttaacaaattgcactcaaattttcaaaattttgccaggcggcgcctatcgacaccgccggagttccaaaattccctttattttttaaattgctcaaaaaccgcgaaaacaaattgcgtttttggattgattatggtacctaattgaatcataattaaaaaaacaaacaaaaatttgttaagaaatacgcaaaaaatttttttaaccatttttaagcgaataagaaaattttttgaaaaaagtctcgggtttttggtctcggggttttgggcttggtctcgagtcccggggtcgagtctcggtctcggtctcgagtcccgggaaatttttggtctcggacagcactaccattttgacgcaaaatcttttacaaattgcacttaaatcttcaaaattttcctctatggcgtctatccgcactttcggtcacgccaaatctttttaatatgcttttaaattgcttataaaattattgaatttttaaaataaaaatttgaaaattattttaaaaaaattaaaattttgaaaattacggattacgggttacggattacggaaaattacggggttttttgacccccgtcatgacggattacggaattccgtaattgagaaaatcgctgtaattacggattacggatttccgtaattgaaaatccagttacgcccagtcctactctacactctcctcctccaacccaccttaactagagntcggaaatttcaaatttttggatcccgcccgcta

SEQ ID NO: 24732 - DNA, 1408 bp, Heterodera glycines
gggacgggggtgaggccaaaaaacctgtcccgcccccggcgggggcgggggtgacggggtccgaaccctattaattatagacacaaaaagaaattccgcacttttgaattaaactgatgattttctccactcacaaatcagtgatcagttggccaactcttgcattattcgtcgactattacttttaattatcatgctgtcttttaaactcttttgatattgagccgtcggtcttcgaatcgaaacgacggctctccgtctgacctaaaaaacaaaaatattttcaactgatcgacggaagcgcgaagtgatcaaaatgccaatttttgtcaaattcaaatttagagaggaatatatcgtcgtcctattttatatgggtgattacaagggcgtagggctgacgccccccccccccgaaacccaaaaagtaaaaaattttcagtaaatttttttgaaatttttaagcaattttcttaacaaaattgcattaaaatactcaaaaattttcccggcggcgcctaccggcaccgccggattttagcgttttggcatctaaaatagtttacaacctattttggcatttttcgaatttttagcacctattttgggatgttcccagaaatttcatagtaaaaatgcaataaaaacaaaaatacaccccctaagaatcgatcccaaaaaatttaaaaaatatacccctaaaaattgaccaaaatttcagaaaatattcccctaagaaatgaaaaattaattttctcaaaaattcgtctccaaaatttatttatttattttcttgaccagttgcaattgtgcgggcgaaattgataaaaaattagtcacattttgaattttttacataaaaacactggatttttcaatttttaacacctattttggcctttttggggctttttagcacctattttgcacttttttagcacctattttagtacctattttaggatttttagcacccaaaaatcccagccctaattatatgtgcatggctgatcgctgtctgtattgcaacataaatataaagacaaaaaacaaatcgggaagcatccgttgttttcctcggtcgtttcgtaatcgcctacggtggagaaaaaaaagaaaaatggcaaatacataaaaaataaaatcaatggcataaaaataaaacaccaatgcattcaaaaaagaaaaaacattttcattattttttgccattttatacaagggcgtagccagacccttggctttgggggggggggtgaagtcaaaaattcgattattaggggtgtatttttcttttttcagtcgatttttaggggtgtatttttcttttttcagtcgatttttaggggtgtatttttgttttttttaaatcccgaattagggggtgtattttacaaaaattttcgcc

SEQ ID NO: 24733 - DNA, 514 bp, Heterodera glycines
taatcccatcggctggtgctgctcgaaaatcagctactctgccgttcccacatttcatcttcttccaccaattttcgcacaaaagaactgagtcgtgtgttgcctttgagatgtgagttccaaatgccgtgccatccctcaaccaaacaacaattttaaataatacgcactcgaaaacctcgaatgaattatttgtgcgaccgtgaccctcagcgatacggtcgaccatattccacagaggggggaaaagagcattgcatacaaatgtattatagttcatatgaaattataattagttcatatcacttgcgtttttgaatttattttaatttttgataggtaaattttttttaaaaattatttctcactgacgaaatcacttactgacgaaatcacttctgacgaaatcacttctgacgaaatcaaccactgacgaaatcacttctgacgaaatcacttctgacgaaatcaaccactgacgaaatcacttctgacgaaatcacatggcaccgat

SEQ ID NO: 24734 - DNA, 1024 bp, Heterodera glycines
aataccgcgcgatttgcacggcgaatttgcaattgtccagcagtgtttagcatttttgttgtggacgccattttacgattggaccggtataaaatgatgaaaaacgaaatgccactgattgtgttcaaaatggcacaaaatgcccgccagccgaggtacaattggacggaagtgccaagaatgcatccaaaaatttcacattctaatcttttaaaaatgaattattaggaccaatcggtaaataaatttaaatttctatctaaacatgccaatcttttggttttcattaaaaattttaattttactattttataaaataagtgagaaataaatatattggtgatatttctgataaattgttgatgatttcattaattgtggatgaattattaataaattaaacaaactttcacttataaattaaaccatttttattttaaaaatttgcaagaaaattggagtttgcgacggaacaattaagaaaattaagaaacaatttaagtggtagcatttttttattactacaatttataatacggacgaataaaaatatttcggtatttttacgtactaattccaaaagttttctttatttcttttccatttcttatatcatattatcactcatttttggattttctctttttatttgcgaataaactttcatttttcccattttttcattctccgttattcttttcttgctaatgccaaattgtttcttccatctgttaattgttccatggcttactcggattttcttacaaatttcggcataattttgtttccattctttttcagaatattttcttttttgcttatattcatttgacattttaataaatttttgcacaattacaattttttcttcatcactttttgatttatagcttttatgtatttgtttttgaagaccaaattctttaatccatttataaattttgtgtcgatttgtcccccaatttcttcgctatttttgagttaattttatcccattcttttgttgagtattttcttccttttt

SEQ ID NO: 24735 - DNA, 1864 bp, Heterodera glycines
tcaaaaaattattcgaattctccaattttgtttccataattcgcgaatgttattcggtatcataatgccaaaccaaaacgaattcgttataagatattcttttctggactttgacttggtctctcaatatcgaagcttttctctccgcaatttctaaaacgcttataccaaaccctagatttttggttccgatcggtttcagaaaaaatcccttgtggtgcaaacatatttcacatttcacttcataattttttgagttctgcacggatcgagaccgggataagaccattggaaagagcagctcgagctctacaagaagctatagaaagaaaaaatcgacatttcagggacttttcagaaatcatgtttaattccccaatggggccccattttgggtcctcagctacagccccatgcttctcccaattttaagtcttggatttgtcaaataaattaaagatttcgaattaataataaaaaattctattataaatttttttttgtagagggaaaaattctgaaccaaactactattttgaaacccaatcaaaactgggaaaaaatttgaagtcaaaaaattattcgaattctccaattttgtttccataatttccgaatgttattcggtatcataatgccaaaccaaacgaattcgttttaagatattcttttctggacttgacttggtttctcaatatcgaagcttttttctccgcaatttctaaaacgcttataccaaaccctagatttttggttccgatgggtttcagaaaaaatcccttgtggtgcaaacatatttcacatttcacttcataactttttgagttctgcacggatcgagaccgggatatgaccattggaaagagcagctcgagctctacaagaagctatggaaagaaaaaatcgacatttcagggacttttcagaaatcatgtttaattccccaatggggccccattttgggtcctcagctacagccccatgcttctcccaattgtggcgaaaacaatatttcacatttcacttcataactttttgagttctgcacggatcgagaccgggataagaccattggaaagagcagctcgagctctacaagaagctatagaaagaaaaaatcgacatttcagggacttttcagaaatcatgtttaattccccaatggggccccattttgggtcctcagctacagccccatgcttctcccaattttaagtcttggatttgtcaaataaattaaagatttcgaattaataataaaaaattctattataaatttttttttgtagagggaaaaattctgaaccaaactactattttaaaacccaatcaaaactgggaaaaaatttgaagtcaaaaaattaatcgaattctccaattttgtttccataatttccgaatgttattcggtatcataaagccaaaccaaaacgaattcgttttaagctattcttttctggacttgacttggtttctcaatatcgaagcttttttctccgcaatttctaaaacgcttataccaaaccctagatttttggttccgatcggtttcagaaaaaatcccttgtggtgcaaacatatttcacatttcacttcataactttttgagttctgcacggatcgagaccgggataagaccattggaaagagcagctcgagctctacaagaagctatggaaagaaaaaatcgacatttcagggacttttcagaaatcatgtttaattccccaatggggccccattttgggtcctcagctacagccccatgcttctcccaattgtggcgaaaacaatatttcacatttcacttcataactttttgagagaaggacggatcgagaccgggataagaccatggaaagag

SEQ ID NO: 24736 - DNA, 996 bp, Heterodera glycines
ttttctgctgtaacgaccagcaaccaccgttttttctcgccaacaatgttcttttactgtgcgttcgcaaaccgccaaccatcatggtcaaatgaccaggttagatgaccatgaacccgtggttgctcatttgctacgggtaaaccatgatggttgtggttatttaaccataaccaccttctttgactacggccccagctaataagggaaaaatgcattttttggcaagacttgagaaagcaaaaagtatatttccaaaacaatattttcataatagtcttatcattttctgatttttcctcccgtcactaattacgcctttgtcgccaataagggggaaataattgtggcgattactccgccaaaatcgaaatcacgcactttgaatagtcagccccttcggctttttgggctcctccgctgtgtcctccagcacatgttcctgccgcactgccggttccgttgtttcaccattttccgcttcggtcgccgttgctggcggtgccaattccgcgacgaccactcgcgtgccaaagtcagtgttgccctccggcggcggcgtcgacgacaccaaaaacaatggcaaattggcgtccaaatggccttgggcaattgcgcgacgaatgactaaaataactcatgccaatacaccacggagatgcttaatctaacgctaacaaataaaactagagcaataagaacccataaaatcagccaacacggacttttttaataatttccaatctcggttttttacttcaaaactcaaacttaattaattattcgtttatttcgtatattgcttaattttcgatatagataaattcaaataaaaaataattttaatatttgtttaaaaatgaccaatcgggtttagttttagttagtttggaatgttcagattataaataaaaattaaaaatattgatgtacttgtaaaataagatcgtttttcgtagaataaaaaggaaagtcaaaaaatacaataattaattt

SEQ ID NO: 24737 - DNA, 2032 bp, Heterodera glycines
  unsure (1)..(2032): unsure at all n locations
cagacatttttcaacatatgttactcctctgaatatcccttaaatattttagataaagttttctttaatatgaaatcttggtttagattaattattattttgtatttttattttacatttagagtcgaaattccgatttcagaaaaaaagtcgctctgattcttttaagtaattaattaaaaattgatttgaggtatttttcaggagtattttcaaaagaaaatttttacaagaaatttctataaattttcaaaagttctcaaaaatatgtataaaaaatatgcaaaatttgtcgaaatttggatttttgaggattaccaaaaatttccgaaaaaaatcttaaatatttataaaaatgaagattaagaaaaagtcaaatatgtagcatcagagatgaatatgattcgataattaaaattaatgattagtttgactaactgtatttatttttaaatctcacgtgctaaagataccgaaagaggccaacaggaaaattttcagtatttatgatttcctcaatttataaattgaataaattttcattcatcacattagtatgaataaaaaattttatcataattttcggaaaattaatttacataaaatcttatttataattttgtatatgatttttcacttttattcaaaaataattgttaccccatatcaaggtgatatttaataaatatgtttaatttattttaatctactaattttatattttaattagctatattccaaaacggaaaaccttaagccggaaaataataaatacaaaaataaaatattgttttttgtaaaaatataaagttgaactcttaaaaacaaagtgttccataaagaatcaattaaataataagattaagatacaataaaaaaccgaacaggcgttggagaatataatgagcatacttatttaccgcagtgaacgatttgtaaggatattgaaatttaaaaattaaaaaaatatttaattaacagaggtaaatttaattaataaagaaatttttacatatttagtcacataaaaagctatttaaataaatgaacgaatttaaaattaaatctattggatatcaggcaataaaaagaattatattcaagaattatagtaacttattataaaacaaattaaatgaataatttaagcaaacacctaaacaaaaacttaaaagaaaatcacataaattattttttaacaagtcttaataagcaatttaaaaaaatcgaagataatatttgttgtagaactcaaataaagccaaaatgaatcaatgctaaaaactacaagtacaaacattttctaattcagtttattttcaaccaatagcgtataaaattcccacaatacaccccaaagaatcgactaaaaatttttcaaaaaaatatccctaagtatcgctcctaaatttaaaaaaaatacacataaaaaatgaaatcaatctacaaaattttggccaataaccgaatatcagcagttcgtccccttccaacaaaattttatttgtattaagttgaatatttattcactgggccggtttggcattttacggcaaaaagagcaaaatttgtgtcttttcgaaaggtattttaataattataaaaagatttaataaaaatgaaatcatcaataaattaaataatgacattagcttatcgaataattgtcggaatttccattccgatcgccaatcaatgatcggcgaattaagagggagggcgccccttcaccaactccccccgccgcgcgacgggttttaaccgttccatccctctgtccctcttccattcaaattgttaattgtttttctgtgttcctccttcgcaccgcgcacaaattaatcaacaattcattaaaccgcaacttttcgcccccgtccccaatttggcgaatgcgactccaaagaacgatgaacgcccaaatttcccgtttatcgccaattnntgtcattcgnntcatttgtgcactgtttttcatttcatggtacatttttcggccccatttcngtctgctcattttttgcacttttta

SEQ ID NO: 24738 - DNA, 1106 bp, Heterodera glycines
caaaaatatttcaccaaaagagtattttttaaatgcggccttccgccaattccataccaaaatcgattagaatacctgcaactgccaacacttgagaataggcgaaagctgtttgatctgttcatggcgcataaaattgtttatggccgaacagatctgaaactattatctatttttaatccctcaacgcgctttaacatccccttttacagatttaacacaaaatataaactgggcaaaatattcattccctttgctgggagggtaacaaaattgtggaataaacttgacaaagaactaataaaaacaaattccttgaatcaatttaaaacaaaacataaaaattcattagggtaataaccggaaaagcaaaaacagaattaatttttaagtgatttggcatttatactgtcgatctcaattgactttgacctcattttattaatatattttgattttatttttggtcatccatatatttatcacttactctacgacatattatctgaacagtcgtcagagtaagtggttttgcccttctgataactttttttttattcatgaataaataaatacgtaatgtgttttatgaatatatagtccatgaaagttctgcaaaaagcgagaagaatgtaaagcaaaaggcataaacccgtgatcaaaaaagagaacaaagttcaaaagcattgattagaattgaaaagcaaaaaaggcgaaagaagggagagaaagagagtgggattcattcgcaaaataacgttaatccgcgacaccgtatttccaggcgcgaagaatgtgctcaaacactcgttgcgcgacgtgtttagcaccgaattgcacaattttgcctttgacattggcatctttggaagagaaaaacaaaaacccccttttctccttcttcagcctgagcttaatgcctaaaaatggaatcatatggacattcttatgtttaattgccaaccaaatttcccatttgagcccactcgagtcggccttttgagttcggcgtatttcgggttccaagttgcattccaattacccgttagtttgtgttgccgagcctcaatgatgtgcctaagaatgaatgggttgtggtacacttt

SEQ ID NO: 24739 - DNA, 1127 bp, Heterodera glycines
cccccccccccccatcagaaagcccagctggtggaccagtgcaaattcgaatgtgaccaaattgcggtgcccggcggcgtgtatttggccgattggacattggccattctgtccgcccaacaccaaaccgttcacatggtcggcattgaccggcacagcgggcactttgtgccgttgatgcaaattgggcacagtgtgcttgccgacgaccagctgatcagcggggcggcacagctgatcagtgcgcggacggagcgctgcttcaccggtagcaaatgaaaatatattaaaatatttatctttaactaaattaaaaatgccgagagagggcagttgtatatatatacatcatctgtcattctttttttgtttgacaattctctttaaaaatttttgcggcactaataaaaaatataatctgagcctaaaaaatggattttgaagaccatttatcatacataaaaaagggggggggggtggggtcggaaaaattttttgcaaaggggggtcggccgccgatgaccttttttttttgcttttcaaaaagcgtctttcggcgcgctttttccaaaaaaatgtataccatttatgaaaacccccaaaattttggtatttcaaaatgaaatgcattaaatgtgcaaatttttagtcgttttatacttttttgacgtctcaaaaacaatttgtcatttgtcaatgctcttttattcgcacaccaattgttggcgagatcattttccgatcactttgcacctgatcaactcgttttagtttaatctaatcatttttcgaacaaatttccgtttcccattttttaattaaaatgtaattaatttatttttgctcttttttttgcagcattccgtcagcgttttctcacctttctgtacagagagttccaacggaagggccaaatccaacagtttttgcaccatttcgacctctttcgacatgtcaaaatgcgcaagctgcaatttgttgggcccgagctgctgctgattcgaatggagcagccgaagggcgacagtaaggggaaacgaaaacgattttcatgtcctagtggtctgtggcgttggccaccaaaatgagggagattgggttccagtccccttcacgttgctcgcaga

SEQ ID NO: 24740 - DNA, 1087 bp, Heterodera glycines
acaatgactatcattatagacaggacgattttgccactctcactagaaatcccaaacattttgctgcgaatggactcactcccttgctcccattgttcagacagagtcttaccgtgtcctcacttttaagttggaatgtgagttcactttctcttgcgaaattggcgtcgtaaaactggccaataaagtcagacacattcactagggcaaggtgaagaaaggaatggcgagcataagtcggtgccaatgacagattaaggctgaaaccgtcaatgcgattggcattcacctgtttgacctgagcatcgatttgatcaacttcataaagagaaccacgcacaaaaatgagctgtttgcggtattctgagcatggtgccagtctcgcgtcggagctcaaaatcattgtccttgggtcaataaatgccattcttttgttgtccttcactcggaatttaattggaattttgtcaaagcattcgaattcggagtccgctgagttcccaattttggcaaatttgtagtcatgtgcttgcaattcgatgcatggccacactttaatcaattcgggcccggccacttttgccaccagtttaccagattggaataattttctggcaaaagttgttggatctgagagaagtgccgtcgctgcccatcttctcgtctccaacatataatcacaaatcgatttaattgtctgagaaaaggaaagagtcagcatttctcttacttgttcatccaaatagcccaatttggagttcatttccgattcggtgacccaactttcaagtgatctcgtctttctgcttctctttgaggatttgttgctatcgtcggaaggcaagtcttgtacagcaaatccttcctccgattttatcaaattcagaccacatgagttgactttctttgtgttgttcaaaaatgtcaaacgaaaactgacctcatccgaaatccaaatattgtcaagttgtagtcctttccatgtgccaattttcgaaaattcacatgcacgagtagtgttggtgtcccacataagcaatgtcttgtcttccatctcacattggcctgccttgaattggcaattgtt

SEQ ID NO: 24741 - DNA, 934 bp, Heterodera glycines
acgcttgcgcaattgttcattttcggcacgcagtcgcgtcatttcgttgttgaagtcggttaattttttttgcgtagatttcaacagcttctccaccatgtccatccgtgtgaccttctcgttggattcatccagctcacgctgcaacactttgttgtgttcctccaacttcttcaccttgtccaacagttcctgtgaaagaaaatggaggattaaaatgcacaaagggaaggattggattatcaatgatcaatttgcatgttttttgatcagtgatcacgttgatcagagttaatgaactcaattttccaggttatttgatcaaaaccaatttgtaatatcagtataagtccaaattattcctatggtagcacgttcgaccacttaatcaagttcagtttgtgtttgtgttgttccccacctgcttctccttcatcaattggtccattcggcgacgcaaactgttgtccgccccggcaccgccgccctctccggcaccaaccgctgcacggattgcagaaagtgcgccagcagcaattgccccaggtacagtgccggacaaagttggcgggacaggagaacgcggctccccagcagctgaagtgtctgcagacaaagcggcggcggtggtttccagcgctgaagcggcggactgttcacggagacgcaccaattcctcgtttttgctcttcaaatcggcctaaaaatggaatttaaaaagaaaaaaaacttttaatttctaaaaaattgtccacctccaactccttcttctccaactccaatttgttgcgctcatcgcggaatttgcgtgcaaacgttttgacagccgacaattcggaagtgagcttgtcactcttcgttttcagttcagccaactcggtgctaaaatatttaaaaaatggtgccaaaataaatcattcaaaaaacaaaaacc

SEQ ID NO: 24742 - DNA, 1002 bp, Heterodera glycines
tttttcagtgtccgttgtggggtactcaaacaattatcggggagcaaaaatccaacgcagaattaaagtacaggctatagggaagctattcccgaaggattcggtctccccataaatctgggcgcatcggttcggggggactgccccgaaaacaaaaaaatcgattttttcaagtgtccgtttggggtactcaaacaattatggggagcaaaaatccaacgcagaattaaagtacaggctatagggaagctattcccgaaggattcggtctccccataaatctgggcgcatcggttcggggggactgccccgaaaacaaaaataaatcgattttttcaagtgtccgtttggggtactcaaacaattatggggagcaaaaatccaacgcagaattaaagtacaggctatagggaagctattccggaaggattcggtctccccataaatctgggcgcatcggttcggggggactgccccgaaaacaaaaaaatcgattttttcaagtgtccgtttggggtactcaaacaattatggggagcaaaactccaacgcagaattaaagtacagactatagggaagctattcccgaaggattcggtctccccataaatctgggcgcatcggttcagggggactgccccgaaaacccaaaaaaaaattttttggataaaaattatttaaatgaactgactagataatatttaaaataggttatttctcttcctttcagtatccctgcaaagtttggtgcgcttctgataagtttctgaaaaaaaagttaagcctaaactttttggcctgtttaaaaaggaattaaaaatttttaaaaattttattcatctccctttttgatagaaaaagcatcagagtgcctaaactaacatgtaaataaaatctggtgcgtttcagaaccctttctgaaaaatatttaagaattaattttgcaaaaaataataaaacgaaagactcagattttcgaaaattttttgagcagctagctcg

SEQ ID NO: 24743 - DNA, 639 bp, Heterodera glycines
gtctgcagcaattcaaataaccactgatctgccccccgcctaccctcagaggtcaatgttttccctctgccctctcgaattttcatcccctcctctcttccctacccctgccggctaaccccaaagtccactcccaccaaagcggatcggcccgaccagtgctaatttgggatgctaaagcgccctgatgagctgggccggaccattattctccctccgccgattgtttgtgaatgatgaagctctctctcacacaccgcaagggtcccttccccccccccctcccctcccctccccccgttccaggctgatagtctgcccaaccaaataacctctcaaatttcccattaaatttaaaaaacgcgctgaaattaataacaaaatgaaaattttaaaaagaatttttaaagaatgaatgaaaggcaataaaaaaaacaactgcacattatgagacatcgaaaaatgaccacaatttccttacaattagcaaagagaaaaggacacagcccaattgagaagatgggtcaaccacaagcacataatctcacaagatcctcccttggacagcggagaaggtcaatagcaattggaatgatcgaatgagacgaccaaacaatgggaaagggggggggaggggga

SEQ ID NO: 24744 - DNA, 981 bp, Heterodera glycines
ttatgctaaatgatttacagttccttctggcgttttgacaatggaggaatttgtcggaatttatcagttccattgccatccaaacttttccggcgtttccgggctttatccgcttcaattttcaagccgtgggcgcatttctgaccggaagaaagggcgacttatgttggacattgaaaaattttctgaatttgcgcaattatctgctgggagttgcaagcgattcctcgaggactatgtgtacattgggggactcccgtggataataatggcaaaaataaatacgcaaattgaaagcactgaaaaatggatggactttttcctatggtgcattggtccaaaacaaggtcggattgaaatgtgaaattatgaacagggaacggatttatatgtttttacatatttttttgcgcatatgctatcgcatgaaaagctcaaaaatagcatttttacctgttttcctttcaaacagagcgtgttttagcattgtgctagcgaaattgataaaaaacgagacttttttgagaaattaacttattttttgaccagtttttcttcatgttttggcacatattttggcctttttggggtttttaggacatattttgagggtttttttggcacatatatatatgtacatatttggcgttttttagcacatataaatcgttccctgattatgaaatatttaattaaattaaaattttaaattatgaattatttattcacactatgacaataattagggtttcaaaaaattttcattttattataaactttttatttattgataaatagggcttccttttttaggcacaaaaaatcgcgaaataggcattaaaataggcaaataaaaattttgtattaacgtttttaggtaacaaaacacgttaaaacttaaatatttcaattgaaatgaaatataaaatattttaaagttttttttccaatatgaacaaatttttaaaccaaaaaattttt

SEQ ID NO: 24745 - DNA, 937 bp, Heterodera glycines
ctaacgacgaaggaaacgagaaaatgaagaagcgatgacaatgaatggcaccaccattccccaaaatttgtgagggagagaagagaattacgtggaaaatgccaaatattaattagtgagaggcacacaaccaatatgatgtaagtaataggaggggggggggaaatttgaaaggaaaaaaacgaaaattcgtgaaaattcgaagccttacccccgtaatgggaaagagaagagagctgtccttttaaaatttgaagaaatggcctcttcaaaaactgaacattttgctaaatggccaattgaaagcagagagggtagaggagagaaatttatgaaagactaaacaaaaaattcgaagaaaaaatacccctttgaaatttcaaaaaaaagttcataacccctccaatacgttccggggggatggatacaaacgacagatatttgttggctcattaggcaatggcccgttaattcgtcttaaaaatttggaagggccaaaaggaaggaccacgggaaaagagaacaaaggcaaaaagagttacataatgtcatatatatatgcatatgtatttgcacaaaaagtattctcttcgccatttttgtcaagcgtttgaaaatattaaaaattattaattattattaattatcccccacgggtgtccccccgcgttataaatggaaccaccaaaccagcaacaggggtagcagcaggaggggagaaagaataacagagatgaaaaaagtagaagaatgtgtccccccattcccccgccccgtcccaatgcaaacggaccccagaaaaatactggtatgtggatgggtaaataaaaaaatatttttagggcggggagtcccctgcccccccccccccccgggcgatgccggtgtgacccctcgagggttcgttgttcccaccttttaaggtgggcggcggggg

SEQ ID NO: 24746 - DNA, 838 bp, Heterodera glycines
atgccttttaataaaggcaagtttaaagataaaaatacttcctgaaaaatttatgcaatataaacaaatttcagtggtgcataaatcaatgccttttgttgtttttaatatcgcacgaatttctttcataacaattttttgaaagttactttcgtttcaaaaaaaacacattttttcattcgaaaaagcattatttttcggaaagacattctcaaataatataatagactagcgcaggcgcgctcgcttcgctcgcgcaccccgcgctagtcaaaatttaaaaagtttatcttattcctataaatgtttctcttcctctctttctctctctccctctctttcccccatccccctccctatctctttgtcgctcttttttcttctttctctctttctctctctctctctctcttccccactcttctccttctctgtttctccttttctctctttctccccccatccttttctatcttctctctaacttttttattctctctcacccttctctcttcctttctccatcttctccattttttcttctctcactcccatctcacatcctctctcccacctctctctattccccactctctcttttctctctctctctcgtattctcccacctctctctttctctttttcgccaagaggccatggtcaagcggaggcactgacatatacaacatcccaaagacatcaccggcaaaaacaaaatggggaggaggacagaggcgcgagcggaaaaaatatgagaggaaatctgaaaatgggggcaaatggacggaacgcggcaaaattattttccaaaaaccatcgaatttgggggaaaaaaaaa

SEQ ID NO: 24747 - DNA, 1210 bp, Heterodera glycines
  unsure (1)..(1210): unsure at all n locations
aatcattcgtttcattgcgtcatcagctcgttaaacatcaattcattcgccattttactgtttctgttctcacagtccgcaaactaaaagcagcatttccctgtttcttctgtttcagccgatcagaatttgttgatgttgttttttgtatagttttttttgattttggcgatttttttggcatttatcgcatcggcggaaacattccaatgagtgcggcttcagcttcatcaacagttgcattttgtggcgaaaaaaggtgctgtctatagggtttcattttaattgttgaaaatataaattgataaaaattccaattgtgatttctgatcaaacatttttgtccattttataattttataatgtccaaaattagaaaatgtccttcttccttttactaatgttcttttttcgcttattttcacacaataactgacgaaaacacctttgcacgcaatttttttactaattgttaaaattaataataatcatttgacaaacctttttccccaatcaattacatttttattaaattcataacaaacaaattcaatttgtttaaatctaattatctaactaattactatttagtataagaaatcattatcataaaaatgaaaagatttataggtcaataatagtttcatcaatttgattttatttttcgatttatattttctataaatttatttgtgctaaatattttctttattttttcatcaaatggccccaaatttcgccttctcaatgctccgtcgaactgcttgaacagtcgaaacagcaaaggccgccaaaacatccggaacaacagccgacttcgtcctcctccccctcctcatcatcggcttaaaagcgatttaaatattatgaaacaataaattatttattatttttataagtgtttaattactagtaatgaataattaccactaattagtctaacaatttattaataattttttttttgggtctttcgttgacctgcagttgatgaattgaatgagtatgacggatttatggactggtaatgcgatgattgtggcagttctcaaatgcattttaataaataaaaaaaattaattaattttagggccatgtcatttaagcttttactcttatggatttgaaataaatggaaattcttttgttanatatcaattttttggcttttatnttgaatctaaaactaagattntcaaacacatattcc

SEQ ID NO: 24748 - DNA, 1491 bp, Heterodera glycines
  unsure (1)..(1491): unsure at all n locations
taaaaaaaaattatcggtattaagcgtttttttgtgcagtcaaccccattttccgactcattttttagcaaatttttagttttgaactttctttagaagtancatagtcttgttagtaaaaaataatattgattttccactgttgttggattaaattacccccgcccctttttgtgtgtatccgtttcaccgtttgaatgcctttgtcaatgctcacatgcgatgccatcgtccatcacaggccggcatcgatggcgccaaaacgcctgctgaacagtccacaatttacattaaaaaattcgctgaaatttaaaattggacgctgatctgatttttttgggggaacaggcggagtccggcggtgccgaaaagtgccgtttttgagggaccggatcccactcactgcatggacggtaaaaaaacaaaaaaaaaatttgtcaaacatttttttatggataattatagaatctggccttctgttactttttctttttatgtttcaattgtatgtactacagtcatagtcatatgtttagcatcagtgctaataattggctaaaattttataaatttatccataaaatcttttaacagagaaaaatgccacgtatatgataccgatcgatagtatattcaagcggctttcaaattataccaaaaaggtgcaaatccattaccttcagctaatatgcgatcaggcaaattgtaccttggtaacccaacttttgatactgatcaaaaaattttttttataccaacttgatcagaccactccttcatggtgatctgaaaagccaaaaatggcttgaaacccggaaaattttcgaaaaaaattacaagaggtttgaggattttttttttggtaattttgagtaggcccattggaacgagcactgaattatctaccgaattgacttttgttttttttaattcagcacaatttggagcgcaaaaccgtgagagtttcaatgtttagatttattttggaattgacatttaaagttaaatcttcagcaaacattttaattaatttattcaattttacatttagataattgacttttttaaattttccagaaattaaattgtcagttttttataataattatgaagtttttgaatgaaaaagaaataataaaatataattaatcgtttaatttaatattattttgtatatattctttggcacttttagaacacaaatgctttttgttatttcaaaaacattttatctttttattatgctttacatgtcaactttttgccatttgtcatctgattaatcgtagaaaatgcactttaaataagttttttttcaaaataattttagtgttcatttgacggatggcagtggtggattcaaagaaatacaaattcatactttggcacaatgccatgccaataatggaccaaaagaaaatgtatttaagccttacggaattgaatttcgtctgactcggcaatgcggaaattgcgaggatgggtgaaaaa

SEQ ID NO: 24749 - DNA, 988 bp, Heterodera glycines
attgcaaatttgcccaccattttttaggttggcgttgtcgtcaaacatcgccataatccttttttgaggtgccaatgcctttgtctcatgtctcatgatttccttttcagtgcccgaattcaaaagttaggtttccgcatgtgcaaactgatgttcgaaatggaagtccgtgcccacatggattcggtggcggtccgtgcctcccccacggctgtcagttttctgaccgaattcaatgccaaactcgcggaacaacagcagggaaaggtcggtccgtacaattcatacatattcaattttgcataaatcaagcagaaccaaccaaacgaggaaaacgaccgtacggcattgcgcgaataccccaactattgggatcagaaacggattgaccggtccgtctattggtggttcagaccgatgaagagcaccagcggaacggacgcgataaacatgacgaaattgtcgaacaatttgcgcaaagcggcggaattgaagcggaaattttcggaaatggtttgtctgtccatttggtcgcccattgaggaaagctttcggttttctgccactttttaggccgaattttcaatccgtcactgtctgatcactgtggaagccggggttcgtgatgttacgcggccaatgattttgattgaaagttctgtcaccggtactgctcggaattggtccagcacattgactgcggtacgaactcacgcaaaatcatttctgataattccgttgaattttcagaaatgtgagactcatctgattgtctcctatttcaatgaattattcaacgtttgggagccggtcattgaacccgttttgcacaaggacaaaggctggcaaaactggaaattggcattgaaagtgctttctttcttccattagcttgtcacatacgtgtgcaagggggggggggggggtcatagaaaagggtcgtgcgtttcggcgatgcccccccccccctcccctaaggggggggggg

SEQ ID NO: 24750 - DNA, 867 bp, Heterodera glycines
tttttttttatgggcatgccctaaataaagaaatacaaaaaaaatcaaaaatgtttcaattttgtacaaaatgatgatgaaatcatgtgactatcacgcgaccccaatttttgcactcggggaaaaaatgaagcaagcaaaaaccacgtgttttgggcttctcagcttgaataattttctcgcccactcatccaaaggatgggaagtgaaatttggcaacaaaaaaaaggtggcattttttgttggccatttttgcatggaaataatggcactcttacatatacatatatgtccttttgtcagtttttttttacaaacttaccgatttttcagggttttccctgatttatttaagggggaggggagggaggtggggtatgttcaaagcacaatttgtactgtaagaaatgggtctaaaaattgtatcggtcaattttcaaatttatagaaattttcaaaagaaaaatcatccccgggcaagggcgtagccagagccttggcttcaggagggctgaagtcaaaaattcgatttctaggggtgtttttccgttttttgttaaactccaaattagtgggtgtattttacaaaatttttcgccgttttagccaaaaattactattttttgccattttgatctccattttacaaaaatatggtaaaatgggggtccggcggtgccgatagtcgccgccggaaaaattttttgagtattaacgcaattttgttaagaaaattgcttaaaatttcaaaaaaaaaattactgaaatttttttactttttaaatgctctagggatgggagccttaactccaaaaaaaaaatttcgatgaaaaacgtaattttgaggacttatgtagtcaaaaatcg

SEQ ID NO: 24751 - DNA, 1100 bp, Heterodera glycines
aaaaagtttagcaatgattcatcgcattttttaagcctagaaaaaacaccttcaaaacttttaacatttttttcgccggacgccaattcttgaccattgccgttaattttttagccttggtcgtcctttacatgctttaccttctgttcggtcgttgggctcagctggcgtgtaacatcaccggctttctctacccagcgtaatttaattttttcaattcggtattatataattaaaactgaaacacgcaaacaatttagttacatctcaataaaagcgattgaaagtcaccagaaggaggacgacacccaatggcttacctactgggtaacttcttttttcgtctcaattgcctcgagaattgatgcattccttcagattttggtgtttttttattcaaatcattatttaggtggtttttgcgctgcttaatgttgtggaattcttctccaacaccattctgtactacttccctttctattggttgatgaaggttctattaaatttttaattgtttttaccctaatataatttttttttcatcctcattactcttgcagtgtgctctgctgttgtggctgtacttgcccagcactttgggtgctcagctgttgtacacgcgcatcattcgtccgttccatcttcaacagcacaagaacattgacagcatgtacaacaaattggctgggggtgagccttttagcaaatgaaactacctaaatctccaaatttccttaatggttaatggtaccatgtgtcagagccaaataggaaaaaaagttaacaaaaaaaaacaaaattcagatttcgctgtaaaaattgaaaaagcattttttgcgggtcaactcattgttgggtcgaatttagtttatcggatcctttttctgtttttttcggtgccatttccaccggatttttcacattgaaaatttcccgctttgttggatcagtttattttggtacattttccccccttttcaggtgcacaaaaggcatacgaagagcacgtgaaagagacatgaacaatcgtcagaacaagaagatgaagaagtacactgggaggcatcacctctctctctgatttcgtatattacaattct

SEQ ID NO: 24752 - DNA, 1061 bp, Heterodera glycines
gttttcgcgcccctccgtcaccaaccaattcggaagcattgaatgccctgccccctggttcaattgaacttgaagaaatccgaaccgttttgaacgacttggttagtcgtgccgacccccctcgtactttccgttctaacccccctcacgcgtaaacacagaatttagatgaaaaagagaaagggtgctaaattacaattgtccgctttgaatagtattcgttcttatttaaatattgaccaaattctcgaaattaactcctcttcacattccacaaccccaggtgattcagaaaacgaaatggaagcctccctgagtctctcatccacaccccttaatcccataatcgtttcctcgttgcctcctgacactcttggccttaccactaattctggcactacgaattccccgccaatttgcaccgaaccaacccctgtcaccgacatttccccgtcaaattgtgaccacctcccttgctctgataattgcccaccaccttgcactaatcttgccaaacacaccgaacattctccacaaattgacaccgacatcaacgacgcctcgagtatgccaaaatgtccagcctctccgactttcgtcgtgttggtcgatgactcggcacacccctctgtcaacattggaccacccgaacaaatggcgaacacacccactcctgtcagtccaccggttgtttcactttctaacccaattcaggtcattaccggggtggtaggacataccaaggggaaacaaattcacacttttaaacccaagtgtcaaatcacacaatcacacccttctcgcacgcccactgttcactctaaactcggacacgcatcattggccacacacatgcacaatcacacttcccaaacaccggcacgcggacaaccgatgatggtcaaccgaacgcgaatcatggactcaggacgaatcgaacagctgtcttccgttaaagaatggaaggaatttgccaaactaggaaagcccgtgccgttgaaccaaattcgtttcacaaccaccgcttgtcccattcctccttttttggccgtctcatccaa

SEQ ID NO: 24753 - DNA, 415 bp, Heterodera glycines
gggaaaaaggtacaccatgggggaaagaggtccatccggggggaaggggttcaacaacgggggaagaggtacatccacgggggaagaggtccacccacgggggaagaggtacaacaacggggaaagaggtacaaccacgggggaagaggtacaaccagggggaagaggtacaacaccgggggaagaggtacacccacggggaagaggtacaacacgggggaagaggtacaaccacgggggaagaggtacaacaacgggggaagaggtacaaccacggggaagaggtacaaccacgggggaagaggtacaaccacggggaagaggtacaaccacgggggaagaggtacaacaacgggggaagaggtacaaccacggggaagaggtacaacaacgggggaagaggtacaaccacggg

SEQ ID NO: 24754 - DNA, 1389 bp, Heterodera glycines
agccatcgattatcattaaattaaattaatcccagtacctccctggaaaattcgcaaagaaattcatttgattattgagcgatttcaaattgtgtcttaagtagcaattaggtaccatgaaccttttaattctcttaagtaccgtattcatagggatttgacaaatccacgagggataaccgcttgaggcgtggaaatgaaagtttatatgaaaatttctgatttatattccaaaatctccgaatttgtcctccatgtttatgccgcctggattgtttttctccggcttagagcaaggccaaattgggcggcgcgggagccaaatgacgcttaggtggaggacgcgttgcagccgagcgttgccgcgtctttctaggaaagtgccatttgcggaggcggcacattgtcgggcaatgccgacggcgatggaataatggcacgggaatagaaagaagactcaataggaattttgaattttccaaccaaattcctttcacttcaattcgaattggggggaggatggagttcgaacgcacaatgataaagccaaacaatatttattttaaagtccgaggagatcgatgagcaatttgagaatcaatttagaaagaaaatttgggagacaaatttaagatgagaataatgagaagtgaaaatgaaaaaagtacaaaacataaattaaagaggtcaacaaacataaaataaatagagacaaaatgccatgataatttaaaattaaaacaaatatcttaattaaattaaaatctccaacaactccaacatattttagtatatttattttgttgcataatttattttcgaattaatttgatttttatttcattttataacttttcattaagaatgttattataccattctttcatggacaaaatccgtattttttgtcacaataattttaccaattttattttgattactttttgggaattaaatttttgtctctctcttaaatttggataagccaaaaaaaaaaattaaaaaactcattttttcgatatttttgaaacgaagcattcatccattttcatccatttcatttaattgtaatgtttttttcaaatgctttctttttccatccctccagcggcaacacgtcttttatctgatcggccaaggaatgcgaaaaaggatgggttggtcggtcggctggtggagaaatccttggccaataccgtacacacaacacccactacagtattcaaccgcaagtgcaaatttaactcttgacaaatatctttttttatgaattgtgtacatatgatttaacttttatcggaccaaaattacttttaaattttttaatgtgccgatttgtggggaatacacacactgatcaaatcacataacattacatcaaagagttta

SEQ ID NO: 24755 - DNA, 787 bp, Heterodera glycines
actagaacctttaataattgtacaaatttccaaaaatctcttaagttttatcttcaaactttgaactaaagacatttcgccaaattaattgtaattttcaaatttggcgttttttcacttgtgacatttagtcccgtttgtcactgcccaactagccaggccggggccgggattttgaaaatggaccgtggcggggtcccgggacagtcactcccgtttttccaggactctcccggtcccggtggtttatcataaaaaaacaaaggccggggccggaaatcccggaaaaatcccagcggttccacggtcccgtccaggctctaatattaatactcgttgaatattaatttaatcagctttgattcaattacatttattttggacgttcaacttggacccaacagaatttgccttacaatttcgaagcacagcaacaaaaaaaaaacagatatttccaattcaagtaaaaatactaattttgagcactcaaaggtggagggctttcattaatcactgttgcccttttagaaatgttcaatcaaataaattttgatcaaatgacgctaaaaagaaacgttgaagggtccgttgtacagcaatggacaaacgcaacaaaggtaaacattgaataaaaagtgggtaaaaatatccatcataggtcccagactcaaaattgcataaaaacactcataggttttcttaggtgctgaaaacgcctaaaccatcaaaaaacggcgcggcaaagcgtttaaaccggtgtttgaaccgatttaaaactcgaaaaatt

SEQ ID NO: 24756 - DNA, 1053 bp, Heterodera glycines
gtcgggaaaaacgtgggacattgggcggattgtgccgccatcccaaaaaagtaaattaaacaaatttttaaaacaaacaaattaactatattattaattgaaacaaatttaaaaaaaaaattattttaattgtttttgttaattactctaacgaaattttaaagttcaattttgggatttatcgaggcgtaaatttctaaggcgcagttcgtgtgtataaaatactaatgcgcttcatcagacattaattagggctaataataagcgagtgggcgcaaaggcctaaggcgcaaattttcgggtgcattttcaattaagcaatttcaagcaaaaataaatttatgtcatgtcgcgtcgcatcaattacttaccccaccatcaattatcattatcagcatttaaatttttctttcatggacactttacgatttttttaatattttttgaaatggccctgctgttcttctgctgtttgctgttgctaatggatgggaagaaaaaaaaacaaaataattattgttttcagcgcccctttggggcgcgggcgccagacgacggggtgggcggtgcggttttgatgtttttttattatggtggcggcgacggccgccgcgggcgacgacgtaaacaaaagccaaccaacagcagcagcagaagagcagaaacagcccataaaattggggatgggcacacacacagcacgggaagacaggaaaatattatttgtaaaattttggaattttctggctgttttgcaaaaatttagcccacgcacgccaaaaaaaacacaacccttggctatttactgtttaccggaaatttatctggtaacggtaatcattgattaagaaggtagactacagggatatgttggaatgccaatttccgacatttttgggctaaatttccgatttccgaaatttttgaggtaaattataatgcagaaatttgtaagtgttcctctgatttttcatatttaaaccatcatccgctttatagatatcaaatttttaagcctagaaacccatttaaaaatgaccagcttttctgagt

SEQ ID NO: 24757 - DNA, 1630 bp, Heterodera glycines
tctagagtcaatgtctttaaaaaacccccggggcattactttcaagcctcacaattcgaacttttttttgttaaattttaaatggcgccgtaattatggaacaaaaattatgtcattaagaagggatggggtcacggtggagaggggaacaaagaacaaagaatatgcccgtgatattagctaatggcttaattttcgcattcgttgcctcaggggacattttcaattttctaacaaaaaaaaaaattttgtgtagcaaacaaagaccaaaaaactttgattgtgtccaaaagctgatgatgatgatgtatgggtaagaaaatgagtggggccaaaaattgggatgcccataaaaaggggtggcgtggcacacacaccaaccaccccatatcgatttcgtcgtccccggagggctaaatttggttgcattgtaatagatggataatgatgatatggggtggcattgggatggatggaaggcaatttgtgcctctcttctgctgggacatgttagatggatgaactttggtccaaatttggccaacaatgtttatgtatgtggtgatgtaaagtcccaaaaaacagtgtcacattattatcatgacagtctcctctgtacagacagaattttccagggtccaggacccgggtgtccggtatgtgtgtgtgaagaatgaaaaaggacccgccggagtcctgtcagaacaggaatcttttgcactgaatcctgtccgggtccatatcggaaatccgggtcccaggttttttttttgaagtccggtctctaatgaatttgaaaatttcccagttgtctttttcgactttttttttgtcccctccggacccgttccccctgggaaacgaagtgaaccacggtgtcggtccaaaaaatgcgtataaagactatgggcacataaaatggtgccaaatttcggatttataaaaaaaaaatttgttttaataatttaaattaattatttattcattttctatgctcactcagtgaatgcggtgctgtgccgtgagctgtatttgttcggcgtgtagtcgtcggttagtccgtcgtcataaacaatcatttgcacgtgttcttcgccgccaaaagacactctttaaaaatgggggaggggagaaattaatttgggcaaattaaataaataaaaaaatgataataaaaattttcatcaaaattatcactgacacctttcggatttgcacccccgtccgagttaaatctattaattataggataatttgggccgctaatcaatggagcccgggattttgaaaagtcggggtcgagattggcaccagtccgggataagatattatcgggattgaagtctcggttttgcgatcctgatttgtcgtgatcccgatcccgggaaaatccgggcgggataccgatagactggctctactaattactacatttttctggcataaatatcactcaatttgacctgctgggtttgcgctttaaattaacttttgtttaaaaaattaaacctattaggacagaaacgaaaacaaaaaattaaatatgttaaaaaagagatgatcgggtccgttttctgatcatttttactataaacgagcataggcagagaaggtgttgttgtttatgaat

SEQ ID NO: 24758 - DNA, 1950 bp, Heterodera glycines
  unsure (1)..(1950): unsure at all n locations
tgatttgccccccccccccctcaaaattntttcgcgtcagcttactaagactatccaaaaccttatagtgtctatttttagagctccgaggaggtgttcaaatagcttaatgaacctttttctttttctgcacaaaaacgtatgatatatttcatcaaatgtcactttttatgttacgatatggttatatgacatttgcggtcagacatttgcggccacagccaaaaacgacatttgcggctcaatttttcgaccccaacaaaatataaacctcagaaaaaaactatattcaatttaaccgatttttatgctctttctaataagccgattcacaagtcttctaaaaaaaatttctaacccccacccaactggaagcaacgaagaggaggaaaatttatcagcgaaacatggagaaagaagtatggacattattaggaaatctcagatctctacactatcaactggccgatacaagagttggtagactgcctagctaaagctctggtggggttttgacaagcctaattattgaaaaagaatcggcatacattttaagattgataaatgaatcctattttggtgcggtcgaaaaaatcgggccgcaaatatctttttggaattaaaaagtgataatttggcgttccgttggcttggccgcaaatgtccaatttccagcaggccgcaaatgtccgaaaatggcccttaagaaatggccgcaaatgtcttaacacgtacgatatttcgcttttttgacggactaccctcaaaaaaaaaaaaatttttttttaagttcaaaaacatgctttactaatgcttaaaacagatgattcgcacttcgttggacgttgcccgtctcttccccttctcactgttcatcattgttccattcatggagttgttgttgccattctacatcaaattgtttccccggatgatgccttctacgtttcaggacacctccgattcggttttttattttttatgatcgaaattcatatatatatatatatatagttaaaacttgctttaaccaaaaaaaaaaaaaaaatttcaatgcaaaaatataacattcacgcaattttctcgcttacggtttggacgcaaaagaaattcaaaaaaaaacgctgaaagcttttcaaaaaaaacatttttttacttataaaaaatgactgtccaatttttttcacaggaacaacagtacaagaggcagctgaaagccaagaatgagacggccaaatttttgcaagattcgctggaagaaattgcgctggctcgccaggagcaagggcatgcccacggggcgcaagcaatcgaatttgctcaattccttaaaaaggttttttttgcacaaagtgccaaaaattttaaaaaataagcaatcctttgaatatttttttttacaaattttaaaaattgccaagtttttcaaaaaaaaatttttttttattcgtactattttccccctatttattgtcaggttcgtacgggtgagggcggctatgtgaacaaccaggagctgttcaagttcagcaagttgttcgaggacgaactgacgctggacaatctgagcatggtccatctgcgagcgttgtgccgtctgttgggcattgctcagtttggaacgccggaaattttgcgatttcgtctgcgcatgaaactgcgcgagttgaaggcggatgaccaagtaattgtgtctgtctattaccaattttatctaatttatttttttttaatttttcgttttttgaccccctaaaaatctgcaactttttagctcattgaacgggagggcggtgttgaagtgctttctgcccaagagttgcaggcggcgtgccgcgcacgcggaatgcgagcgcttgggctcagcgaagaacgacttcggcaacaggttggttgggatggatgagcattgagcgaggtccctaaaagcctcccccccccccccccccc

SEQ ID NO: 24759 - DNA, 1020 bp, Heterodera glycines
tgaattcaattgattccaatgaactgttccccgatggctccactgacgatggaccaaatgcaactgctggccaagctttggtcaaatggcttcacactccgagcaaaaatggccaaccgaagcgattgtatcgcaataattattttggtccacagaatctcgaatgggtcaacaacttcaaagaggtgtgtctagccatattttctataaattgtttttgtttttccaaatttgtttagccatttatcagtgccaccacttctgtcagttacaatattcaactttattttcatgtgaacacaattccaactgaaccatttgaattggtgaacaaacggacgaatgaaaagctgacactgaaacaggagatcgacgaattcgacgtaaatgtgtataattggctgttgcaacggtgcccaattggggagacggcgagggtgccagcaattaaatggggagacagcttaaatccgagtgccaatttgaacagtatcagatttgatctgtggagtttcgataaatccattgagtgagcagcagcaatagcatttgaattttatcgaaaaataaaatatttaattaattttaggccattgtcgccaccaacggaagaagaaaaagaagaagaagaagcggataaaagcaacggaaatgtcgtctgctgattaagtgtacggaaatgaatgattgaataattctatttgagaaatgaattttcgattgaaacgattatctagagaatttggaaatccattaagtagttaagggttcactcatccccccgcttagaaaaaaataattaaaaattcactagggtaataagaaaggttgcgatttttagtgacgaaaaatctcgagagtttttctaaattttctcgcatgagagtcaatttcaagtacgtacttgccattcaagtacatacgaatccgagctaacaaataagaaagcaacattcaaatcaaaggcaagctttcgtgcattgaaacgtgcatcgatcggtgagaattaccaaatccgga

SEQ ID NO: 24760 - DNA, 1194 bp, Heterodera glycines
ataccaataatttataattgcttatgaatcggtgcagattctcgacaggccgagaacggcaaaggctattcacgttcgaccacagctactggtcccatgatggctttcgtgtgtccaatgatgggcatttagtgccagaaacgagggattatgctgatcaggtgaataattagtgggaaaagaaagaaacatctctgatgagttagtgatcagtgtcatcatttttatttttctttcaaaattcaattttattttttgatcgatcatattcttccaattattgtcattacttccccaatttgtcgttcattttcatccttccttcagaaacgcgtgttcgatgacctcggagcgcaagtgttgcgcaacgcctgggccggcttcaattgcgcgttggcattttcgttggcttaaatcactttattaaaaaaaaaaattttcgaatcaaaaaccaaaaagggtaaaccaaagtcaccttcactcacaattcactgtttatgcctattttttgcttagtctctttgcctatggtcagaccgggtccggcaaaagttactccatgggtttgttttttttaattttttgaaattccgccttggcgtttattagttggccttggcaaaaaccgtggcctggttccgatgatatgcgacgaaatgtttcacagcatagaggcggaaaagacgcgcaaaggaaccacagcgaaatttcaggcattttgggacaaaataccgtaattaaagtaaaaatacatccaattcaaaggttactgtatcgatgttcgaaatttattgtgagaaagtgcgcgaccttttgaggtgtaagtgcccaaaatgaaaaggcgacgaaattagtcattttcagaaaagccgactcaaattgcacttgattttatctttggcattgtcagtgccaatccgacaaataaagggcccataaaagtgagggaacatccgaagaacggattctacggtaagagagggggcggggtatggtagggagtacggtaaaggtgatgctcccaaatgaaaatgcagtggagggactgtcgagttggcctgtggcttcctaccgtgcggtggagaaactgttaaacgaaggcacacgggcgaggacaatcgcagcaacggtgagcaatggaaaaagggaaagggaaaggagagaaaatggagcagtacaaatagggagaagaag

SEQ ID NO: 24761 - DNA, 692 bp, Heterodera glycines
cggtattaattaccaaccgccgacggtatccaacaaggggcgatttggtctaagtgtaaaggggcgtttgttttttgtagaataagaagggaatcgttggtgaattggaaatgaatgaattggaatttttttatattttagtttctttgttaaaagaagattggattggattggaccacaaattcgatctgatgtattccaaaagggcctttgtccattggtacgtcggagaagtgagcgaacagaagcaaaaccaaagaaaacattaattaattgaatttaattgccaagggaatggaagagggcgaattttcagaggcacgggaagacatggcggcattggagaaggttttttgggggagggaatgaatcaaaacggacggcaaaaacaactgcttaataaaggactacgaagaagtggcaattgactcgcatgacgaagaatattaagcgcagaaagaaacgaactttgaaatgaatgaatgaccaacaaaacaattcgatgctttaaatatttttcattttaatccattggcattttcgcaaaaacagaaaaaaagatcattgatcagaaggaaaaaataaaaaatgaggagagagaggagcgaaagttgtgcattttagaattatggggaagggaggacgattatggccatcttcgaattggcggatcaatggggcgggaggggggg

SEQ ID NO: 24762 - DNA, 1048 bp, Heterodera glycines
tgaaacgcaccaaattttatttacatgttagttttcctccccccatactttttctatcaaaaagggagatgaataaaatctttaaaaatttttaattcctttttaaacaggccaaaaagtttaggcttaacttttttttcagaaactgatcagaagcgcaccaaactttgcagggatactgaaaggaagagaaataacctattttaaatattatctagtcagttcatttaaataatttttatccaaaaaatttttttttgggttttcggggcagtccccctgaaccgatgcgcccagatttatggggagaccgaatccttccggaatagcttcactatagcctgtactttaattctgcgttggatttttgctccccataattgtttgagtaccccaaacggacacttgaaaaaatcgatttttttgttttcggggcagtccccccgaaccgatgcgcccagatttatggggagaccgaatccttcgggaatagcttccctatagcctgtactttaattctgcgttggatttttgctccccataattgtttgagtaccccaaacggacacttgaaaaaatcgatttttttgttttcggggcagtccccccgaaccgatgcgcccagatttatggggagaccgaatccttcgggaatagcttccctatagcctgtactttaattctgcgttggatttttgctccccataattgtttgagtaccccaaacggacacttgaaaaaatcgatttttttgttttcggggcagtccccccgagccgatgcgcccagatttatggggagaccgaatccttccggaatagcttccctatagcctgtactttaattctgcgttggatttttgctccccataattgtttgagtaccccaaacggacacttgaaaaaatcgatttttttgttttcggggcatgtccccccgaaccgatgcgcccagattttatggggagacctaatctttccggaatagcttccctatagcctgtacattaattctgcgttggatttttgctcccccataattgtttgag

SEQ ID NO: 24763 - DNA, 124 bp, Heterodera glycines
gcgatggattcttccccggcatattatcaatctttaattgaatagccgttcccgatcgcaacatctcaccgagtgtgaattggggagaaaggcgttgctcgaggtcaacaggggttggatttcg

SEQ ID NO: 24764 - DNA, 781 bp, Heterodera glycines
aaaagcggaaaatttgtcatgtttttggaccaaaaaaaaaagacaaaattttgccatttttggggtccaattttctcattgacaggtttggaccagtaaatgtgccaaaagtgtgggcgagttggcggttgaactggttgattactatgcccgctttgacccttggaccaccgcaatttccatcgccaacggacgcaccatttccgtgttccgacaactgcacgcggaacgcccggcgctcaaagtgatggagccgttcagcagagcgtcggtgagttgcggggcgacagggggtaacgggagggtacactacgtttcctctccccccccccccggaaaatcttttaaaaattttcaaaaatagaaatttttcaaggaaaaatctcttagaaaatttaaagaaaaaaattttacatttgaattttttataataaaatttcactatacaaacgttttttttatcaaaaacagtaaattcataaaattttgaaaaaattgctagaaggttctatcttctaaaaaattcattagtagggctgctaattttatgtaaatacatatttttttcctagattctccatagcctaattagtaggaaaaacactttcttttttgtgtttgcgaacaaaagttgggacttttatttacatatttttgcatattttgggatttttctacatattacatatgtacatatttttatacatattttggactttttcgtacatatttcgcaatttttcgtacatatttttcatttttttacatattttgaggattt

SEQ ID NO: 24765 - DNA, 1163 bp, Heterodera glycines
tgagccaactgcacccaatacttcatacagccggacgggatggtgaccgaatccgtgatgtcatgccgagtctcggacaagaacagctgccgcatctttaccataccatgggccaggatttggacatcttcaatttttttgttatttttgcatgtttttttttcaaaaattgtacctgtcttgcagtagtccgcgatgacttcactgagctcaaaaccagtttcccggttctcgtcgtaccactgctcaaactttgcacgctctgccgggaagagtccacctgggtaatagttctcaattggtggcagggtgtccagcacagtgccataattttccgcctaagattgtattaatttttatttttattttttttttataaattcctcttaccttattgaatttgtgtggaaaatatttcttgttttccacgccctcaatttctaggccaaacgtcttgacaaaattggcaagttttattgggatcaacttgtaactaaagtgatcaaaaattttaaaaatatttaatattcaaaatatttacctgtcccggaaaacggtggttgtgtagactcctgttttgcgggtcttcatttccaggagatggtttccctggcggatgagttcagggcggacacccatgcgcagcatttcaccataaatcagcacatgatcgtagcgggaacctttaaattttatttcttccaagttttttttaaataattccaaaattaccggcgtgggcgtacgcgtatgttgtcaccgactccggcttctccccggcttcttcgtaccccagcatccagttgttctcggcgtcctcatctacggcatcctcttcttcttcttcgcattccatagcctcgccgtgggtgttttcggcattcttcctttttgtgcgcttcttcgcaccgggctgcatgacgaggaatatagtttcgaagttcaatacgcaattggtgaaggcagtcagtgggtcttagacgacctagaggcattaacacaaccgagtgacagaattaggacggcgatcaggcttaagttaagattcgattccaaggacatcatgcattatgccattgacaaagtcctgaaagtgatcattttgctgggaagatacaaataaaaggacataataaaagaagaccaggacaaagtgacgaaag

SEQ ID NO: 24766 - DNA, 574 bp, Heterodera glycines
tgcgaaaatatatttcttttcccgttcttttttgttttttttcattttaccagaaaaaatatcattttaataaaataatattatttatttcacctatgttaaaatttggtctttttcaataaaaattcagattttttcttacaatggaaattttttgcctttttccccctattttttacaattttattccgttttgcacaccggatcattttgaaacaaaatataatgttccaaattttcgtcaaaactctcaccgggaagaccatcacccttgaagtcgaggcgagcgaccccatcgagaatgtgaaagcgaagatccaggacaaggagggaattccgccggaccaacagcgcctcattttcgcgggtacatccgcttgatatgccaggatattaaatgtttcacgtaatccttgtttttagggaaacagctcgaggacgcacgcaccatggccgactacaacatccagaaggagtcgacgcttcagctttgtcttaagcttttcgggggcgcaaggacgggcaaaacagcacactactctcggagcgtaagtcatgattatcataaaaggcc

SEQ ID NO: 24767 - DNA, 869 bp, Heterodera glycines
tttatacaaagagaattgggaatctgtggggaaggaagggttcggcggtgtcgatatgcgccgccgggaaacattttgtaatttttaatgtaaattgttaacaaattttgtccaaaaaaatggaaaatttagcgattttgagcaaattttcaagaaaattaagtttttttttgagtccggcggtgccgataggtgccgtcggaaaaaaaaattgaaaatttctatgcaatttattaacataaattgtacaaaaattgctaattttttgaaaaaaaactcaaaaaaattccgacttttcatcaaaaatttcggaagtcggaattccgaggccccaaaaaggcagcaaaatccataaagcacttattttgcgtgacttatacagtatatgagagccttattaaggtaaaatgacctttcattcaataaatatttctttaaattgattaaaaatgatacagcgcaataaaataaaaggagcagcaacacaggacagtgtttttcctgttaagcgtatgttgaagagacaatgtatggatgaaaattcgatttattcgcctttttttcgtccaaaagtgaaaattcaataaatatatagttttaatttttcgctttacaccaagaaattgagccgaattggaaggaacaccacggacgtgctcaacttcgcactgctaacaccaactcgggaaaacgatttggcagtacacagaatgaagctcgaagaagtcttttcatttccacttatcccgaggtcatccatataaattcagcttaagaaatggctcagaataacaatgtccgttaatcgggtatttaattcattagcctaataggttaaaagacaaccccatttagtttttaggggccta

SEQ ID NO: 24768 - DNA, 891 bp, Heterodera glycines
  unsure (1)..(891): unsure at all n locations
aaaaaaatcgattnttttcaaggtgtccggtttggggtactcaaacaattatgggggagcaaaaatccaacgcagaattaaagtacaggctatagggaagctattccggaaggattcggtctccccataaatctgggcgcatcggctcggggggactgccccgaaaacaaaaaaatcgattttttcaagtgtccgtttggggtactcaaacaattatggggagcaaaaatccaacgcagaattaaagtacaggctatagggaagctattcccgaaggattcggtctccccataaatctgggcgcatcggttcggggggactgccccgaaaacaaaaaaatcgattttttcaagtgtccgtttggggtactcaaacaattatggggagcaaaaatccaacgcagaattaaagtacaggctatagggaagctattcccgaaggattcggtctccccataaatctgggcgcatcggttcggggggactgccccgaaaacaaaaataaatcgattttttcaagtgtccgtttggggtactcaaacaattatggggagcaaaaatccaacgcagaattaaagtacaggctatagtgaagctattccggaaggattcggtctccccataaatctgggcgcatcggttcagggggactgccccgaaaacccaaaaaaaanattttttggataaaaattatttaaatgaactgactagataatatttaaaataggttatttctcttcctttcagtatccctgcaaagtttggtgcgcttctgatcagtttctgaaaaaaaagttaagcctaaactttttggnctgttttaaaaggaanntannaaattttaaaattttatttcatctcctttttgatagaaaaagcatcagagtgccta

SEQ ID NO: 24769 - DNA, 1591 bp, Heterodera glycines
  unsure (1)..(1591): unsure at all n locations
ccatgtatttttcancaataatatttntgataaaagctctcactgtaaaatatttttcgttcccgggaacaattctgtcaatgtggattgcttcaaccgtggttacaaaacaggcccatttgaattttactaaattcgtaaatagtttttgcttaacataaaataaatataaaaaccagtagaaaaggtaaaaaataaaataaacataatttaacaaaatttatcatactactcagtaataaaaggtaacaaaatttttctgaaaggagcgaggcaatttctggaactcctttgacacttttatgtcttttgatatttgtcgtttacagaactctttgagggtcgaagcacgcatgcagaaaaaacaccatgttttgttcatttctctgtaaaataataatgataataaaaaaagaaaaagaaaaatacctttcaaagagacaaacaaataattctatgattatttgagcaaatgacgacaatctacctttgaccaaataagtcgtaataatctcgtcaaagtctatttccgtcctcataagccacccttgataagaagaaggggctcgatattttccttccccttcctgatagaaatagatgaaaatacgcggttttttcttatccgtagatacaatttgtaccagtccgttaatgtagcggtaaaacttggtaaccgggcagtgaattcgtcttgagatatgtttaaaaaaatcccacgaaagacgataatcaccatcacggatcagaaaagagaaaagattttttcgaaatcgtctgcttttaggaatgctcgaaaaagggtggttgttatccttatgaacggcaacactatacggactagcatttgccattcgttttttgaggtctttacgatttttattccaataaaaggactcctaaaagtcgttatatgattggtgacgcaaaacaaaaataccttttctagctcctctcggaaatatttagtgaacggacccattctaaaaacctttccatacatatagccagtaaattaaaattaaaataaaaaaaacgatcaaacattttattagaagtttaaaacataatcaatttttttattaaaaacgtgtaaataattttttaaaaacatatgggaacgttcgaaattcttccaaagctttctcattctcagaaatgcttttggtgcatatatcttttagtgaagggacacgtatgttgagaagtttccacgcttcttgcatttcactgaaaatattgatttattacaccactaactcgaaacctaccggtcgacaatgctaaagaagccatctataattaggctaaccggcgaaacaagccattcacgaatactgagcaaatgtacaatcgttctggaccgtaatttgacacggtacagagggcttaaatagaactgaaacttatcataacgatgttcaccttctcgaaaaaagtaaatggtaactgatacgtcgtcaatatatacaacaccgttaagatatagattgtaactccctatagtgtccttaacattanncacacacattcgtacatttttttcataaatcagaaacgaaaaaacataactagccctaaacgatcgacc

SEQ ID NO: 24770 - DNA, 1045 bp, Heterodera glycines
  unsure (1)..(1045): unsure at all n locations
aattaaaacattcccgcaccttacttaaaatagcgaaaacaattttatttaattgtatttcaaaaatttatgattttaaaaatttcgggaaattattataacggaattatttatttatttaaatatatcacagttaattaaaagcatattttttaattacgaatttaaattattctgacatgataaatattacacctctttaaatcatttttctattatttatgaaatttcaaatattttatcatttccattctaaaatattttctataagtaaattaaactgataaataacgaatttgacgacagaatatttatattgtgataacattttaaaataagattttggtatatttaatctagaatagactattattattgttttaaataatttacaaaattgtttttctaattcatctaaaattttgcatgtaaatttattatctaattaaacttattttcactcattaacttttttaaatccctccaatttttcttgttgaggcttacgattcgttgtggcaaagttgtgactttacaataaatcgacttttgatgtgcaaaattgagaaatgtgaattaaaattttttttcgaaataaaataaattattttttgtttaatttgatataagatcacaaaaatgtatatttttaaatataaataatatttctatttacgttttggattgtttcaattttacaaataattttaaagtttgccttataaagtaatgtttttagattttaaacttattttattctgattcattttgtccataataaaatagcatttatctgacatatttataacttatccatgctacaaagacgaacattattgataataaaattttccaacattgcgatgtttcgtttagagattttttgattcacttattttaaaatacatgtgaagatttattgttgtaaatttattccaacattcttttgtttaaaatatgaatataaaaagttttttcaatttaaaagagaattaattgtaaaatttttttatctttataattttatctctttatcccanaatat

SEQ ID NO: 24771 - DNA, 899 bp, Heterodera glycines
ttctgatcgcaaaaaatacaatttgctagaaaaaagatttaaaatatttgttaatttcaaattgagataaactaaattactaatgttgggaatggagggcattattttaaataatatgataaaattttaaataaaaaatcaaaaataaataaactatccaattaaaatagacgtaaatattataatacaaactataaaagtaaaaagaaataaattcaagaactttaaaattaattagcggtactacaaacaaagagtttactaattatttaataaatcaaataaatgattactcggagttttgaattggtcgaaatgaatgtcagaatcattttttcttaaaaacagttttgtacaacaaatgtgaaatgtggtgtaaaatgttttttaatttttgttcgagtccgcattcggggttcgaaaaatgtcaaatgatctcttattgaaggattgatggttttcagttaaacgatttgaagaaaccctaattttacaaataaatgaaaataaaaaactgtaaataaaataaaccgtcatgaaaataattgataaaagaagcaaaataattttacttataatattttttccttgtagaagaaatgatctctgaaattgagttggctttatatgccaagagttaaaagaaaattaatttcttatatttattaagtctaattaaaaacaattgaatgaataaattaataaaaacaaaataccaattctctaaatagtaaaaacaaatttaaacacattgaaacatataaaatagttgtgaattatttgtagttgcatgattacaattaataaaaaatagaaataggcttatatacactattatttaacaaataattgaaatacagataaaattaaatattgaccaaacaaattgtgaacataca

SEQ ID NO: 24772 - DNA, 1370 bp, Heterodera glycines
ttcgaacgacaccaacaatgttggatttaatttacaaagaaaaaagttatagccaaaaacatgctggcgccgaaacgggagcgccgaaacgcagtggacccttcgaatgataccaatttagagtttgttcgtacatgaacaaagttattacataaaaaccaggtattgtcaattgattggactcataaagtgcactagagccaacagttgcacttacgccgttatcttcctcaatctgttccagcagctcgctcaccacgtcgatggcttttcccgagcccgacgaatgggtgatcagaaaaacgctgttctgcaataatgaggggtactaattggaaggcaatttcatctgggtagccaaactcatacaggtgccccatttttgtggacattgctcagaattagtgatgttcgagaccgaaaatttcccgagactcgagaccgagacttgaccccgagacccgaccccgagactgaaaaccccgagaccgagacccaaaaaacccgagactcgagacttttttcaaaaaattttcctattcgcttaaaaatcgtttaaaaaattttttgactctattcttaactaatttttggttttttttattttgattcaatttggtacaatatttatcatttcaaaaaagcacaaagcaaaaaattagtttgtttttttcgcagtttttgtgtcaatttaaaaaaataaagggtattttggagctccggcggtgccgataggcgccgccggggaaaatttttaaaatttgagtgcaatttgtgaacaaatttagtactaaaaatgacaatattttatgattttaatttgattagattcacttaaaaaggaataattttgaaaaattagaagaaaaaataactacttggaggggtactgatccaacgctaaaaagaagacatgaccaagaacacaacccactgagccacgcacactattaaggtgatggagcaaaaatataccaaaagtatatttatttctaacttacaaaaagccgatcattaggggtgtaaaaaagtctcggtctcgagtctcgaaagtctcaaagaccgagaccgagactgaaaacccgagaccgagactcgagaccaaaaaaaaccgagacttttctcgagtcgagaccgagactctcgaacatcactagtatctgcagataaaataatcttcagctacagatagttagcgctagcattatgaatacggattttatctgcagatttttttatctgcagctaccctatccgcatatccttagctgcagataactatccttagcattatgaatagcagcatgagcaatttcggcttaaaatgagaaatttatacatttccgaaacatctaattttaagattttaa

SEQ ID NO: 24773 - DNA, 1114 bp, Heterodera glycines
tactgtgcgatttgcccggcaaaatttcaagaccctctggcgcaatgagaacgcccggcgctgtttcagtcttggaaagttagaggatgaaacaattaaaagatgttcgagactcttgacttaggaaatactcaggagtggcgggcacactaaaccatgcccgcgaaatagagaagaaaatctttaaaaattcaccatctgtgcttgtttgtccttgagcaagatccctacagggtatctggattgagaccaagcatcatttatttgattcggaacccgctacaataccatgattgcggattggatctacaaaagccagtggttctgggttcgagaaaggaacccggatggatatggacacaaattcgagatttccagggactataaccggggataattgaaatgtaatcattaatatgtcggaaagtcgctagacgaatttaccgagacaagagtcgagactcaaaaatcaaaaattcaagatgaaaaataccgagaatctcgaatggcaccaaaaaatgccaccttgggatggtccacttccagttgaacagtggcgtcatgaagttggagcacttcctggcgaataatcaaccgaatttcggctgtcccagtcggcaactgtacagtttggccactctgcagatgaccatcgtcaagccgacgcatgcgcaatgaacgcagatcaattggaggagtgagcagtgccttaaaatgtcattaaaattcaaaaattaatgatcggattaaaaccctattgtgcttttgtcaaaaactaagattagacgggatcgagcgggattccaactgggattgggccggaatctataggttctttttatctcgatccctgttttcaaatcgtattttgctatagccaaaaatagcgttagccgggtcgggatcccgaccgggattggtccaggaatgccgggaaatatttaatttttgtccactttctgacagacttttcttatccatctaaatccaggtcctaatttttcccataccgatcctggctaataatacatgaatttatacaatgtaatttaaattttgttgtcgaattttttaaacggtttttgcgccttcctaccgttccatctctgctgag

SEQ ID NO: 24774 - DNA, 838 bp, Heterodera glycines
caaagattcgcaacgcgtgctgagcgaggacgagacaaagcgcttggcatgcgcaaccgcactgttcctggcatggccaactgttgaggcagaaaaatgtggcctaaccctactcaaagtcaatggcacaaatccaacaaccactccaacaacaacaagcatggttcaaactgaccatggtgccaaccaagttgcagcagctgatcaggtgcttgttgatgacgatgaactgcttggtgctgcgttacaaacgttggacaatgttggcgccaacaaggcgttgctgcttgacgagaacggcggcggcacaattgctccgtcattagcggtgccgacaacattgttgaacaactcggcgatcgtttcgctagcattggcacctgtctgcaacagcaacaggctgccgaccggcttaaacatgacgacttttccatcctcgacgccaacaacgatgctgaactcgatcccggttgtcagcaatttcaattcggtccccattcagtcgttggtcagtttgaacaccaatttggcaccaccccatgccaatgccatccgcatgatgttgccctcggctgctgttatggccgcccccccccccctccgtatcagttcgtcatataaaaaattaaaaaaattttcaaacttaaaatgtttcaaaaaaatttatgaaattttaaaaaatttgaaaaacttttcaataagttttcaaaagtttatggtgaattactaagttttttttcaaaagtttctctaaaaatcactgtatgttttaaaaaaatatattctcttgcttttttcttataaaataatttcctagattttttgaaaaatttctgag

SEQ ID NO: 24775 - DNA, 1038 bp, Heterodera glycines
gcaaaatgagtcattatatgcaaattataccatacccagaagtaaacttcaaaaaatttaaactttcgactatgttagaactttggtccggggttcggaattggtccaaatggatatcttattcgtgtgatcagcgaccttgaaaaactcaggaaagacttttatttagataaaaaaaaaattatttttaagtaaaaaaatttaaaaaattgtttgaatccgggttcggggttcgaaacaaagtcaaaaaagatcaaattcgtgctcagcgcatcaaataacccctaaaatatgttttttttttggatttttattctttttttttgtgggaccaataatcttcacaattgccaacttccttgcctttttaaggtgtgcaatttgttgcaaaaaaacggagcagcagcgacggatcaatttaaaggacaaacaaaaatggcaaaaatgccgacggtggtcagtaaaatcacaaaatattacctcaaattttgtatttttaaggcgactattgagccgaaaaatacgaaaagggacggaagagcggcagaaaatgagaagacttggatttgtgagaagtgagtgccgaaaggggggcgggagagtgatgaccgaataatgccgactctctcccccccccccccatggaaggtgtcgcaagcgcaactcaatcctccgttatgagtgccaaagctgcgaaaagggacacccaacggaagcccagcgcgaggcaatcggtcgagcattgacgggagtttggctgtgtttcaagtgagtggtccaagacaaacgaatggggcggggttaagggatggaataactccgagaaaaaatattggtgtgaaaaagggtcctcaccaggcagcggtacccctccaagccaaaatcctaggattttctctgctgctggagattttagaaatctattaaaaatgaaatcatctgccgatttacagttgtaaaaagatcaatggtcgacttaacaaagtgtgcttcgaatgtgccacaaaaaggcctttgaaaatggcaggtaaaaataaa

SEQ ID NO: 24776 - DNA, 2347 bp, Heterodera glycines
  unsure (1)..(2347): unsure at all n locations
atatttaataaattttcttgaaaaattttgtccaaaaacttctccccactgatttttgagcaccttttgcctttcacatcatgctctcattcagtttttcaaaatctcttcaaattttttcaatgactatggtatgaatagaataaattgctcattagtagggctacaatttttaggtgctaaaaactgcaaaaatagttagtttttaggttctaaaaaaacctcaaaaataggtgctaaaaaggaaacaggtgccaaaaaccttcaaatttaagggaaaaccgtaaaattttatccaaaaagcaacaaaattaagcaaaatcagtattaactttaaataaaaaatttttataaagaaaaaaaagaaaaattttgaagacgaattttggaatttttttaggggtgtatttttgaaaatttcggatcgtttcttagggatgtatttttcgttttcagttaataattttggccaaaacgccaaaatagttaaagagttttttaaaaactttttagatgctaaaaactagaaaatagttgctaataataacccgctaatcgcgccttatgaacaaaaaaaaatgttttttcttattttctcttaggcaaaaagtgcttttccgtcagcccctttatttgtttgaatgtgttcatttggtttattcaatcattcataaatttaatcttaatttaatctttgtttaattctaaaaaaataggcaaaatgaattcaatttgagagttttctttctaattttggcaatttaatacatttgttcgccgattattaaattaataaatgttttcatttcgtttcttttgattattaaattaatttttgttttatttttgccaataattgaattttataacgaagaaacgaaaaccgactaaacaaattgcttatttatttggtccgttggcactgatttctgtcaaatatgttcatattattgtttttaatagaagaaacaaactcgaaataagaaatatgaattaaataataattagtaataattaattaaattagttaaatgaattttagataacttcgcatcaatgaatgtaactgttggcattgaaattctttacgtgccatttggaatttcgatttttggtcttcttggcaatacggtcgctttcttaacaattattctctctgatcttcgaaaggtatttaaaagcacgatgaaactcttttgcatttgaaaaaaggaaataatttaaaaaaattatttgttacaaaaaaggaaataaaattttaaaatttatctttttatataatgctctgcaaatgaaacacaattatccaacccctaacctattgttttaaattttcggaagctcatttccttgtggacaaaaggtcgtccttggttcaaatattcctattaattaattactaattaaattttaaatttcaaatgttaattgcttttctttctcagaattacgtgaacatttaccttttggtgctgctctgctccgactctgtgcttcttctcgacattttcgttcagcctttgttccgtttcgacgtgctcactttttggacatgcgcaatcaccgaatatttgttcaatgcttccgcttttgtgagcagttttgcgatcatttcactcaccggcgaacgctttttctccatcattttccctctccgacatttaaaggtccatttttatttagattcatttatttatatttaaattcatttatttatatttttaaattaatttaaaagttttccacttttctttttaactaattttaatattttttgatataataaggtttttaaaaatcgaattatacatttatcttttatatattttttccaccttggattatatttttatcatatatttttactagggttgagcggtaccggtaccggtaccggtactggccggtaattaccggtttttttggtaccggtaccggttttttcaaaaatgaaattaccgttaccggtttgtctagtaccggtaccgccggtaaaaatttgcactggtaagaatgggggtctggtcgagaaaagagtaggaaattggtgaagaaggagaaatttttgagaaaaaattaaattttatttcatttagtcatgggattacacatatgcacatgtggtgtagtggttaaactttctacctttcataatttttcgcctgggttcaattccccacttggatagaatattcctcacattttctttaccattattttaattaaaattttaattttaaaaaatattccaacttttttctttcatgttaagcatcctaaaaacccaaaacttaatcaattggtcatttttttacaaattctgttaacaaatcgcattanaaataca

SEQ ID NO: 24777 - DNA, 1876 bp, Heterodera glycines
tttccagaaattctggaataacttttttttttttctgataaaaaactcaaataaatcccataaaattctccttatttttctctatttttaaggatttattcctgtaaaattgatcaacccttcgatttgttatgaattatcaaatagttcgcccaaaatcccgaggaccaaaaaattgccacaaaataaagaatttttaagaaattccaaaaattttgaaacgaaaaataaacatcatattcgtgctcagcaccttaatttaccccaggaaaaattttttccacccccattttcaacacaaaaaaaattttcgaaaatttctagggggcctagctcgaaaaattttgaaaatttccgaaaatgtagtacaccattcgatagagcttaaaaagctctacaaatttgccctaagtcaattttttcgctaaaatcaacccctgacgagttataggcccgggactcaaatgtcccgctcaggccaaaatttttttctatttccgggaaaaaatcgaaaattttccgaaaaaaattaccaatcgatagagctcgaaaaactatgttttggaagtggtctccgtttctctgggaaaattcgttaaaaattcctaaaattcaaaaacccgaaaaccgttttttaggcctagctcgaaaaattttgaaaattttcgaaattttaaaaactggaaaaatccagctcattgaactctacaataagtctgctggtaactccccgcccagatcaaaccctaatgagttattcaaccgggactgaactggacaaagttggtactgaaaaagtccacgaacctacagcctttcctattgcagatagaggcttggaattttttttgttttttagaaaacacttcaacttagccccctcacagcagacattttttgatttgggttttataaaaaaagttacgggcccccaaatgcacgaaaaaatgagaaatccgtccctgggactcagtcgtccgcgctaaatttttttctatagttttcccggattctcctcaaaaagttgtaagacccttccactactttcagggcgctcccggccttcggccgggagattttgtttttgcaaacgaaactccttgtcaatataacgtatatactagcgggtgcgtgaaccgtcggctatttagctgggaaaaagcgcttcgcgctttcggagcttcgctacctaggctgtgaagtgattcaaattgatcgaatttgttggagagattttattacaactgtgattagaagaggtacaaaagtgattagaagaggtacaacagtgattagaagaggtacaacagtgattagaagaggtacaacagtgattagaagaggtaaacatttgatgaagaggttaaagaatttttaaaaaattccaaaaattatgaaacttaaaatagacatcatattcgtactcagcaccttattttaccccagaaaaatatttttcacccccattttcgtccgaaaaaaaatttccgaaaatttctagggggcctagctcgaaaatttttgaaaattttacatcatgtagtacaccattcgatagcatttaaaatgctctacaaaaatgttctaagacaatttttcgctaaaatcaacccctgacgagttatgggcctgggactgaaatgtcccgctcaggccaaaaaaattttctatttcctggaaaaaatcgaaatttttccgcaaaaaataccagtcgatagagctcgaaaaactatgttttggaagtggtctccgtttttctgggaaaatcgttaaaaaatcctaaaattcaaaaacccgaaaaccgttttttaggcctagctcgaaaaaacggaagggaaagggacaacagtgatttgaagaggtacaaaagtgatca

SEQ ID NO: 24778 - DNA, 1381 bp, Heterodera glycines
  unsure (1)..(1381): unsure at all n locations
tttttttaaatttttatataaaatatggtttatatattttttcctaagttattttaaattttttttaactaaataaatttttctattatatttgatcttcttaattcacaaattttttaaatttttatatatattatttttattaaagcccatagcattatataaatttctcgtaaatccttttttttaaataaatcttttctcatttttatttcgcttttttgccatccctcaaattggccacggcactcaccacattcattccattcaccaaagcccattttatgggccacaaaagcaccaccccaccacaccacaccacacgaccacttcacaaaattgcccagcagacggaaaacttttttattttttgccgaatttcattgtccgaaccgccaaaaaatcgttggttctttcctcatcatcatcagaagcagaagaaaatgaagaattccaaactcatttatttttttggcccatgccattcaatttttttacaggtcatatttatttagacaaaaatggatgcaaataaatttttcccattttcttttattattttgtttcagttttattttcaataatttaatttttttcaatttataaatttaaatatttttttaaattcgaaagatttaaattgttcattcttttttttaatatcctttattgatggccttttttgctacctattcttttttaattttaaaattttttaattaatttttatttttaaaagaattaccggtaaatttttcacattttgtcaaaatgtattattttggtttcggttttttgaaacaattaaatttttttaattacaaattaaacgttttttatattttttaaatgttaatttttattttaaattttttaaacctttttatcattggcattttctgctacatatttaaaatttttctttttacagttttcaaatcctcgcttcttttaaatacattttccctttttctattttattttccggagcccaactcattttgtgcccgcttggcctgcctttaaacatatgcatacactttgtggcacaaaatttgacaccgattggcaaacatttggccaaacattgcccaaatatattccacctctccccgccctcctcccccctcactctcacgcaaaattccattcccatcgatttcattgggtcgagagtgactctcggctacggggtgaacggggctaattacctccagattaacagtcataggtaatttgcttttaatttttgtctggattcgctttaattgtctagctttatgcccttttacataaaaaatgttttttanaaaaattntcgcattagcaaaattctcgagactttggcggcgcgcaatgccaagaaaaggaaataaaatcc

SEQ ID NO: 24779 - DNA, 1396 bp, Heterodera glycines
  unsure (1)..(1396): unsure at all n locations
tcataaataatctacaaataaattatatattgaacttcgttatcatttaaatatatgctttttgttcacagcacttaatatgtgagctgtggaaaagaacgagccgtgaaagcgaagtgaaagaaaaggtcaaaaaatgaacaaatggccgaatgataagtgagataaaaggtacacgttttccatagaaagcaatcacagttaatcccacatcagtcaattctcaacgagcgatccttcagatcaatgccttcttcatccgggttcaattttccaagagcaatctattaaaaagtcaaaagtgacattagaatgtaagttaattatgtgcacctttgccaaattacgattctccaaatcggcatcgtcatttgccatccgttctaaacgctttcgaatgttttgcccgttgaattggtcgtcgaaatgattgtatcgggcgagaagacagaaatattggcgtacatttgcaacagctgagaaaaccaattatatgtgagacataaaatggacgaaccatcgtccgaaatacgcatgagatcattgtggaacaagtaataaaactgttcgtcgcctatcaatttgttctgtgaaagagaaaaaagcagacggccgaagctaaagtgccgaatgttttgcgcgacagttgcaatgtccacagtcagactgatcgtcacctttgccttctccgccagtgccgtgtctgccaaaacccaaagcgaatgtcagccaaaaggcgatcagtcaatggaagctgcggagagtcgtcggcacccgcactttcgtcctccgtcgtttccattggcgttgcttttccgttttcaccgttctgccaactttccatattatcagtcgaattgatcttcaatgtattgtcaagacagtcattgtttgtcattgttttgttccattcgtggtgaacaaaagcggctaacacaacggcaagcatttcaacaccgcaaattcggacttccgaaatacggtctgatgtgtaaaattaaataaataaatgcatgttaaaaaggcaccaataccggcagaaaatgcgagagcaaaaccactgaggtgacggttaatgtgagtgatcggaaagaattgaacaagtcgggtgagttgactggaaaggaacggatgatgaatgaaaggacgaaagacaaacccagcaaattggacacgttggcgccaagtgcgcgaatcccccgggtcaatggtcacttgatggctcaattctcggatcatactctcacgaaattcggcagaaagaatctgacaaatcataacagaaagtcagttaacaaccaaattaaaatgngaaatgatcaccttacaaaaggcggacaaatgctgtagcaacgcgaactgtacctcctgtgtgtcgcgcatataccgctgaaaa

SEQ ID NO: 24780 - DNA, 1280 bp, Heterodera glycines
cccccccccgcccttcaaaattttgaaaaaaaaataaaataataggagactcagaattttgaaaatttttttaaaaactgatgacaagctaatgtgataaaacaggttaattcttttcctttcagtatccctgcaaagtttggggcgcttctgataagtttctgaaaaaaaagttaagcctaaactttttggcctgtttaaaaaggaattaaaaatttttaaaaatttattcatctccctttttgatagaaaaagcatcagagtgcctaaactagcatgtaaataaaatttggtgcgtttcagagcattttctgaaaaaaatatttatgaattaattatgcaaaaataaataaaaatttctaaaaatttgatcgtccataaataatttgtaattgatcaggggctcaccaaattttgcagggatacgtatcggaacactacaaatgcttactaattttcctagattttttaaacccggtgaaaattttttgcagacaccaccacttttgcacttaaaaaaatttcaaaaaactttaaaaattcatagaaaatttaaattcataggtactactgctaaatcaacgcagagacgcctttccttgacctttttaggcccctgcaaaatctggtgcgcttctgatcactactcgaaaaatgagtgattgaattttcactaaaaagttaagcctaaactttttggcctgtttaaaaaggaattaaaaatttttaaaaattttattcatctccctttttgatagaaaaagcatcagagtgcctaaactaacatgtaaataaaatttggtgcgtttcagagcagtttctgtaaaaatacttatgaattaattatgcaaaagacaaataaaaacgaaagactcagattttcgaaaatttttttgagccagctagctcggcgctcatttcagtgtaagttagtcctttaccggggagtatccctgcaaagtttggtacgcttctgctcaattagcaaaaaatatgagtgatcgaattttcactaaaaaagttaagcctacattttttggcatatttaaaaagcaattaaaaaatttttaaaatttaataattttcctgcaccgaaggtactcactcggcctcttcgcggcctcgtggtgggccttcgcccccccccccgcgggggccttcggccccgccccccccccgcccttcaaaattttgaaaaaaaaataaaataataggagactcagaattttgaaaattttttataaaaactgatgacaagctaatgtgataaaacaggttaa

SEQ ID NO: 24781 - DNA, 1781 bp, Heterodera glycines
  unsure (1)..(1781): unsure at all n locations
ttaaaaaacttgatttcaaaattaaataaacattgctatcacaatttttttttcagctacaattcatattggcaaaacgcgtcgaccccgcaaccggcgcatcattactacactggcgggaccggatcacttgtttactcaacaatcagtggtgacgcacattccatttgcaggtaggtgatcgctgatcatttggatcagcaaataaattatattttttgtgttcattatataattatttttaactgatttattagagctcgacctgattagcctctgctggttccagaggcctgggtttttcattaacctaggtccaggcacttttcgggccttctaggttttttggggtctaggttttcctgctatgctttttccagaaaaattagaccaatgtaaagtataactcataacttggcatgaattttattgagccttggtttttctcagaaatccaggctcaagtcctgcgttaaacaatacccaggccccggcatttaattcaattgccgaatacttagttaattagggttacacaaggttacggaatcgttaatcctctgggctgatcaccggattacagcagtaacgcggacgtgtccgcccgtctctccacccgtacccatcagttatcctcctcactgatccttgtgccaactccgccggccactcattatcagcatcatcatcattatccgaatcatcatcatcagcaacagatcaccgttgatccatcctacaataacaacattgtgtcaatgtcttcaccgtccggcacgggtgccattggtggtggtggcggtggtcacattggcatctatcatcaagcaaattccagtaaaaaagagcaattttcaatttgtgacagatagatgatgtccacttaggacttctaaatttactaaatttgcgttttcaaaattctagagttttaaaatcaaattttgaaatattttttagtgccaaagaatatgaaaaagtttctagatttcttccaaaaacaaaaaagaaatagtttaactttttaaatttattttttgtaataattcaaaacttttatcttgaaaaaaatcattttctttaaattttattgcgccttaattttaatactcttgataataataataataataaattaattgattgatttagcacaaaaatcaattaaaataattaattacagctgcagcggcggcaaatgtcagtgcggcaatcccggcaatgccattctgttgtgaatgccatgcaacggtaggtagtagtagccccattaaaatttaaatgaataatttaaaaattttttgaaaaaatttccagcaaaatcgttgcagcaatgacagttgtccctgttttgcgacacggcgcatgtgcgacgagcactgcgaatcggccaggtgtttttaggcgaaggcaaaattcatgtgcaacaaatttttgaattccgctaaaaaaagacgcatttttttttgtaaaattttcaaaaaatttttgaaaattaaattaaattagagctaattttgcataaaatttatgaattatatatatatatttcaaaaatgaaatggaattaaattcaccaaatttttcaactaaagccatttaaaaaataaaatattataatattttttaattgaaatttaaatttatgcaccattttgtaaaaaattataatataaaaatacatttttaaattcatcataatttttttttcagttaaaacattaaaaacacataaataaatgcgttctttaattattcattanatttcaacttataccatt

SEQ ID NO: 24782 - DNA, 1014 bp, Heterodera glycines
catcccatcatgagcgctaaaattatcagagtgccgaaaatcgcatgtgatttaagcctagcaaaaaatggtgtaagtaaaaatcgtaattacgctcaaaaagcttctcaaacaattttagcgcttccaattccttctacaatcgcctttatacatcccattatgagcgctaaaattatcagagtgccgaaaatcgcatgtgatctaagcctagcaaaaaatggtctaagtaaaaatcgtaattacgctcaaaaagcttctcaaacaattttagcgcttccaattccttctacaatcgcctttatacatcccattatgagcgctaaaattatcagagtgccgaaaatcgcatgtgatctaagcctagaaaaaaatggtgtaagtaaaaatcgtaattacgctcaaaaagcttctcaaacaattttagcgcttccaattccttctacaatcgcctttatacatcccattatgagcgctaaaattatcagagtgccgaaaatcgcatgtgatctaagcctagcaaaaaatggtgtaagtaaaaatcgtaattacgctcaaaaagctcctcaaacaattttagcgcttccaattccttctacaatcgcctttatacatcccattatgagcgctaaaattatcagagtgccgaaaatcgcatgtgatctaagcctagcaaaaaatggtgtaagtaaaaatcgtaattacgctcaaaaagctcctcaaacaattttagcgcatccaattccttctacaatcgcctttatacatcccattatgagcgctaaaattatcagagtgccgaaaatcgcatgtgatctaagcctagcaaaaaatggtgtaagtaaaaatcgtaattacgctcaaaaagctcctcaaacaattttagcgcttccaattccttctacaatcgcctttatacatccccattatgagcgctaaaatatcagagtgccgaaaatcgcatgtgatctaagcctagcaaaaaatggtctaagtgaaaatcgtaattacgct

SEQ ID NO: 24783 - DNA, 1464 bp, Heterodera glycines
  unsure (1)..(1464): unsure at all n locations
tttgggatttttttataacacaccatttcttaaccatttccctcgtcttttcttgctttttggcattttcttacagtcaagcatttattaacattttctttgtcttttcttgacatttttggaaggtacggctcggccgcttcgcggcctcgcaccattctttcggcattttttatgcataacaaaaataaatattagtaaaattttctgaaattattttatttaatttaggtgaactatttcacttgaaaaaattgaatttttaaaatttttaaatttgatttagtaaaacttttgttaatgaacaattcaattttatttttctgctgcttggtgatcataaatttatttattgaaaattgaattcatttgcttaaatatgtaagaaataaagataaatatcggattgatatcagataagcacattcttttaacattttgaaatgttgataagcctcgctttaactttaatttgtacaattatttggtgatttgtcttttcactaactcgatttaataatggaattttctggaaaaattgtcagtatttttttttgttcataaattttatcagcactgaaggtttttcttcaaaaaaaaataatttaaatttgatcctaaatatttaaaataggtcatttttgggcaaaatttgttaaaaataattttttttcaatttttaaaaacttttcttaaatttttttttcgctgttgccagagatttaaaccagcaggcttcaaattttcaaaaaaattcagcttaaaacacgaaaattttttctcctcttctttatctctccttttgcattctctctctttcactctcccaaaattaatttacagacaattatcattaatcattttgtcacatgacactgccagcaagagaaaattctcgaatttttttatgcaatgcatccggccttgaaccatttgggcgcacaataacaaaactaaaatcactcagagaacagcagccaatcaaatacaaaaactggtccaaaaataatttaaaataattaattagcatttatttttggtgaaaatgcaagcgaaattcatgtgggcaacatcgatcaaaaaattggaaataataaataaaatataatttagttattatgaaaagggaaacagttacgtaattctcaaatcgaaacaaatattaattcattttattattagattagcttgctttctataaaatttatttcaatgaaaaaagatgtacctaaataaagttcaaaaaataaattatgctgagatcaattttcagtaatttcaaaaataatttgccaaattattttttcagaagctttttggtacatggaagaaatgccagttgtgccgataaacgcctcatggaaaattttgaagacatagtgtgtgtgatttgttaacttttgtcaaaaaataaccaaagcatttttatgaaatnttgggtccgacggtgactttaagcgcagc

SEQ ID NO: 24784 - DNA, 1194 bp, Heterodera glycines
  unsure (1)..(1194): unsure at all n locations
tataattatgaacaattgcggagtaatggtaccctgctggtatttaagaaaattcttttatcataattccggttcaagggtgattgtgcctgtcatgagaaaaaaaaaacaaattctattacggtatgtcagaaaatccgcccaattttctaaattttttttattaaaaacttctttttctatgtctaatattggcacttttttgcagccagcaaattatgcccgctcactcttcgacagcgcttatatgtattttttggcactgaaccgaaccatggacaaatatggcatcagcaaggagattttgcggaatggcacactggtgatcaacgtcaccgcgagcgtgacatttaagggtaacccaaaaaaaattgagactgtaacaacatgtactgtacatcaaaaaacggtgcaatttatgaaagaatcaaacgaaaaaaactactgtaataaaagggctttaattaccgtcatccaaaaattaagctctctctgcttatcagagtgattagatcaggtgatcaggaaacagactaatcgataatgaatgacttttaaaaaaatgtacaaaaaaaaactttagaacaattttaaagaggtaaaacaaaaaataaaaaaaattactgtaacataaaggctttaatattgtaacccaaactctcttctctctctctctctctctctctctgcttatataattaaatcagatgaaaccagacaaaaatcaggcaaatagatttttgcttttcaaaaatgttctaaaacttactgcaatttaaaaatggaataatttatggtaaaatcaaaaaaaaaaaattactgtgtattaaataagctgtaattaccgtaagccaaaagccgagagctctctctgcttatagtaattaaatcagatgaatcctgacaaaaatcaggcaaatagatttttgcttttcaaaaatgttctaaaacttactgcaatttaaaaatggaataatttatggtaaaatcaaaaaaaaaattactgtgtattaaataagctgtaattaccgtaagccaaaagccgagagctctctctgcttatagtaattaaatcagatgaatcctgacaaaaatcaggcaaatagatttttgcttttncaaaaatgtacaaaaagcacttggtgcaatttaaatccccaatgagagaagagtatgtaaatatggagtatatgt

SEQ ID NO: 24785 - DNA, 1111 bp, Heterodera glycines
  unsure (1)..(1111): unsure at all n locations
tctgctanttttgaaaaaaattattaacaaaaatgcaagaaaacgaaaaatacacccctgagaaatggaaaattttatcaaaaattcatattcaaaatttatttatttatttacttgactacatttttgattttttggctgcctttttcaattattttcccaacttatacaccattgatagagcttcaatagctctacaattttactcagaggtgatctttcgctttttctattgataaaaatggtttattgtttttttgggaaaagataaaaaattcaaaaaaaccgaaaccgaaacggtataccgaaaatttttcttcgggttttttcggctcggtttttttcggttttttaaccgaaaccgaccgaccgacaaatttttgagtttttcggtttcggtttttttcggtttttaaccgaaaccgaccctcttgtccggtctctaatttttattcagaaaacgagaataagttaggaatctagaaaagatatattatcttccttgctatattttttatggatttaagaaaatttaaccattcttatcgtttttcgaaatttttagattttttatgatcaatattgaggtcgacaccaaaaaagccgaaaatttacaatagcaaattactatgctcttaaaactggttttatagtgatttgaacacttcagttagaaattccctgttgagcaaaagagaaatgaactgggagcacaacttttaagaattaagagctcaaatggaatttattggaggaatttccatattggaattgtgcatcaaagcatagagataaaactgaaaaaagagagcagaacaacaacaggtgaagagaagagaaattgcagagggcaatgagcaaagaaggaaagggatggaaggacagagagagagagagagaaatggggaaaaacgccggggggggggcagaagagaggagagaaagggaaggagaggaagcactcattgtacacaaaactaatcaaacagacgggggggggggacgacagtcagtcactcatcatcatttcgtcctcctcccccttttttcttccctttgtctctttgccgatcgtttgtcgtcctttgaagacgaatgagtaagcgttgat

SEQ ID NO: 24786 - DNA, 1313 bp, Heterodera glycines
  unsure (1)..(1313): unsure at all n locations
aattaaattttcgtggtacatatctagtgaaatgtttaaaatttaaagaataatagagaattcttaggctatcgatgatattagataagtttgcacaataacatttntaaaaagttctgtacaaaaattccgacttatgattttgtggaatttaataatgataacttttttatactattttttaaaattttaaaatttaatattctgatagagaacacatagtgatattgaatgacaccatgaaatattatttggttgaattgggccaagatatcaattaatatgtccttattttttattttctggacgatagcctggtttttggagcataacttttttcatagttagtttaattgaatgaatttattagcattcgataacatgccaaatttcgaaaattatgttaatttttagaaaacttatggcctaaaaacttagacaaacaaggttttccgaaaatttttgctataacttttctgaaacttaacaaaatttttcgaaatttggaatgctaatagataataattaggcctatcaaatgctattatggaatttaatttttgtattattttatttggaatgatttgctttagggttgctcccctaccccgagcccccgacccgacccgagacgttttttggacctatacccgacccgacccccgacatgtcgcctcccgaggtccccggtcgccgactttttgcccccgaccccccgacaataattcagggaattggggacttcgagcgttgtaaaaatttaaaaagttaattcaacaacgaaggggggaatgttgaaatttatgaaattttgaacaattttcttaataaaattaattaaaaattccgaaaattgtttcggcggcgtctatcggcaccgccgaccccccaaaatccaatttttttttgcaaaaaattcccaaaattgcaaaattaggtattttttaggaaaaatctgttaacaaattttaaaatgtaaaaaaaaaaaaaatttcctcgcggctcctaatagcatcgccgcccatcccccttctctgttgccctaagttttttgaaaaagagcgccgcaaaaaatggtggtcaaattggatgttcagaagggttcgcaaaaatttctgttaaactccctcccactttccatgtatttttaaacagggcttccaccatgaacaccaagcccgaaaaataagattttaggctcaaaaatatgaacaatttttttaaatcagttagtattaaattttatatttttagtctccctattatcatttttaacaattttgggaggaaataagcaaatcgtacatttaaat

SEQ ID NO: 24787 - DNA, 1029 bp, Heterodera glycines
aataatatatagaaaaggcaaaataaaaaaaatcacaagacaatattaatcaataaattaattatatggacagaatcaataatcaatatttgaaccaagccgagaaaaaaattaactattaattcctaaaaaagagccttacgaaataagagagaaaacagcatgcaaaaaaaaaaaataataattcataagaaataaaaacaaaagtcatttaaaattggaaataaaccaatgcttacttactctggtaaattttatttaaaaaataaaaatttacaaaagtttttactgcttgaaaaaataaataaaaattaatttaaaatttaacaaaagcaataatttataaaagagtaataataacgtaaaattattttatataaacaaaaaaaataaattacaaataaatatttaaatgcacatagcaccaacatgaaacgcaaacagtgtacgaaaccatgaggtaaatataattaaatattttataagatgtaatgaataaaaaattaactcaagattaattttttcaattaaagaattaaataaattttctcataaaatttttattaattttggaatttttttaaatatccaataaaacattcaaaataataataataattttggcagaagagacattttcacacaatgaatattataattgcttaaaatgttgaattgtatatatttttagagctcgttaaaaaataatttacgggagcgggagccgggagcgtgagttcgaagtcttacgggagcgggaatcccgtaaactcccgctcccgtgaaaatcccgtccatttttaacgggagtcccgggcgggagtaattcgaaaatttaattaaaaactcacaaaaatatttttaatgcacaaatttgaaggacaatctttttattaaaggaaaaatatgtaagcagaaaactagaaaaatcagattttgggttgaaaaccagaaaattttttcaaattagttcaaataaattttttttgggatattctaactaaaaaaattttaacattatattttcga

SEQ ID NO: 24788 - DNA, 1128 bp, Heterodera glycines
tgaggaataatgaagagagaatggagaatttaaaaaaaaggaaaaaaagattaaaggatgatttttgaaaaaatcacatttaaattttgaaattttccgtgcaaataaattaaaaaaactcatcatataaaaaaaaaaactttatttgccctgagagaaatggattaaaatattattaaatagaaaaaaccaaattgggatcatttttgatcaatctcatcatccatttcatgcaccatttggattgtctccgtcggcgctttcttaaaatttaactatagaaattttgtaaattaaaaattattcacttaccaaaggaaccaggcaacaaaaagtatgacgatcagtgcgatgcagaaccagctaagttggaactgtcgatggcgtgctcctcaaatatcaaaaccagaagcgacaaaactgttttttgaattttaaaaattgttttacattttcgaaatggtaatgttgctgctgtcttcgcgattgtcgtttgtagattggtaaaattgtcgattggcgagccattggaagaatttgcagaaaaaatgtaaaaagaaatgaatgagaagggcattctcgtcgtcgttgacggcatatgtttgctcttctccgttcgcgtctcgatctactcacaatatttattacgctgataagaaaaaggggccatctcaaaaaattatgcaaattatataaagctaaaaaaggatgaacggtcggcccggtatataaatggggacaaacaaatttagtttcattttgatcagattttcaaaaaaaaaatatgagtatcaacctccacgacaaaaagtcgctcatggacaacattttgccggtggttgagataaatcaaaccaccaatggcattacggttagcagtgaacgaattgcgataccacgaacgattcagttcgacattcttggcaaatgtcgagaatgtaagtcaaccgaatgtgagacggaatggtgcgtttccaaggaaggcgttaccatttggtgcacacgcttcaaaataagcccccgttttgtgccatttgatgtgatctacgatttgtctggttacacatttttcaaggtttgtttctgagttctgtgttttttgcatcaaaaaattatttactcaacaga

SEQ ID NO: 24789 - DNA, 1316 bp, Heterodera glycines
  unsure (1)..(1316): unsure at all n locations
ataataaagttgagtgtttgtatgtatccgccttgctttgaattggcgtggcgttttgttattattttgcgttaaaaaatgatttgaaaatgaaaatgtttttgttttgttttgcgttaaaaaatgatttgaaaaatggaaatgtttggttttgatttttcaatttgttctgattaattaatgcatttgcatagtattttatgtctatgcttatagttagtctattattgtgctttagtctttgtctattttttatgatttagccaaaaatgaattgtttacttaatttgaattttctacaggtttgatatattgactttctctctgccgcttcggcatttttttttttcatcaacggccggtcggccatccatgtcttacccaatacttttgatgtgtgattttagttgaagtttgttttgtttggtttttatgcaaaattatgtttataaaatttagatatgacatgaagaactaaagttttatgatcgctcatggttttgtattcgttgtgaattcattcacaagtttgaaatctgccgtggccatcattcaacagcttgtccagattgagtttaagtgcctcatcaaagtttattgggattaatttgtttcgaattatattttgctttgttatgttaattattatgtaaaatttagaaatgaggaccatcatattgaagaaatgctgttggcttacaattggttgtgatttcatctctgaagtgttgaacctgtcggtcggccactcaactttttgctcactttcgagaaattcactacttcaactttggcggccccttttgtaagtgggttgggaagagttgtggtaaatttgccaaatagccaaatatctgataaaacatttgtgttcgttaatttgagtttagtgtgacacaattatgtgtgtcatgtttttgataaacattagtgtttgttatttgagtttagtgtgacacaattatgtgtgtcatgtttttgataaacattagtgttcgttatttgagtttagtgtgacacaattatgtgtgtcatgtctttgataaaacattagtgttcgttatttgagtttagtgtgacacaattatgtgtgtcatgtttttgataaaacattagtgtttgttctgtgacttaagtatgagacactaaagtctggcatgacattgataaaacattagtgtttgttttgtgacttaatgtgcttctcaaatttcagaaacccaaacaagcgtgaagcaatgaaacatgcacggtctcatcattggactttttaaattattttttgttttgtttatttgtttgcaaaatgntaaaaa

SEQ ID NO: 24790 - DNA, 1597 bp, Heterodera glycines
  unsure (1)..(1597): unsure at all n locations
cattaaaaccagataatggggcgttcgctcttgccgttttgatgtcccgaccatnagagactctagggttacaaaaattacgcttacgttccaattatgggagcccctggtaaagagtagatcgaggaaagtattctgcatattaagcattaaatcgtcaagtatcagtaaaaggggtttttcctgttctttaatcttattcatgtccggaatcccgttaaaagtctcaacgccctccccgattaatcctaaaatactatcattcatctcaccataacaataaagaattttttcaggcgatggttcaattagattcttatgatgctttaaaaaccgtaatagccaacgggtcttaccactcccagtagcccccgagagaattagagtgaacggaccgcgaaacacttttaatgcatcttatttatttgacctatttatattttcatagggaacatgtttcgcgcatttggggcatagccagaaacacttaattttatgtggacagttcattttttcagtttaattttattttcggttgctatttatagaagggttatataaagggagtgaaaggacaatttgattggtacattgtatcaaaatgcaaaacccgataatcgtaaatataattgctctcgctaatctcggtaccggaattaaactaaactctctgacgatcaccgaatgcgaatttaagtataaccctagaaaattcaatgccgcagttatataatgcacagatcccatcaaagccacggcattattatgggaatccgggaaaatgatatgtctggggacgcaaagtctgatagactgtgaaaatgctattaaacaatttatagaaataattaagggctcggggtgtccgggggcttcttacaccggacacacggttgaaaatattgtttcgactttaaattcggacgtgaaattgaactgacgagtttcgaaaaaatcgtcgtgcattttatgaaccggaaatattttgtgggttaaatttcaagcggggtaaaagcatgacagcgttaattttctggaccggtaaagtcgtaattacgggaactaaaaacaattctgaaattgaggaaatgtatcatcatattctcccctatttgaaaatggctcaaaagaagttagggagacgataaaaaatttttcatttattgggacggtcccccaatttatagttctgttgggtatttattttgttatcgattacttcgcgcggcgccggcatcgcggcgcaccggtggggcggagaggaaattcatggttttggcaaattttcaaaattcagaaaaatcatcataaaaaaaaaatctcaggatttgagaaaataaaaccggcccaaaaggtttgggatcaaaaagatttaaatttgcaaaagaaaaattgaatttccttcacctgtcacttttggtgacaggtggatgattgatgaccttcccgcggcgctgcgcggcgcgggtgaaaaaaaacacccgcaacaatttgaggaaatccccaaggcgacagagttcaaagaaaatctcataggctcaggatgtgagcgggcaacttcaaggggatgcacccctctcataggtttgcgattgtg

SEQ ID NO: 24791 - DNA, 958 bp, Heterodera glycines
aataattagcaaaatttgacaaagtataagctgctgctgctgctgttcaccacttagtgcaactgacacaacacaaataaatgttgacattgttcaaattggttgccgaattttggggggcctcccactgaatcatcgccgtctccccaattggacatcgcttcatcacccattggatagcccataaatcttcgcttgttttacacagtgtcagtttttcttgggtccgttcattcaccaattcaaatggcccaattggcacagatgtgggcacttcaaattgaattgtgtaacgggcagaagtggtggcacgaacaaatgtctaaacaatgggaaaatgcaaatataaattttttttgtaagaaaatttactaaaaaattaagaaattttcagtgatttcttggaaaatcctttaaaaaacttaataattcacattaaatttttaaaaaattgtttaaaaattttcaaaagtttttacttgaaattttctggtaaaatataataagatgtttttcctgaaatttttgcaattcttgagctaaaatttcaaaaactaaggtaaatgggcgtccggtggtgccggtaggcgctgccagggaattttaatgcgattagttaacagattttatccaaaaaatgatgactttggttaattttgcggctttttagtttgctcaaaaaaaagaatgaaaaaatttgaaagttttttatttgttataataaaatcagaaatacgaaatgttttggtttaaaaataataaattacaataaagttttaaatgaaaaaaaaaattggtcttgcggacctgcttgaaatcgttgatccatccagtgtctgtgtccatactggtaaatgtttggttgcagtagaatcgcttcggctgtccatcagtgcgcggtgcgtgcaaccatttggacaacgcttggccagcaaaagaagttgcagcatttggccca

SEQ ID NO: 24792 - DNA, 1608 bp, Heterodera glycines
agcatctataatctacccctattcatttccatcattcgctattgatgaggatgatatcattagcattaaacttgttaacccgaactatagattcctagacgacaaaaaatttgtgcatatagaactaaaggttccaagcatgcaattttcaagtgtagaacatttacggctcaccctgaacagcctcatacgtgaggtgtatcagcagcagcaattttcttctggccatgatagagctagccggacgaaacggcaggtcacagacctattttttcatgaaaatccagtggattattgggaaaagattggcgaattacgcaccaaacaagagcagtttgaaaaggaggtaaaacaggaggagagtgaactttcggcagacactacggatgtggagaggaaaaaactgctacaaagcgagcttccactaaaacggattcgtatgcagaggaaaaagtatgagctggaagagttggaacgtgctgctgaacgtcgtgatcaggaaagtccggagaatgagcaaagaaagattagcgatttttccaacatcatcccgaagattataacaaaaaattgaacgagtcaagacttatattcacccaacatctctcggggctgcaagaggtgatgagcaagtacattggtgaaaaagatataaataaaattcgtcagcttaacaccgaggttggcaaaatacgcacaaaaataaaacacatgcagcacaatttgaccatctttgaaaatgctgcgcttcagcgtgaccaccaaaaatctttgtcggaatatgaggagctcagccaccagcagaatagtgcatttgttgaggaattttttcaaaaacatcccacaaattattggcaaattattcacaacaattataggggtcttacagaacattttcagaagatagaacaactgcaagcaaaggcagtagggttaaaggataatgcgtctttcgaaaagcaaatagagcgagcaaaacagctgattgagtacagacgaaagagattcgctgcgctggaatttgaggcaaaaaagcgtgatgagcaacaacagtttgttgcagcagcagcaaatacaattactgcaccaactgcgtcggcattgatcggaagggaggcgttaaaaaaacgtacaggcatctctgccagtacggatggtgaagtaggtgataaagcagatgtcggtccacaaacagctaccacaacaacacatggggaggtattaaaagagaaaatactggagcagcaaaaacacacggacaaggatgataaagcagatgtcggtccacaaacagctaccacaacaacacatggggaggtattaaaagagaaaatactggagcagcaaaaacacacggacaacgatgataaagcagatgccggtccacaagcagctaccacaacgcatggggaggcagtacgtgagaaaatattggagcaacaaaagagcacggacgatgatgataaagcagctgtcggtcagcaaacaatcccaacagcaacaaaaacacatggtgagacgttaaaagaaaaaatatcgcaagagcagaagcacctagttgacgataaatcaaattctgccgatgcaaaacaagatgatggtagcggt

SEQ ID NO: 24793 - DNA, 1737 bp, Heterodera glycines
tcctcgttgagcactttctgtcgctgtggtttcgaggacattcggccctgggcaaagaacacaaaataagctaattaatcattttcaatgaaattcaaattgataaccaaaacaaaagccaactttttggtacattctcaaattacagtaattaattgttactaattgccttaccaaaatgcaaagaaaaggctgtgaatgaaaaggaagtgaaagacgttaaaataaaaactgcgcattgaccaaacgccggtgggcaaatcgatggaaaaatgcggggaaaggaacgaaagaatgtggggggaggggggaagaacgatgggaaatgaatgaatgatcaataggcatgggataatatggtgaaaaaaggaaaaagcggacagatatggtgggaaaagccatagggaagagacagacgattttgtaacagagagagaaagagagttagagagagagagagcgagaaagagagcgagagagagagagaaaagaaagagagatggcgggtgatactgatcaaagtttgtagagaaaaagagagtgagagaggtgtgattaccgatcaaatttggagagaccgagagaaagtgagaaagagatgaagagaataaagagagaactgatcaaagtttggagagaccgagagagagtgagagagagaaaaaaagagagaggagagggcgggtgattaccggtcaaatttggagagaaatcgagagagagttttaggagagtacggtagattcaaattgcccattagtgaagtctttcttttaccgctttttcagattttgcgttatcaatatttttgtgccgtttctttcttcttccatttccccccattatcattttcttcggttcctttgctaattcgccatttattttcttgcgcattttccctcttcacttcctccaaaattggattagcatcacacttttttgttcgctgtccttttaattaataggatattttgccaataatgcttcattcatttagagtgatgagtgaattttaaattaaatacttggcgaaggaatgtcagggccaaaaccgaccattaaaaatgccctgaaatggtatttcgcttttcttttcaaaataaagagagacgacagcgcataaaatctttcttctgcccctccctccgcgaaagtgccattcatggcatcattcaaatgcccatcttcaccatcggtgccatcagttttgactttggcaccccctaattatcaaaaagcagattctaatgagctaatgacaatttttggttgtgtgatgagggacgaatataaatgagagaattattattacacttcctgctccatttacataatgagctgaatggaaatccatctcaatcttttgccaaaaaggcgaaatgccagcggaaatgaatgaataactttgcattccgacgattaaattgcaaatctccgcgagttccacgggggtcactttcgaaatgccctcctccgccaccccctcaattcgtcttcttcacccccaccttccaaattccccctcccaccaaaatgagactttggcactctcaaaaacattctctccctttcgattggttgagaaaaacaattgcccttcatttatttctccgttttttatcacttaaagcgcaattcgccccttttgaagtacaatattttgtgcagaaccattgtcacctgacattgtcaaacatgcgatgtttgcctcaaattctgtccttttggctttgcttt

SEQ ID NO: 24794 - DNA, 1650 bp, Heterodera glycines
gttgttgcttcttatctcggcattgctcaacagccaaaaagtctccattacgcctttgccctataaaaagagtaagattgtacacactaattaatttttaattgtcttttttcgggctttctaattgtttcattttaatttgatttgtggttaataagtggtgctttttttccccagcattctcatatcattcgtatattttgttaataatcctgtggtggtgccttagcttattagatcacggcatttagtcaattattcgtgctgattaatgatgcatttatcgcccctccccttaccttaattatcacttcgcctcgactttccactgcgtaaccatcaaaattattgtgcagcagcatatacgtttctttggagatgtgaatttagttagctgaatatgtaaaaaagattcattaatggtttttaaacgaacggcttgaagagctttccatgcgcgaggcggtgtttaccgtgtcgccaaacagacagtagcggggcatggccaaccctaaattacaaccaataaaatttttgataggaaaatgaatcaaattctaaaattacccattttaatttaattacacaaaatgtgtttaaagaaatttttaccgacaacgcccgcgacacatgggccactgtgcagtccgatgcggagacgaatgcgctcaaaggaatggtccgaaattcggaaggtttccaacgctttcaaaaatttcaatgccctaatttaaaaaataaaaataaaatttttgaatttatttatgccatttcttacatgtcagcacactgtttggcatgtaaattgccatttcgattgggaaggccggacacgcacaaatagccatcgcctaaaggcatttagtaaaattaaatacataattagtgaataataaaaaaaatgttaaaaaaaatatatttttaaatcctaaaagacatttaaaaactcaaataataaaagtgaatcgattctttattaaaattatgacaattttttaatcgtaaattagctgaagcatatatccaccatttatccacatgcattatttccttctatatgttttgggaacaattttaaaattttcaactaccagcctagccccaaaattcaaaaatgtcatttgtctgcttttaattaaaaaaattcctcgccaattgattccactttgtacatgtcgtgttcgtcgatgatcgcgtcaaaaatggtgtacagttcgttcataagattgaccacctgcagcggtcgcatttggttggacagttccgcgaatttgacaatgtccgaaaagaacaccgtaacgcactcgaagtgctcgggctcaaccgactggccaagcttaagtcggtccgcaacttggcttaattgcgttttggtttttgaatcggctttacagtaagggcaataaaagaggggggtgtaatagagagggagagggccgcgtgagagaaaaaaaggcaatttttttaatcacttttgctttaattaccgtggcatcatgcggtagaggagtatttccgatttgcgcttttcttcctccaactcgcgcgtccgttcatgcacattctcctccaatttgttggcgtactgctccaacatgccgaacacatggtccattagattgatgcttctgcctgcattcatttgccgca

SEQ ID NO: 24795 - DNA, 1954 bp, Heterodera glycines
cctcttgcgttgcgcatatgtgctcaattttcgcgcttcttccttaagcttttttagaattttaaaaagatttgcaaagattatacaatttgttacttttaatcgccgaccagaagcatattaatgccagttttcttaaaatgttattattttcttattcaatcattgatcaattgttcccacccatatcattcattttatttttttcaatcactctgatcactgatcagttttgccgtttatcactcactcactgatcagtttgttctgtcgttgattttcactctgatcaccctctcactgatcagcagtttgtttctgtctttttcgctctcctccgatttcgccccatttttgctcagattgccctatccgttgcgctgttttttggcttccgtcgactgctgccttttcctccttttgcttatccttttctccacttccgtctccaatgttcttcaagtccttttctttctctctttttcgattaatttctttgattttttttagtccgctccgatcatcagctgtcaaatgaccatcattttggtcaatatcatcgccctttttctgctccttttgttcatcgctcgcattgtttgacatttatttttcattttcattcgtttattttctttctaattgctttaattgtccaatttttagacagaatacgagcgcaaagttgaagcttcatgcaatgtggcatttaagaatgaggagcgcgatgtgcagctgatgcaggacatcaacaagttgctgatcgagaacattttgccctcgagcgttgctgcgaaattcctatcgcatgagcagcgaaaaaaggacgtaagttgtaaaaggattggacaaagcaaaagcagacgatcagccgattgattacactgttttgagtgatcagactgatcagtaagcccgtatctaatcgataaaaatggaagaagaacgatcagtttaaatctggtgatcagtcaataataactttcaagacgagtgtggcataaaatagtctccccaaagcaatcgcaaaaaaaaaaaaattaatttgacccccctttttgtgttatttaggaattatacgctcgtgaccatgacaatgtgtgcgtgatgttcgcctccattccgaacttcaaaaactattggagcgagtgcgaccaagcacggaaattggagtgtttgcgactgctcaacgaaatcgtgtgcgaattcgacaaggtcattcattcatcattcattcacttgcttaataatttgtgatttaatttttaataaattttgtatttttaatttaaaatttgacaattgtaattttttattctaaattttgatttgggtttttccttttcagttgttgtccaaaccaaaattcagctgtatcgaaaaaatcaaaacggtggccagcacttacatggccggtaagagagggcgaataaggcaagcaattaaggtgcctgatgctgattgattatcccctcattagacattaattagcaaatatccattgaaaagcgggcggtgcacttctcccaaattagaaaataaattcatttttttggcaaaaaatatttaaatttcagccgccggtctcaccgattccgacaccgcggataacagtgtgagtttatcttttaagcacattttgcatgggagtgaataacgcgctgcaatttgttcttttagcccgaacggaattccaccgttgtaagtggggccaaactgtggccaaatgaggcgttaatttctgtccaaaagatggtcgaacttgcgcaagcgatggccgcggttttggaccaattgaacgtcgactcctttcagaatttccaacttcgaattggcaagtcaacgaatgaatgtttttggcacaattgtcgatgcccttttggtactcatttgtcaggtctcaatgttggccccgtcatcgccggcgttttgggccaaaagccacagtatgaca

SEQ ID NO: 24796 - DNA, 1125 bp, Heterodera glycines
tcaaggaaacagtgtcaataattattttagtccggataataaattataaatattttagtataattttcacgcaggtatttcttttttatatctcatatttattcttcttattagtccaatatttcggatatcagcggttttttaacgcacttcaaaaagatgcgaaaagtttcgctgatattaaagcattcaattaatcgcattttcatagtcataaaagcaattttttatataaagcgtcttgggttttttggagttctcaatatggacattattaaaagtagggcatgtgcaataacatcataaactttaaaaattaataattttaatgaaaataagaaaatgttttatatatgcttgaaaatttccttaagagcaatagactaggatttagaaaagaattgtttagacaatcatcgagaaattgtcggagtcaaggaaaagtgtcaataattattttagtccggataataaattataaatattttagtataattttcatgcaggtatttcttttttatatctcatatttattcttcttattgagtccaatatttcggatatcaacggttttttaacatgcttcaaaaatatacgaaaatgttttatatatgcttgaaaatttccttaagaccaatagactaggatttagaaaagaattgtttagacaatcatcgagaaattgtcggagtcaaggaaacagtgtcaataattattttagtccggataataaattataaatattttagtataattttcatgcaggtatttcttttttatatctcatatttattcttcttattagtccaatatttcggatatcagcggttttttaacgcacttcaaaaagatgcgaaaagtttcgctgatattaaagcattcaattaatcgcattttcatagtcataaaaaacaattttttatataaagcgtcttgggttttttggagttctcaatatggacattattaaaagtagggcatgtgcaataaataacatcataaactttaaaaattaataattttaatgaaaatacgaaaatgttttatatatgcttgaaaatttccttaagagcaatagactaggattaaaagaagaattgtttagacaatcatcgagaaatgtcg

SEQ ID NO: 24797 - DNA, 2368 bp, Heterodera glycines
ccccccagcaacagagttttttttttttgcgagaaataaaaaccccaaaaaattcaggtgatacttttttgtgcccaccgaattccatacgaaaaaatcctccaatgccttttgttctgttccaaaatatttttcgaattgcctttactaggttcttacgaagttttagggttgttcggaatcttcgaattccctaagataaaattggttggtgtattttcatttttttgagagtggggttcgtttaattgcgtccataaaaaagaaattaaattctcctataaattactctccgcctcactactgtacgacattacataattggtaatattttgtatccagcatggcatgctgtagaataatcagattgaagggcgcaatagactcggcggaatcgattcaaaagtatttccttcaaatgatcatcattcaaaaactacaacccgctccgcataatttcccagcgtgcagacaattccggtaactgaaaattattgggatcagaattgcctaaagcttccgagccatgagattataaaggaaaccatgtacttttacccagttttaccgactctccgcacatatatcatgatccttcaaaggatttcagcgcatacatcctagggcatcgatggcacatatacatgttcattaatgttctattgacgtcttaataagctcctggatccttccacgtatatatccgggtttttgactaaaactgcgaagtacgaaaaattgagttctcgaacttttgttcgagtccgggttcgagactgagccaaaataagaccggattcgtgctcggcgcctcagattacccctaaaaataattttcttaaattttatttaaaaaaaattttcggtaccaagaatctatacctttgccggcgggtttttcaatcaaataaaaaaacaaccaggcctaaaaaagtgagatgccgtccattctttttattaatgattcaaatatttttcctttttgtttatttttatttttttgtttaacttatttttttccatttaggtacagtagttatttttttgcaaagttggcttacgccaaagttaaaaatccatgaaaaatttcaatttttattcgagttcgggttagggattagaaattagtcaagatacatgtcagattcgtgattagcgacctttaaaaccccggataaaaaattatcatggttttttatattaaaaaaattttgcaaaacaaaagggtccccccttttgaaaaacttttcaaaaactgtcactttccatatagtgccaaataaaccttacaaattaaatatacaatttttataacctattgtcaataaatcaaaggctcacttcttttatttagataattctttgtaaaggcataccgatttttcattaactacatcctaacaaacaccctaaaataatgcaagaagattcgcgtacatcacttaacaatgcctttttgcttgcttataatactcgcatgaaaatggagcggtatataactaaaatattatacatatacagtaactcatgcctaatttagtgcgacgaatggtttccgcgaatgccttcagatgcttgcggcttacaagcagcgttcgcactgtaataatgcgcgtcagagtaagatgtcgctgtacaaaacgcaaatgtgccataatattcaaacgctgggcttttgcaagtttgtttaaatattaaaattgaagaaaatgccggtcagagccattttttgttttcttttagattcggttccgactgcttgtttgcccataacatgaaggaactgcgttcggtcccttcgaatctgccgaacactcctcagttctcaacggcttctaacgttccggtcttcgagttcgagtcggagttgttccagcacaaccacccgtgcaattctttgtctctcactgtgaatgccgcgttcggagatcaaacgtcgaacatgctcaaccgtagcttggtcgaggaggaattttataaacttacttcttaatcggaatgggcttttcacatttgtaacaattgtttttgtcatatactcatcaatcattgaggaattttaatatgaatgtaaaaccacttatccttgatatcctcttagttttagtatgatttctttaattgttctacgatatttatttatttttattacgtaaacgataaaaaatgatttaattcgaacgaattcatagtttttcatgaatgtttatttctatcattgaatttcttacttattttaaagcatcattatgtatattgagaattgagaaatattcaatcttaaattaacacttatcacgccagacatgttttcacctgattcaaataacgggattttcaatggaaatttaacaaacgacgaatgccg

SEQ ID NO: 24798 - DNA, 1634 bp, Heterodera glycines
attcgtggctcagctgcctcaaaacacccctagaaacgtgtcctcctaagttttagaaaaaaaatttaaagaaaaaattttcaggattaatgatctaggcgattgccggcggcgccaaaattggcatgaccccaaaaaaagaaaccttaaggtgctcaacccaccccaaaaaatttcataccgaaacctcgcgaatgcggatattgttgtaccttccctttttagcattttaaattagcgcataaatacccatttggcgttttgaactgaatacaaaaaaaagtaaaaaaaaaaaaaagtctcggagaaactttggtattcacacaaatcagtcgattttgtactcaattaactatagtagtcaaactattgaatacctagatgtgcaattgacctttcatatttcttaagggcttctgggttttttcctaaaatttccaacttgtttactaataatgcaacaagtggcgatcattggccataaatcattgctcggtgcccacctggtgaaggcgttcaatgacacgttgccagatgtcagaaagaatttgtgggactatggcataaacagcatggaaacgttgcccactgctttgcagaactgtgacctggtccgtttttggtcataattttgcatccaaaaaaataccaaaattgtagttgatcacttttactaataccatgggagtttttaggaatttcgggttgtctatttatggtagggtgccattttgactattttagaagccgaaatcaggcaagaaaacaacagaatccacaatttcagtaattaacagccctagtttcggtaatagtttaggtcttagatagtagcccgcttcaaattttcaaattattgcggtttggggctcttgtgcagtttaggccccatatacaaaattttttacattttagaataaaagaagccaatctataagttttcggggtcgctgatcgcgaatccggcatccatgtcggccaattccaaatcccggacccgaactcgaacaagaagtcgaaaaattaaaattttttatttttcatttttagtctaaaaatagtttaaatgatttttaattgaagcactgatgactttcagttcgtttccgtgtatttaaacaatgctgaccaataatatgaaaaccaaaaattttaattttcgactttttgttcgaattcgggtccgggatttggaattggacgaaatgaataccggattcgcgatcagcgaccacgaaaacctatagattggcatattttattctgaaatgtaaaaaatttttagtatatgggcctaaactgcacaagagcctatttatgtaccttcgccacaggaggacgcggcgggagtctgctgccaccagcagaagcattgatacgtttgaagtccttgccagcggccagttgctgttgtggattgtatcggatggctgtaccgacgcgaatcccaccaggcccggacacaacggccgcctccctccccttctcaccatcaatgatgtcaaattccaactgaaaatggaagaaccaataattttgttatcgacccgggctttacatcacaaagcatttggctggggtgacttgccttttgcccctcaatcagcacgaaatgcatttggacctttcgaaca

SEQ ID NO: 24799 - DNA, 1839 bp, Heterodera glycines
  unsure (1)..(1839): unsure at all n locations
cagctgaacatcgtgctccaatcaaggccaatttcaccgtcgatgggctcaacactgttgttcttgcgctgatcattttctttgccattctttttgtcgttcaggtgccgtgcctttccttgccttatcttcaaaatgccattctccccactttttaatttaatttccactttaattcttgctcattttcagttgtgtttgttcgcctgtttggccctttttctgccctcaaaatcggtgccaatttccgactcggtcgacccatggacagcggcgcctgtggcaactgatcgggagaagatgacgacgatgtgccagaacaatggcatccaaacccacattttcattcccattgaagaacagaaattcgtttatttttaaggccattgaatttgcaaatgttcctctcttttaacccttaaaatttggcatctaaaaacggtgatattactaataaattcgtttttttattgtactgcatatatacacagattactgatgataaacatgattcaatctcttccccccgttgttcaacaccaaaaatttcggttgtttgttttagctagggttcgccccgctctgatctttttttccaaggatgcgttttttctagggtaaaagagcttctaaactggttttagcgtgtattttggaaaaaatttcaacttttcattcgaatccggggttcggaaatgggcaaacccgagttcagattcgtaatcagcaccctcgaaaacccgcgtgaactgtttttttgctcaacataaaaaaatttaaattagagagaccccctattctttaggattgcgcaagcgatcattttttgactgaatttaagcgttttgggaaaaaattgcatgttttaaacaacagtttttagcacatttgcttagagttaaggcccgaccctgagctccccatttcccgacctgaatttaaaaaatttgagctttttccaagaaactgcagtccggcgtgcgcccagcccaaaatttaggaccgggggtcccggaaaacgggctttttgtcctgttaagcccgttccggtccattttccaagtcactgcactgttcattttcaaaattccggctttaatttctcttattaatattatgactattttccgcttcatggggttaaaataattatgtatattctgaaaaaatgtattttatgaaataaaaaaaagttataatatttaatttttattagaggaatttaattagcaatttttgtgcatgttgatatacaataatttgatggaaaagctttactaacgtacaacagagggattgaaatttaaaaaaagagattaaaatgaacggaaaggattgaacattaatcccaacggcaacaacaaaaaagaatttgaccaaaaaaaaattggtgccgttgggtttaattaacattaattttattaataagagccaaattccattaaaatgggcagcggtttttttttggaggtggtgcacaacaaaaataagatgcttttgtgttaagtgaagcatgtgttgggttggagagcggtggtgcttttcgagactctcgagattttccgccgacatttcgagactggaaagttttcagtctcgaaaagcacgcggtaggtaaagccgggataaaaaacagtcacaaaaatattaggcaaatgaatgaataaacgatgaatacatttgaacagtactttggctggctgtgaatttgcgagaaaatggaattttgcgcataaaattaaatgaaaaaagggaaggagaggcggcgagggagtgaaataatgcaacgaatttctttgnaagacgcaaaattgagggggagagtaggcttatcaattc

SEQ ID NO: 24800 - DNA, 1562 bp, Heterodera glycines
  unsure (1)..(1562): unsure at all n locations
gtgttttttttataaaaagttacctaaagtaattaataacaatttcactgagtgatttgggaggtcgcattttcaacgaaaatgcattgttcacattggcgattggtgtttgctgagacaaattggacgcaacagagaaattagaggagcccgttgacaaagtgttatgagccgatgagagcagtttcagaggaagtctgctgccagaagtgatttgctttgaggaggaaacggactgtggccgaggagtaaacggctgggggtgtgaaattggggcgtctgcctttgaaatccgtcgcgcaagaacattggcgaacgcagcttcattttgacgaggcttaatcaaatgaatttctgaaacatttgacaagcaaatgcaattcacaaatccgggcagagaagcgggcgttgaaggaattcgacttgcgggaacattcggaagttccccctccatttgcagctgtttggcagtccgtttaaagccaatgtcactcaaatgctggtaaatcagttgcaacagttccttttcattgaatttgatgtgtgtcttcgcgacaacggcagcccgccaaagatgctccttaataaataagtgtcttctatgcaatgttaacaaaaaaaacctgagtcattccaatggcaaagtcctgtaatttggtctgactgacacactcaattaactgacgcgcttgctcacaaaaacgactatgttcaatacgtttctcaagcagaataggagattggattaatgctagaaattaaagtgaataatcatacaaaatgagaaactcacttatcagttcattatttgcaattattggcaatttgctcaaaatttggcggatcggctcaaaccgagcgattccgttcagcgcgcggcaggccaattcccggatcgagtctgcttcagttgcgggttgttgcttatgcaacaaggtagtgagaacctaaaaaatattataaaaatcaaaattctcacatcttaccataattgcattattttgctgtgaacatttccaaataattttaagcaactgtataggggtgacaaataatcgcaaattttgttgtaagttcggaagcgaagaagctggaagatgcgcaccatcgcaagtgggcaaattggatgatggaaatttcattgagagttcgctgggaagaagatcacgttcgaaattggatgtaaaacgataatgaagacccaaacagccattggcctaaacaaaaagaaacatacataagacaaaattcacaatcagcatcancctggttggttggaccgcacaaacagttcgtcaaaacttcaagcgccaaacgttgcacttggatatcgttaatgagtataccttcagccaattccataatgaggctaataatgaatttgaaaaatgattttgaaatggttttttctttacctaatcccttgaattggcgatgaacgaattttcattgtttcgcaactgtccaattgaacttttggcgacacagtggccaaccgaaaaagctcaagcaatagtttcaacgtttcaaatttgttgacggaacctcccagctgttccagt

SEQ ID NO: 24801 - DNA, 921 bp, Heterodera glycines
  unsure (1)..(921): unsure at all n locations
tgccaaattttgccattttctgcagcattggcatttacagatagaacccccaaaccaacggcattcagtgccaaacattccaacttaaaatcctacctccaagcattttccgctcccgcttcttcccgcaaagttacaggcctccaaagacggacaaaaaaaatttcacgccgtttcagcgccgccggcgctgaaccgtccaccggagcggaaaacccatatttttcccagatgcgcctcaaaaagttgtaagacccttccaccactttcagacccctcccgacagccgttcgactcaaattagtttttaagacgagttgcaacttttctctatatatgtataaactagcgtgtggcgcagtagttgctcggtgtagacagtatgctttttgtatgtatggacgggcgctgacatgagcgcttcgcgcaaaggacttcgttgctagtgcatgcgcgattttgaaatgaatttatggatgtgataagggattttggtctacaggcatcgtgaggacgcattcataattttgtagaggactttcggccgcttcgcggcctcaaaatgtgctccgcgccttttttatatttaaggtttaattcggccgcctcgcggccttcaaggggcgctccgcgccctttttatatttaaggttatatattcggccgcttcgcggnctcaaagggcgctccgcgcctgacgcattcataattttgtggaggaacattcggccgcttcgcggctctaaggacgggcgcttcgcgccattttcataattttatggggatacattcgggccgctttcggcggcctcagggacgagcgctttcgcgcccatttcataattgcgcccgttttttaattttgcgggggacattcggccgcttcgcggcctcaggacgggcgctttgcgcacgtttttt

SEQ ID NO: 24802 - DNA, 1081 bp, Heterodera glycines
  unsure (1)..(1081): unsure at all n locations
cgtcaacagcaggtggaccacggggatgatcacactggtgatgatgactcatttctctcccgccgtcctccgtcacgtcgtttaggcgcccaaaaatttttatttctttaaaatttggaagaattttaaaaatatgtttgttttggttaatggattcgatttttattggaacatcatttaatatatatatttttttattaattggccaatttgtggcagaacgttggccgtaaattattaaaacgagtgaatggtatttcaattttaaatcgttaggaaaagtggaagaaaagcaaaaattttatataaatgattttaaaaattatatatataattaaaatgattcaagggattaaaaataaattgtttaattttattggcgacaaaaagtgatcaaatcatctcaattataaaaaaatttaaaaagaaaatatttccttcgataaaaaagtgaagcaaaaatcaattttaacataggcaattatgcaaacaaagaaaaccctaaaagaatttataatgaaaaaataataattcttatttctgtacataaatataattattttcaaccaatttcatttaattgaaactcattaaacataattactaacagactgtttggcgaataataaagcaataaaaaattcaaccagtgagtaattaatcatgaattcattatcacatgccattaaccgaaaatagctatattgtatctcataagataatttataaaaaaaataatcaaaaaatatattaaatttttgtctccaatttatgagcttcagctaaatacataataaataacccaattcattaagcgataaaaacgaaatgactggaaatggcaagttcgctttgaccagcagtattgacaaattggacaccattaattaattaattaattaggtcctctttatctgtatgccgcccgtaaattgatgactatcggacaatgattgcctagccaatacataacacgtactcattctgatcatcgctatgcaccgtctgtcaataaatattaattttttttcatttaattgagtncaaaaaaatttattttatttttattttaggtttggat

SEQ ID NO: 24803 - DNA, 1153 bp, Heterodera glycines
  unsure (1)..(1153): unsure at all n locations
ttttaaatttattcaaataaaagaatccaaaggaaggacaaaagccgcttacacatttggatatgtttagatctccaacagttttttaagtttgattctgtaactttgtatggaatttattgatgagaaatctattgttttgcttaattcttgtaagttttttgtagtacggttaataaaagaatgttcagttttagttattttagatttagtgattaatctgagaaaaggcgaatttcttctttgagataaattgtataattttagagggtttaggtgagtttcttgtttaataattttgaaggctgtgatcagatctaaatattttctcctattttccaaagtggaaatattaaggtattttaacctatctgaatattgtaaaaccggtaaatggcactttaagaaaacttttttggtaaaaaacttttgaaacttttcaaggcgaataatttcttttttaatgtgagggttccaattttcagatgaatattcaagtaagggcctaatatagcttttatagactttaatccatgtctttgatgatttagatttaattttttgaaaaagcgttctgcttctaaggtaggctttttgaagaatagatgaaatatgggatttaaaagtcagtttgttgtcaattaagattccaagatctcgaattgtttgggtctctttaatagtctttcattaaattggtagggaaccttaaaattgtccttgccgaggtacagagaagctgatttttctggtgaaaattgtagaccccacatttgggcccattggcagacgcaatgtaaggcttcgtttagttttttacgttgaaattcggtgtcataacacaagtaaattttagtatcgtcggcaaaaagttttagcgaaattccttcagggattactggggataaatcatttataaaaatcaaaaatagaattggccccaggacagatccctggggaacacctgatttgatgggaaattctttggaaaactgttgattaattctgaccttgaatgtcctgttggttaggaaatctttgagccaatttagaaggttgcccttaattccaattttttctattttataaattagcaattcatgagggactttgtcaaatgctttaattatgtccaaantaaatacagtcgatt

SEQ ID NO: 24804 - DNA, 933 bp, Heterodera glycines
actttaattctgcgttggatttttgctccccacatacgtttgagtaccccaaacggacacttgaaaaaatcgatttttttgttttcggggcagtccccccgaaccgatgcgcccagatttatggggagaccgaatccttcgggagtagcttccctatagcctgtactttaattctgcgttggatttttgctccccataattgtttgagtaccccaaacggacacttgaaaaaatcgatttttttgttttcggggcagtccccccgaaccgatgcgcccagatttatggggagaccgaatccttcgggaatagcttccctatagcctgtactttaattctgcgttggatttttgctccccataattgtttgagtaccccaaacggacacttgaaaaaatcgatttttttgttttcggggcagtccccccgaaccgatgcgcccagatttatggggagaccgaatccttcgggaatagcttccctatagcctgtactttaattctgcgttggatttttgctccccataattgtttgagtaccccaaacggacacttgaaaaaatcgatttttttgttttcggggcagtccccccgaaccgatgcgcccagatttatggggagaccgaatccttcgggaatagcttccctatagcctgtactttaattctgcgttggatttttgctccccataattgtttgagtaccccaaacggacacttgaaaaaatcgatttttttgttttcggggcagtccccccgaaccgatgcgcccagatttatggggagaccgaatccttcgggagtagcttccctatagcctgtactttaattctgcgttgggatttttgctccccataattgtttgagtaccccatacggacacttgaaaaaatcgatttttttgtgttcggggcagtcccctccgaccgatgcgc

SEQ ID NO: 24805 - DNA, 1405 bp, Heterodera glycines
  unsure (1)..(1405): unsure at all n locations
agatgaaggaaaataatttttttatcaatattttatattaagttatgtttttgaattgattgaccctatcaaatgaccagtgatgcagttgtaaaatttttcggcttctcgcgcaaagtttttcctggactgtttctgacagattgttgagataatttttgcttgttttaggaatatttgagtatatttacaacaacaattttgcaatttctaaagatgaaggaaaataatttttttatcaatattttatattaagttatgtttttgaattgattgaccctatcaaatgaacagtgatgcagttgtaaaatttttcggcttctcgcgcaaagtttttcccggactgtttctgacagattgttgagataatttttctagatgtttgttcatatctcaatacattatttatcgcttttaaattgaatggaaatgaattgtcagtaacaaaaaaaatattttgtgaacatttataacaaaatttttttaagcattttctaaagaggctttttgacttcaatcataattatattgtcaattgtttgaaacgcatctgttgccgttggaagaggccgatggaaaatttttcggcttttcgcgaaaaagttttcccagaaaatggcgtgggacaaataaaaattgtacttttattatgagcaatatatatttcctatcaatttcgggtttgctttacacgtttgccaatgaaaaaatggagttttgtgaatgcaaattttaacggattttctttcgacgtgtcataagcgggttgtttcgggacaaatgcaaaccaatttgatgctattcgaatgagctaggcgcgctctaccctttcaaatgtatcaacaaagggtctaccgccactccctggcgagatatggccagtcaaagcagagtgggtctaataaaacaagaatttttaaaattttcggcatttgcccttatttcgagcctgctctacgtgtgcttcttttgccaatatggccctgctatagaaatcttgtaatggttcacgactaagtgatgaaatatttttagcccatttcttttctatccaagcatgcgaattgtttattgcattttatagccttctggaaaaagatagtcagtaaaaataaagcttgttttaggaatatttgagtatatttacaacaacaatttttgggcaatttctaaagatgaaggaaaataatttttttatcaatattttatattaagttatgtttttgaattgattaaccctatcaaatgaacagtgatgcagttgtaaaatttttcggcttctcgcgcaaagtttttccctggactgtttctgacagattgttgagataatttttctagatgttngttcatatctncatacattatttatcgcttttaaattgaatggaaatgaattgtcagtaac

SEQ ID NO: 24806 - DNA, 1022 bp, Heterodera glycines
tattattttaaattaatatttgcttttcacatcacattctttcggcgtgctttttccaaaaaacttttgtggagaaaggggagaccggcggtgccgataggcgccgccgggggaaattttgaaatttgggtgtaatttgttaacagatttaaaaaaaaactatgaggcatcatattttctctataggaaacccacgagtatacaaaaaggaaattcaaaataatttaatttctgtagagggattgaaccaggggaaagaagaagggaaagtcaaggagactagccactaggccatttgcacacttagcagtattactgttaaagaatatattaattattattttttcctttgactataattttcatcactaatttcacacttatacccccattcttaccagtgcttgtttttcccggttcccggttgccctaccgggaccgggacctgagcttttcaaaatccgggaccgggaaccgggaccgggacctcggatgaccgggaattcccggcccggtcccggtcccgtggcactctaatcagaaccacttttcggaatatggcatcaattcattggcacaaaaaattttaaaataaaatgctttaaaaaatgaatgcgagggggagagacagactaattgtaatggattaggcagtgatgacacaagtgaaaagccaatagaaaagcatgagcgtacacatagattaagcctaaatttattaacaaataacaactacataacagagtggtttggcatgacaaagaaacacaatgcccgatggtagttactttggaccaacgacaattgcaacgccatcattacttacaacacctgcactcggcattatcggatccgccatcttcagcagccccagctttttcatcatctctaaccgaatccatcctcagatggtccaccaccgttttttctccattccgtcgggggttatcattactgccagccgcattgcaatggtgttaaaggggttattttgccggggggggggcacccaatttatttgg

SEQ ID NO: 24807 - DNA, 1764 bp, Heterodera glycines
tttttctcatcccatgggatatgatttacatttttgacccagtactcgttcacgctcggcatgcaccaggtcatcgaaggcatggacaggtggtgccaattgaaaattgatgacttttccctgggaggctaataaaatgcatattttgggataattaatcgttaacattgatccgaaggtgccattgttttgacccggaaatgccattgttttgatcaaactagacattataaattaatacgaatttcaatattttggaaaaatattttgaaataaaaatttaaatattacatttattttaaatttcgtatttacagagcaatgaccggcatgtgcattggagaaaaacgccgtgtgaccattcctggaaagttgggcttcggcgacggtgggcgaaagaggtaaaacaaattttaaaaaattaattaaaaattaaatttgaaaatatttttttttttcaaaaagggatggcatcaagtcggaccaggtgctgcattacattgtacaacttgtcgacctgtttcgtccgacgcccggcccacgatggcgcgaggaggacggcctcgaaattgaggtggttgggttggcacatttgaaggagcctcggaatggcaaaaacttttgagatttcaaatctttattttatcagtgttggaaaaattggaaatcaaccattgggtcgaaattttctcaacaatgaaaaggaaaagtcaaataacttagaggtcagctctaaaaactaagtaacatccaatacggattttaattaggattggtggaaaattccataaatttagtcctaaaaaacaatagtttttctaacaataagacaagaagtttgggtccaaaaaattttcggaatgactttcaaagaaaaacaaacccctatgtttttgtgtttattttccaaaaaaacaaacaaacaaataaccaaatttctaaaggccctaaacaaattgtgataaagccacacattcaatagtctctgttaaattaaataaagctgctggcgaaatcaaatgtccgtaaagttataattaccgagcgaaaattcaaaaaccgtaaccacatacataattacagtagctctccctagtttgctttaattatgcgcttgacagccgcgtagacgtaatcaatcaattcattaataaaataatataatttcatccgtcgacaggtgacccacaaaattgaggaaagcgcttgccgtcgttcggcacccggcgacaccattcaccagcactacacactgaacttggcggacggcacattcatcgactcgtccttctcacgcagcaaagtatgaagaagagaccatagcacgggagcagcttgccccccccgcccccgaaaaatttaaaaataaattgtaaaaagtttctagcgatttccaaaatttgaatgaatatgaaattttcaaaaaaaaataataaatttttcaaaaagatgctgaaaattttcaatttttttcttcttgatttctcataaaaaattttcaacgattttttgaaaaatttttaattgaaactttttttattttcagggggaaaatatacggggggaaaggcagggcgggtgacgggaaataaattcggtgaaaatatttctgttgctgttttcttacttgcaacaaatttcatccacgtcattttgaaaaatttgtcgggcatttgtgcccggtccacaacatttctttaccgaaggtcgggaaacaaactaatttcatccgtgatttgttccaacttaccgacccgaactttt

SEQ ID NO: 24808 - DNA, 1492 bp, Heterodera glycines
gaagctcagtgagctgctcacgcgcctgcttatatgcctgcgcagcaggatgatgcacttggatcatttgttctaagatctcaagagtctgctcatttagctggtgaccctgcacaaactcatcttcgtttgtgattttctccccagtaaacctggggttgtttcgacgctgttccatagcctcgactgggtccagaatgtacaactggccaaagccaggaatctgagttgtaccagcctgcatgctgcttatgcggcgatggaattctccgttaagaataacggccatcggaccgccagcagggcttggtttgttgccagcggaaacgctcgcaaattggaacaggttgttataacgcgacatgtgtcgcacaaattctttcccttcacgggattgcttattccccacaatcagctgtttgagctcatcaggatgcgggttaagcattggcagcacaactcttcccttccggcagcaaatgctactgtcttcatgtgagaagagatgtgcaccgcaatcggcgcattttttgtcaccgagtttcccggagtcacaatattccgggaaatgtttggctgctgctgcagcgcattgccaccccttgtgaaatgcagagcaacgccgtgtgatcggcgttgccactcccagcgaatttgctggcggggggcgtttcggcgccggtgaaggcgaacggctaacagaagctgaaagccttttttgaacgcgcattgatcgccttggtggcgtcttaggtctgatgaaaattacatcatcagcctgcgcaattggctcttgcgggatgcaagactccgacaccaaaccaagcgtgtcagcttggttttcaccggccacttgggcctgggtgagaatggcatcaactgcctgtccacttgtatgtggttcgatgatcattatatcatcatattcatcaacttccattagctcagcggccttggatgtcgactgcgcttcatccgtatgccgatagacaattgggcaaggagttggcaccccttcccttggatgatatggcacattatcagagccatacagctcgttaatgtgccataaaatgcgctttttttcataattgatggataaatcaggcagaacaaatgtgcgattgttcataagccatgactcagcatacaggcacacgaagtacccacaactattaccatcgtgttggaccgtcagattttcgacatcaacaatccctgtcaacactgctgacggcaaaatatccgaaatgatatttttaattttatccgtcagttgcggatccaacctgccatatgtggtaggcaaagaatcggcaaaatgagtgccaaattgcacatcatggataatgagagtccaatgtccagggaaatgtactggcaaaagtataacttctgccggaacattagggtcgtacccaaatgtcatatttttgtaaggcatgactctgtccaggccattgctccataccattgggtcaacaacgaccac

SEQ ID NO: 24809 - DNA, 1099 bp, Heterodera glycines
agaagaaaagacaccagtaatacagaatttagaacacaaatttattattatgaaaaaagccaaaaagtgtataggaagctagttctgtattattcaatttaactttaaaaaaagttcaatcagctgttttctccatgctaatcactagagctgggattctaaggttttaaccttttatacggattttggtagggttcggaccccaacaccttgctaactttcacattaaccaattttgcagggcgccgctgttgtcaaagtcagtaagcgtcaagcagttgatgagggccttaggaaatacagaaaacgcgtaaaagaacagcaagcaaaagagaaaaagcagaaggagaagaagccaccgccaaattccaccgtatgccgttaccgtactttctcattttaataataaaaaaaaatttaactttaatgaagaatgatgctgccggtggtaattcaacgggaaacaaccaccatgggtcccgtccagctccagcaggtggcccagacgacccatctccagacgaaccgggtaggacggacttgcatttggttaaggaacagattggccgcaattttgctgtcaaaaaacattcgacatgcatgactgaagttattgcgttcagctattttatggccaatttcctttattgaaaaagccaaatttcatggctatacctacaactgactacatttacaaaggcagttcatagaatggagggatttcttaaaattctaaattaagcaatgttatatcaggcctatctagataatatcttttggactaattgccagcatacgacattaaaaattttcaatgtggacataaggattaaaaataggtacaaaaaattgtaaaattccaagcttcggctcaaaaatatgtgtatttttctgctttcttatgattctgtccaggaaaagaggccaaagctcggaggattataaaaaagtcgtgtgctgggtgccgccgtcgttttttattgacttaattggttccgaattcagtatcaaatgcttctgatggtgctgctccagctggagatgatgtttcgatccctcgtgaagagataaatgaaatgaaacatgcggggttggggcc

SEQ ID NO: 24810 - DNA, 1628 bp, Heterodera glycines
  unsure (1)..(1628): unsure at all n locations
tgcctatttcgcgattttttgtgcctaaaaatggacttcctaatgataataaattnnttaattttttttccatttatatttatttatgtaaatataaaacgctgcataaaattaattttttttttgaatttttaggttcgctccattgagacttattatgttcgacatagcaccaggttgaattgtttctttgtgaattaattaaaaattaaacaaaaatttcatttaattccaataaaaaaaaattacttaattgaatgaaaatttgatattcttatttatttctcaccacatgttgttaacacagtgagtacatacaatcttcaataaaaattaaattttattttaaaaatatttttaaattaatccatacaatgccgttggaaatgtccatttgttatggatattgtcaatctgttcaggggccaacatttcttgtcgaattggtcgtctaaatttgattatgaattatttaatttgtgataaaaaaaaattataattattgcaaaaaaaataaagaaaaaataaattcattgttttaaaaattttcaaatagttaaaaaaaataaatttataaaaatactaaagttatattttaaaaaaagtttcttaaaattatctacctgtcatcaacttctgccgcaacgctgatcatataatctctgaatttttaaataaattttatgggggattaatcatcattttaatttgatttaattatttttgcctaaatatgtcggcccattgttcccgatgcatttgggcatcggcgccaaatcggtcaaccaacatatgccagctggactcagtgaagttctcaatgagctgatcaagccttatcagttttcgagagcgtgccatctgtgaaaaaaagcatttaaaacaaaaatatacaaaatggttttttgataatataacaaattaattacaagctcagttcgggtctccaatgcttgtaaaattccagctcctgaaagaaaaatattattttatttatgcttataaaaattacaacaataataataaagataattataaatttataaaataaattaaattgaaaaaaggtaattataatgataatcgtaaaaaattcatatttatttttagtttttattttgttttttataaaaatattgaaatatttttaatttaaaaatataaaaattcatatacctaaacacaaataaccaattagtacagcaacaagcacaacatgtggtaccataattttgataagctgaaaacccaaaattatatatgtaaaaaataaaaaaagtattttatttaaaaattaatttatttttaataaattgtattaaattttttataattttggcattacaaatgccattgctgaacgaacaccttgagcactttttgtgggcaattcaagcccgtcttggcctcgtcctcctcattcagttggctggtcaacagtgtgccaacatcgtccccttccaaaagtgtgggctgttttggcattggcaatccgtcccaacgggcagtgatattgtctaaaaaaacacacacaaaaaaaaaaggtaccaaaatgaatttgccataatatacagtaagattaaattttaaatgtaacaattattattttctttattattttttaaaat

SEQ ID NO: 24811 - DNA, 1245 bp, Heterodera glycines
gtttgaatccgggttcgggcttcgaagctgagccaaaataaggacggattcgtgctcggcgcctcagattacccctaaaaacaattttctaaaatttatttaaaaaaaaaaaattcggaaccaataatcttaatccccacgtcttaaattatcccccccccctttgaggagtttgaaaaataacccccatggggataaaaagagcatatacggtaaagttctttattagggcaatcatgaagattattggtcccacaaaaaaaatgaataaaaattcaaaaaacacttttttaggggttatttggtgcgctgagcacgaatttgaccttcttttgacttaatttcgaaccccgaacccggattcgaacatttgaaaaaattcaaattttcaatttttgcaaatattgctgatgcattgcttggtactgtaactcaatagagtaaaggaaatcgaattcttcctatttacatacgtatgatcaataactttgaataacaaacggatcgagtcagttggatgaagtcgtaaacaaaaacatgaaatcaggcaaactattgaagaacataataggcggtcaataataatgaccagatcaaaatagacactgagaacattttcaactaaccttaatactagcttattaacaatttagccatggatatttttgatatttgttcacaatttcaaaccaatgagcatacaacttttacggcaaattgcccatatctgtggctatgatttatcacattgccttttattaccccgtgaataactgaattgattcgatttcctttactcatattgtagttacagtaccaagcaatgcatcagcaatatttgcaaaaattgaaaatttgaattttttcaaatgttcgaatccgggttcggggttcgaaattatgtcaaaagaaggtcaaattcgtgctcagcgcatcaaataacccctaaaaaagtgttttttgaatttttattcctttttttaaactgtaatccaagtccaaaattttcgcagtttcaattgaatttttcggagtcaaaatttccttttctaactaatatatttatatgcatttaataaaatggaattcaacaattgattttatataggtttattttttaataatgtatggaggatgctattttcttttgtatagactcttttaaacgaatgcagccagtaacgggtgcaccgtcgcggttgttagtgcagtagcagctcaggcgcagatgcgtggctggatgtt

SEQ ID NO: 24812 - DNA, 798 bp, Heterodera glycines
ggtttttggtagcaattcatattaggccttgtagtgggatctgcgaatcaccacccaaaacgacgccatccttaaatgaattattagttgcttataaaaaaaagaacaaacaaaagtaaataccataaaaggaaaaaaagttaaaatattttaccaatttcagcaaatgaaaaattacctggaaaatagccccaacaaccgttgttcccgagctcgtcatcttcgtcatcgttttcgaactcgtttaccaaaaccttcgccgtccatttgtcgcttcagtgcatgattacgttcgcacaaagagaagtcaaattcagctaatcctccgactgatttgtttaacaattcgggcgattcttccatgacaaaaaagagtgtgtatttatgataggcttaaataaattaattagtgccgggattttgtagaatttgatatttcttgctaattctggacgagctaatgtaggaaagcatgagaaaaaaacacttgtctctgtattttctcatcatttttttaatttaaatgaatacaaaatgccaaactcaattagacagttgaccggaatcgggcgtccgataaaaaaaatgctcgtaaggcggccggtcacgatggtttgtccaaaaaacatgacagggccgggtcggtagaaacctgacgggcccccggggcctgttgtggctccaactaacagtttcttaattaccaaacctcgtaaaaactccaggaaaattttcctcaatgcctccaaaccccttaccttatttcctcaaaattttaataatattagcccacttttt

SEQ ID NO: 24813 - DNA, 552 bp, Heterodera glycines
ctgtcccgcccccggggacgggggcggggtccgaacccctccttaaaaataacaccattcgtcttgtcttagcgagacgaattgtaatttatatgcaaaatcaaaattgatagtattcttcaattttaccccaaatttatttcaattatttcaaacaaatatgtaatcattttttggactaaatgatcgaatgtttctatgatcgcttgaaagtgtcccctttcgaagtaaataaggaattaatctttcttacataatttttttttatattaactccgagcttgcaagtgataatatttttaaataaattaattaaaataagcttttttaatgttaattatgcgttaaattcttcaatttgttttgcttgttttcatttttgcgggttttgcgcaacgacctagcacccggaaaaatttgtcattttttgacaaatttcggtaaaaaatctcattaaataacagtaattttactgtattatagacatataaatgaataaatgagtgaatggacaacataaagaataaatatctaggtagtataattaagtac

SEQ ID NO: 24814 - DNA, 1593 bp, Heterodera glycines
ttcatggctttttcatgcttttttggtcctttatttcctgtaaacatgccgggaaataaatgacggttatctgcatttttcgccaaaaatgccattgctgatcacatgataaaccgtagaaatgttggcccaaacccaaattctgtgccgcctgatgctctcaagattttatttaccttatttcctaaaaagagcccccggggggctttatttttcaacacctcacaaaagggaggctttatttcagggggcggctttattttagaaaatacggtaatagataaatctcatttttatttcaagcaattaaatgcgctgatgaactctttttcgacaacaaatggcacttgggcaatgatacagtatccgagcagtgcgagctgggtgtacggtgctattcaattatttgcgaacacagtaatcaatcagttggggaaagaataaacacttacatattggatcaccacatattgacattattgcagcagtgtgtatgtgtagcagggttcggttttccgaggccccaacaacttttttggaaaacggaattcctctagacctaaaaaaaatttcgtaaaaacggagttccgggggccttaacaatttttggaaatttgaaccgacctaacaatatgatggaggtggacaattaactaccggagaaaaaatttccaaaaaaaataataataattttactgaatttttgtgcctttttttaagacaaaaaacaagtttcattccgccgaggctgctctacattggctttttattgcgaaaaaagaaatctgtacgtgaggctggggcgagggggtcagggtcaaccaggggtggagcgcgaccgcgatttgcggcattttttttttgccgtgatccgcgatgcgcaaccgcggcaatttgaatccgcgactgcggcaaattgaatccgcgatccgcgaccgcgggatttttctgtccgcgctccagccctggtgtcaacaacatgatgtggggcagggatgacattccgaggccccaaaaattttcggaaatcggaattccgagggtcaaaaatttttcgcaaatcgaaattccgatgaccaaaatttttctgaaacaggaattccgaccacaaaagtgtcggaaatcggaattccgtgccatccctgctggtgtggggtataacttctttaagagtcaaccaaattaaacattcttacaaccattttgatagccctaagtgttttcgattggcgtgaaaaaaaattggtggagtttcaaaaagattattaacaaaaaaatttgtttggaaaccagttttttgaagtttttttgggcctaactttttgaaacttaaccaaatctattggaactttgcagacaaatagggaatacttaaggctatggaatgataacaaattcatttagtttagtcaactatgaaaggagttatagcaggggggacaccctcgtttgggcgccagcccagtttttagactataagttttttctttgtcaaccaaatccaacactgttggtatcattcgaaagcccttcagatgctttattagtctgcaaaattccaaaaaatttgtcaagtttaaaaaagttggaaaa

SEQ ID NO: 24815 - DNA, 1382 bp, Heterodera glycines
taaaataaaatttttaaatttatttttcgtcgggaccacaattctatacaattgcacaacattggaatccccgtgaaatttttttggaaaaaatcaacgcaaaaaatgacattttttcagtttcgtttcgtatttggtaaaagcaatggttctaatcggttttacgcgtcccatggcattttacgcgtcccatgacattttacgcgtcccataacattttacgcgtcccatcacattttacgagtcccaacaacactttacgcgtcccatcacattttacgagtcccaacaacactttacgcgtcccatgacattttgtgtccatggcagggatggcattccgaggccccaaaaattttcggaattccgtgccatccctggtctcatggtattatagttgtcctaataactaagagaaaaactattttttttgtcaggtattcagtaaagtttttaactataaatttcgttgttaagcctaaggttatcatgacaacttatacacaggcaactcgaacaatggcttattgttagactaggcctaagcttaggcttttgtaaatttttttcttatattagttgaatttctgttgacatcattaagtgtgcttagagttgcttttgcacatttcgatgatcaaagtatacaagcaagaacaattagactattcggaaggtataaagtttccgattgacggttcgaaaaacattttttgacgcgtaaaatatgatgggacgcgtaaagtgtgatgggacgcgtaaagtgtgatgggacgcgtaaagtgttgttgggacgcgtaaaatgtgatgggacgcgtaaaatgtcatgggacgcgtaaagtgtcatgggacgcgtaaaacccgactagaaccaaattttttttactattttcgtgcctattttaggatttactgcctttttaagtgcctatttcgcgattttttgtgcctaaaaatcccatccctatacataatggattatggcttttttgcaaagaaatttaaataaaaattattttactttaatttaagctattattatgagccacccaatttggcaaatcggtctttttaaacgcattaaagaagattcagtcgattgcttggagtgtaagcaaaaaaacgttatttatttttcatcttcatcattttttggtttaaaaatatattgaatacttttttatactttgaaagacttttattaatacagaatttttttaaatttcctaaaatccgcaatcctgcgcaggatcctgcagattttaaatgcaggatttgcaggattaatcctgccggatcctgtcctgtaaaaaattttgaattccaatcctgcaacaggatccgcaaatttgaaatttccggtctctatattcactatgggt

SEQ ID NO: 24816 - DNA, 1062 bp, Heterodera glycines
tcccagacgggcactgcacttcattctttggcacctgttcaatccgatcagtgcccacccaacacttcagtgctaaattaagtattgccttaatcatttcaaaaaaattatttttcaaaaaaaacttaggttttcttaagaacaaccaaaataaattcaaatttttgactatttaaaccagtcccgggtcccgccccgatcatattgacttggctaaaaccgacttaaatttaaccagtgaaactgcgccaaattaaaaaattcaataattattttggcgttatgtcttaattcaaagttttaaagatagaacaaaagcccgaactcaatggatttttggaaatttgtacaatttcaactgctaaaataaaaaaaaattttctctgcgaagcctgtcggcattgctggtctccgcatttcattgtttccaacaaaaagaaattagactcaaaaatggatttttttaaatgcaattaaaaaaaaattcttttggtgtgccgtggcggtattgaactttcattgccaaaaaaggaaatgtaaaacactaaccacttggccaaaacaccacaggatttgatcttgttaattaaccccgtatccatgccaagcgaagtgcaattgcaacacaacatgcgaatgtaagaatccaatagaccgacatgaagcagacagcaggggtgggtcaaatgagctttgcattttacatacaataatcgacagtaaattttttgaattatagaaaaaataagactagaaaaaaatacgctaaaattttcgatttttcccgagaaaagcataattgaccggaaaatatttgccaatatttttttctttaaaagtcacgacagaatcaggaatttacttcatataggttccagtggcgcttaggtaagcatctccgaaatttttttttaaaaaggctttacttttaaagcgccatagaattttatgccattccatttttcggggtatagcccgaccccacactcaaaccccaagaatggcatttttgtgagggaaagagaaaaaaatttttgtcgaaattttgggtgttcattaact

SEQ ID NO: 24817 - DNA, 1369 bp, Heterodera glycines
  unsure (1)..(1369): unsure at all n locations
gtacgctttacntggtcccacaaaaaaaggtcgaaaaaaggaattacgagctttttttgttgtgaactcaggggtttccgcaggcgctgatcacgaatatgacatccatttcgacctatttcgaatcccgaacccgaattcgaacaaaagtcggaaattcatttttcacaaaaattcgcctgtattatccaaaaccgattcaaatgcactaaatgaccttgaatccttatttgctattatattcaatgtatctgactcgattttggaccataaatatgaattttggtgaaaaattaattttagacttttgttcgaaatcgggtccggggttcggaatcgatcaaaactgttcttaggttcgtgattagcgaccccgaaaactcatggaaaagctttattgacaattttttgaaaacttttacaaaaaattgttcgaattcgggttcaggattcgaaataggtcgaaatggatgtcatagtcgtgattagcgccactgaaaacccccgaagtgcaccacttaaaagatgaaattccttttttcacctttttttttgtgggaccagtaaagcgtacgatttacccagatacacccctgctctaataggcgccgccggaaaaatttttgtaatttttaatgcgatttcttaacgattttgttcaaaaaatgacaaaattacgattttgagctaatttttttaagagaataagaaaccgccgagagaaaaatttgaatatttaactgaatcttgttaagattttgcatattaattcgcttcaaaaaacatttctttcaaaaattatcattaaaaatctaaatttctccctgaatccaaaaaataagatgaaaataaggacaaagaacttaaataaggacaaatcttacaaataaggacatttaaaatttgtaagatttggaccctcaaaataaggacaaatcttacaaataaggacaaagggtaaccctgacttagaatgtaagttctttatgatcaatttcagtttcttaggccataactttgttctttcttgtttatatgtttttcccttccattttcagctttttaaaatgactggcttgtccgaaaatgtggccttttcccgcttcgtctctgagtttggtggccgctgcaaagaactcaaaatcgctaatgaattcgccagggatccgagccgtgccaacaaatacacgcgaacgctcaaagacggaaagggcagctggcaattgtgcgtggacttctccaaaaacctcatcgacgacgacatttttcaccaactcatctcagtggtattccgaactccgtgcccaaccaaattcgaatttaaactcaaatttctattcccaggctcgctttggaccnntgcaggcat

SEQ ID NO: 24818 - DNA, 2365 bp, Heterodera glycines
  unsure (1)..(2365): unsure at all n locations
tgacccgctgacctgacccagacggaacggtcggcgaacagcggaccgaatgagtcgagagcgactctcgacgacgccccaggggggggggagtcgtaaatgtgccccgggggatatttagttgttcattgtcgctgttttgcaaaattattagggatgatcggaatacaattttataaaagttaaagcgtgccgccgtcaaaatgtggagaaaaagagcagagaaaagcataaatttaatttattttatgggaaaaggagaaagaaatctacgaataaagcatatttatttttcatcaaaaatgaaaaaaagaaacaatcgaagcaaaagacgaaaaaatgtaaaataataaaaacataaaaatataatataagcacataaaaaggaaaatgaattgatttaagaaatttaaaaatgggagaggnnggggggggggaaagaacaaaagaaaatgaatgaatgaatcaccgggggggggggagagaagtaggccataaacgaattaataataaacaggttctaaaattttaaaataggataaaacgaaaaaaaggtaaaaaaaggggggggggaagggggatggccgagggaggagactgatgtaaggtatcgatatttgtcttcttttgttgggggaggattgaggactcgtgtcagttcagcttattattcacgtgtcaatttacggggttaattcacgtgacaattcacagtcatgatttacgtgttaattcaaaatcatgatttatgtgttaatttacggtaatgattcaaatgttaattcccgggcatgatttacgtgttaatacacggtcattattcacgtgtcaatttacggcttaaagcacgtgtcaattcagctcattattcacatgtcaatttacgggttaaatcacgtgtcaattcagggtcatgatttacttgtaaattcacgatcatgatttacgtgctactttacgggcatgatttacgtgttaatacacattcatgattcacgtgttaattaacggtcatgatttacatgttaattcccgggcatgatttacgtgttaatacacggtcatgattcacgtgttaattcacggtcatgatttacgtgttaatttacggtcatgtaagtttaacttacagtcattattcacgtgtcaatttaggggttaattcacgtgaaaattcacagtcatgatttacgtgttaattcccgggcatgatttacgtgttaatacacggtcatgattcacgtgttaattcacggtcatgtgcgtttaacttacagtcattattcagtgtcaatttaggggttaattcacgtgacaattcacagtcatgatttacgtgttaattcaaaatcatgatttatgtgttaatttacggtaatgattcacatgttaattcccgggcatgtacgtttaatttacagtcattattcacgtgtcaatttacggcttaaagcacgtgtcaattcacggtcatgatttacttgtaaattcacgatcatgattcacgtgttaattcacgggcatgatttacgtgttaattcaaaatcatgatttacgtgttaatttacggtaatgattcacatgttaattcccgggcatgatttacgtgttaatacacggtcatgattcacgtgttaattcacggtcatgtgcgtttaacttacagtcattattcagtgtcaatttaggggttaattcacgtgacaattcacagtcatgatttacgtgttaattcaaaatcatgatttatgtgttaatttacggtaatgattcacatgttaattcccgggcatgtacgtttaatttacagtcattattcacgtgtcaatttacggcttaaagcacgtgtcaattcacggtcatgatttacatgttaattcccgggcatgatttacgtgttaatacacggtcatgattcacgtgttaattcacggtcatgtgcgtttaatttacagtcattattcacgtgtcaatttaggggttaattcacgtgacaattcacagtcatgatttacgtgttaattcaaaatcatgatttatgtgttaatttacggtaatgattcaaatgttaattcccgggcatgatttacgtgttaatacacggtcgggattcacgtgttaattcacggtcatgtacgtttaatttacagtcattattcacgtgtcaatttaggcttaaagcacgtgtcaattcagctcattattcacatttcaatttacgggttaaatcacgtgtcaattcagggtcatgatttacttgtaaattcacgatcatgatttacgtgttactttacgggcatgatttacgtgttaatacacattcatgatacgcgtgttaattcacggtcatgatttacgtgttaat

SEQ ID NO: 24819 - DNA, 1425 bp, Heterodera glycines
  unsure (1)..(1425): unsure at all n locations
aaagcattgtactgcatattaaaaagctaaaataattttcgtatatttttcacaatttatttcaaanagccaaaaagtccggaaccaattttaaaaactaaaatagtgcacaaaaggggagccgccgcacggcggggcttaaaagcattgtacagcataattaaaaccgaaaataattttcgtatatttttcacaatttatttcaaaaagccaaaaaaaatgattcaattttgaaacgaaatagtgcacaaaagggagggatggttagacgaaaagaggaatttttagaaaagagcgcaccccatctgatattcccatttttccgttccacaactggccaaaggcgactgtgctcattgacacgtagttgtccaataaggtacttggactttccacagtaaaatgtggtacaaaattttggaactgtcccgcctcacggcggggcttaaaagcattgtactgcataattaaaagctaaaataattttcgtatatttttcacaatttatttcaaaaagccaaaaaaaatgattcaattttgaaacgaaatagtgcacaaaagggagggatggttagacgaaaagaggaatttttagaaaagagcgcaccccatctgatattcccatttttccgttccacaactggccaaaggcgactgtgctcattgacacgtagttgtccaataaggtacttggactttccacagtaaaatgtggtacaaaattttggaactgtcccgcctcacggcggggcttaaaagcattgtactgcataattaaaagctaaaataattttcgtatatttttcacaatttatttcaaaaagccaaaaagtccggaaccaattttaaaaactaaaatagtgcacaaaaggggagccgccgcacggcggggcttaaaagcattgtacagcataattaaaaccgaaaataattttcgtatatttttcacaatttatttcaaaaagccaaaaaaaatgattcaattttgaaacgaaatagtgcacaaaagggagggatggttagacgaaaagaggaatttttagaaaagagcgcaccccatctgatattcccatttttccgttccacaactggccaaaggcgactgtgctcattgacacgtagttgtccaataaggtacttggactttccacagtaaaatgtggtacaaaattttggaactgtcccgcctcacggcggggcttaaaagcattgtactgcataattaaaagctaaaataattttcgtatatttttcacaatttatttcaaaaagccaaaaaaaatgattcaattttgaaacgaaatagtgcacaaaagggagggatgggtagacgaaaagaggaatttttagaaagagcgcaccccatctgatattcccatttttccgttcccacactggccaaaggcgactgtgctcattgacacg

SEQ ID NO: 24820 - DNA, 1853 bp, Heterodera glycines
ggtttgacaagtttattgggggaaaaaaagactttacataataatacccctgggagaagggagtgggaaacatgatttcaaaattttcaattttttctagtctaatctactcaaaccggttcagaattcaataaaaataacattcacggtgcgaaaaatggggtttgaaaagtttattttgaaaaaaagactttacaaaataatacccctgggagaagggagtgggaaacatgatttcaaaattttcaattttttctagtctaatctactcaaaacggttcagaattcgataaaaataacattcacggtgcgaaaaatggggtttgaaaagtttattggggaaaaaaagactttacaaaataatacccctgggagaagggagtgggaaacatgatttcaaaattttcaattttttctagtctaatctactcaaaacggttcagaattcgataaaaataacattcacggtgcgaaaaatggggtttgaaaagtttattggggaaaaaaagactttacaaaataatacccctgggagaagggagtgggaaacatgatttcaaaatttttgttgaaatatttgtcgtgctctgaagggcgtgggagggggggggcgaaggcccaccacgaggccgcgaagaggccgagtgagtaccttcggtgcaggaaaattattaaattttaaaaattttttaattgctttttaaatatgccaaaaaatgtaggcttaacttttttagtgaaaattcgatcactcatattttttgctaattgagcagaagcgtaccaaactttgcagggatactccccggtaaaggactaacttacactgaaatgagcgccgagctagctggctcaaaaaaattttcgaaaatctgagtctttcgtttttatttgttttttgcataattattcataaatatttttttcagaaaatgctctgaaacgcacaaattttattacatgctagtttaggcactctgatgcttttctatcaaaagggagatgaataaattttaaaaatttttaattccttttaaaaggccaaaaagtttaggcttaacttttttttcagaaactgatcagaagcgcaccaaactttgcagggatactgaaaggaagagaaataacctattttaaatattatctagtcagttcatttaaataatttttatccaaaaaatttttttttgggttttcggggcagtccccctgaaccgatgcgcccagatttatggggagaccgaatccttcgggaatagcttccctatagtctgtactttaattctgcgttggatttttgctccccataaatgtttgagtaccccaaacggacacttgaaaaaatcgatttatttttgttttcggggcagtccccccgaaccgatgcgcccagatttatggggagaccgaatccttcgggaatagcttccctatagcctgtactttaattctgcgttggatttttgctccccataattgtttgagtaccccaaacggacacttgaaaaaatcgatttttttgttttcggggcagtccccccgaaccgatgcgcccagatttatggggagaccgaatccttcgggaatagcttccctatagcctgtactttaattctgcgttggatttttgctccccataattgtttgagtaccccaaacggacacttgaaaaaatcgatttttttgttttcggggcagtccccccgagccgatgcgcccagatttatggggagaccgaatccttccggaatagcttccctatagcctgtactttaattctgcgttggatttttgctccccataattgtttgagtaccccaaacggacacttgaaaaaatcgatttttttgttt

SEQ ID NO: 24821 - DNA, 1233 bp, Heterodera glycines
caatcgtatgcattttggcgcatggacaaaaagcctcgtgtcgaaccgacaaatttaattgtttttttttaaaatggaatttttaaaaatttttttttaatgaaacttttttattttagtttaaattttgtcgggatgacattttttgctacacatattaaatgattttgtgtatcgtcggcaatttttcgacttaaaatgattcaatttgtttattccttttttaacagtgatttttcctccacttttcttttgttcctttccctttcttttctcacgttccctaccattttattaaaagattcaggaaattttaaaataaattatttaaatttataaaagagaggaaatgtgccaaaaaatacacaatttatttttgatatacaatacacaaagccaaagggcacaagattttagggggtgatcagaaattttgccacaataaatcaattagctgggtctctttcctcccgatcaattgaccgagacggatggtcgatcagtggttgtacaactccttgcgcaactcctcgccttccaagtcgtcggtgccgacattgaggaactccatgatctcagccgacgagtccatctcacggcactgcgcatgatggaatgcaaaatttcaaaaaatgccaaaaatacatataacaatgtggggtattagagaatcgaaatctcgagaattgagactcaaaaaaatataatgcgttcgagtgaattttcacgaaaacgttattcaaaatggtcaaggctcgcgaccaaagtccaaaaaagcgtttttccaaaaaactttgtgggaagggatggggcgggtcccggcggtgccgataggcgccgccgggaaaattttttgaattttatatgggtttcgctacggaaattgttcacattttaacttttttccctttgttacgacccccctccctcctttacagccccccccccttacgacgcacgtgggggggggggggggtgcgccaggccccttacgacgcggggtgggtgcgccggcgcaccccttgttaatgtatgggacggaccaatcgggagtttgattcccgatggtgtgctgctggtgctgtgcccaccttcaacgcgatgaaattggccaagtgctccacaaattgggtggcggacaaaaagttggccacattggcggtctgaatcagcaaattcttgtccagcgccgagaagaagccgtgcgcccagtcgggcaggccgggagtctgt

SEQ ID NO: 24822 - DNA, 1109 bp, Heterodera glycines
  unsure (1)..(1109): unsure at all n locations
aatgcttagtgatggactagcgagtggtgtccttaggaataaaagccaaagcgtggctgcgtcccgtccacaantttcntaatgcttagtgatggactagcgagtggtgtccgtaggaataaaagccaaagcgtggctgcgtcccgtccaacaatttcctaatgcttagtgatggactagcgagtggtgtccttaggaataaaagccaaagcgtggctgcgtcccgtccaacaatttcctaatgcttagtgatggactagcgagtggtgtccgtaggaataaaagccaaagcgtggctgcgtcccgtccaacaatttcctaatgcttagtgatggactagcgagtggtgtccgtaggaataaaagccaaagcgtggctgcgtcccgtccaacaatttcctaatgcttagtgatggactagcgagtggtgtccgtaggaataaaagccaaagcgtggctgcgtcccgtccaacaatttcctaatgcttagtgatggactagcgagtggtgtccgtaggaataaaagccaaagcgtggctgcgtcccgtccaacaatttcctaatgcttagtgatggactagcgagtggtgtccgtaggaataaaagccaaagcgtggctgcgtcccgtccaacaatttcctaatgcttagtgatggactagcgagtgatgtccgtaggaataaaagccaaagcgtggctgcgtcccgtccaacaatttcctaatgcttagtgatggactagcgagtggtgtccgtaggaataaaagccaaagcgtggctgcgtcccgtccaacaatttcctaatgcttagtgatggactagcgagtggtgtccgtaggaataaaagccaaagcgtggctgcgtcccgtccaacaatttcctaatgcttagtgatggactagcgagtgatgtccgtaggaataaaagccaaagcgtggctgcgtcccgtccaacaatttcctaatgcttagtgatggactagcgagtggtgtccgtaggaaataaagccaaagcgtggctgcgtcccgtccaacaatttcctaatgcttagtgatggactagcgagtggtgtccgaaggaataaaagccaaagcgtggctgcgtcccctcc

SEQ ID NO: 24823 - DNA, 1360 bp, Heterodera glycines
agtagtatatagccccgaaagcgcacggttgcgcacgggtgtttcgcgcacaatcccaaacctatgggacgggtgcagctctttgaagttgccgcccgggacattttcccgcacaatcccaaacctataggaggggtgcgtgccaaccgaaacttcgtgctttgcttcggattagtctaaaaatttctggacgccaattttacatattagccattttttattttatttgtgaccgcaaatttttacatactagccattttttattttattgtgaccaagcatatctttcctcgtatttctgggatttttttcagaatgtggtcatagaataggtgggttgaattatttgtattttttatgagtattatgtaaggatattttcgacaaaacataaccaattccgagtttcatgaggcatcaacttcattcttttcttgtcctgcccaattgtctcaaatgtatacctaaaaatgcgctaaaaatgatcaaacccgtttttagccgaatatcctgtcaatatttccctattagaaacgatactgtgaattctttcgcctctttaattcattcgtgctttgcgtcggattagtctaaaaatttctggacgccaattttacatattagccatttttttttatttgtgaccgcaaatttttacatactagccattttttattttattgtgaccaagcatatctttcctcgtatttctgggatttttttcagaatgtggtcatagaataggtgggttgaattatttgtatttttttatgagtattatgtaaggatattttcgacaaaacataaccaattccgagtttcatgaggcatcaacttcattcttttcttgtcctgcccaattgtctcaaatgtatacctaaaaatgcgctaaaaatgatcaaacccgtttttagccgaatatcctgtcaatatttccctattagaaacgatactgtgaattctttcgcctctttaattcattcgtgctttgcgtcggattagtctaaaaatttctggacgccaattttacatattagccatttttttttatttgtgaccgcaaatttttacatactagccattttttattttattgtgaccaagcatatctttcctcgtatttctgggatttttttcagaatgtggtcatagaataggtgggttgaattatttgtatttttttatgagtattatgtaaggatattttcgacaaaacataaccaattccgagtttcatgaggcatcaacttcattcttttcttgtcctgcccaattgtctcaaatgtatacctaaaaatgcgctaaaaatgatcaaacccgtttttagccgaatatcctgtcaatatttccctattagaaa

SEQ ID NO: 24824 - DNA, 1980 bp, Heterodera glycines
aaaaaacaaaaaatgaaaatgaaagccacaaaaaaataaaacaaaatgccaaattaattaaaactttaaaagtcaaatgaggtcattatttaattatcacacttatgtaatttctttattataaatcatatataaaaataaattgttatattaaaattgataaaatgattaaaaaataaatgcataaaaaaggctgaaaaataattttattaaatgagcaaatggataggcttaaagttcagtcgatccacatagaacccgattatggtccaggtattttaaaatcaataaaagagaatttatttcataaaactacaatttaaaaaaaatatgaatagagtttcaaaccaaattcagatttaaaacttaattttttaaaatttttttgaataaaaaaattcaaataatcaacaagttaaaacattgaaatagaacccgattaggaatttatttttctatatgcagaaaatggatttaataaaataaatttataaaaaattccgaaatttcttaatgaatcattcgataaaaaagcatctaaaaaataaaaactaaattttgaaaatataatttgaaatgtttattacaaaatttatgaatggtctgtagccccataaacaatattaaaatattatatacctcaattaaatcaacttaataatacattagagaaatacgaaggtataaatttgtaaaaacaaaaacaatgaatattcgttagtattttttatctcgaaaaataaacaaaataaatggtgggacctacaaattgaaatcaaccgacattgtaagcaagcgaaaatattattaaacaaaaataagcaaaaaaattcaacaaaatttaattgtaaagagaagataataaaagcatttattgattaagacaaaaaagcgattaaaaagattaaaataatattcaacgagacggcaacgaattgcctaccgcggatactaaccgcaaaacaattgtaaaattaaataaaactataaaaagtttaattttgaaacattaatgataaattaataaaaatataattaccatggaaaatcttatgaaacaattgattggctacattgtaatattgctgattaatgggttaacaacttcaagatgtgcacctgagtgaattggagcaagagactcagagatgcgagaaattcgcaagggcgtcgtccctcatctccaattcatatgctataaactaaataaataattttcaaatcaaaaaaagaaaaaataattcaatttcacaacaagcaacaaatattgttaaaaaataatacgaaaaaataattaaacaataaattatttataattcacattattttaaattaaaaaaacaggtctgagaaaccatcagagccaagggcacaaggctgagcaaagagggtgccgatttctttgccggtacaataaaggattaatttcgactattttaaatttttatcatctcccgccctcctccgcatcgtttttttcaaagaaaaaatctaattttattttaataaaatttcaatttgttgttatatttttttattctggaaaaactccctatttgtaaaaaaaaagaaaaatttaaaaaaaaaaattccgggaaaagggtaaacgaactgctcaggaaaagcgacccgttctgacctcccgagaatggggaaatagtgatggtgttctggtcgtacaccggttgattgtcggagaagccgccgtcgatgtatctgacgccgcgaaattcgggcaccgtataaccacaaaaaattggtataaaacagctgcacaaaatggcctaaaaagaattgaaatgacaactcaaccattagatttccacttgaatgagttcttttttgttcgcaaattcagaaataatggcattttgtcctgttgagtattcagtaagcgctgaatttaggagaaaataggcaaaaaatggacgaaacaacgtacagacaaaaagtcgttcagaacaaagttgatgggcattg

SEQ ID NO: 24825 - DNA, 1363 bp, Heterodera glycines
aaatgtctttttgactgggctccgcaagtgtcggcaccgcaagtgtcgcgccgcaagtgtcgtcgccgcaaatgtcctcgccgcaagtgtctgcgccgcaagtgtcgctttgactgggcgccgcaaatgtctgcgccgcaagtgtcagcgccgcaaatgtcagcgccgcaaatgtgttcgcaatcaaataaaagcaaaatgaaaaaaaggcaaaacaaacttttcatttttcaaatcattttttaacgcaaaaacaataaaaacaaaaccaaacatttagtgattcctagtgatgaatagtggcgttaaaccgaagaatttccgagctaaaaatgtgttttccgtgcatttctcgtcgaaataaagccgcagaaaaaatagttaaaaaactaaaaatcccagccctattcatcagcctttcaatcatcattttatcattatctttttgatcggaatttctcgaaattatgaaatgagaccgtgatttgaaacagataaaatgttttttaattttcttgcttgttttatctcagcaaaaatatttacaattttttattaaaaaacaataaaatttcagaatcccaatttggttttgtaagaaataggtcaacgacaaatcaattaataacagttgtcgaagattggtacgaagcaattattaacggaaaaaatgttgattgtatttatattgactttcaaaaagcatttgattcggtacctcataatttgcttttggataaattgaaaaaaattggtatacagggtaaattattaaattggataaaataatttttaagtaacagaacttttcgtgttaaaattggggatgctttatcctcaaataaaaaagttggctctggtgtcccccagggctctgtcctgggccctttactatttttgatttatattaacgatcttcctgatgctttgccatcaggagtgaaaataaaattatatgctgatgatgttaaattgtatatatgctataaagcaagagcagatacagaaattatgcataaagcattgcataatttattcgaatgggcaaataaatggcaaataaaagtttcaattcaaaaaacttttgtattatatttgggttcaaaaaacccaaaagaaacttataaatttgatgggaatacaataaatgctgtggatacaattagggacttaggagtaaacattgataacaaactacaattttccgatcatgtaaatcaaataacaaggaatgcgtatttacgtatgcgttccttgtttagaataattaaatctaaatcttctaaaatttggattacattatataaaacttatattagacctttattggaatacgctccggaagtttggaatccgtctcttc

SEQ ID NO: 24826 - DNA, 1675 bp, Heterodera glycines
tctgcgttggatttttgctccccataattgtttgactatcccaaacggacacttgaaaaaatcgatttttttatttcataaatattttttcagaaaatgctctgaaacgcaccaaattttatttacatgttagtttaggcactctgatgctttttctatcgaaaagggagatgaataaaatttttaaaaatttttaattcctttttaaacaggccaaaaagtttaggcttaacttttttttcagaaactgatcagaagcgccccaaactttgcagggatactgaaaggaaaagatttaacctgttttatcacattagcttgtcatcagtttttataaaaaattttcaaaattctgagtctcctattattttatttttttttcaaaattttgaagggcggggggggggggcgaaggcccaccacgaggccgcgaagaggccgagtgagtaccttcggtgcaggaaaattattaaattttaaaaattttttaattgctttttaaatatgccaaaaaatgtaggcttaacttttttagtgaaaattcgatcactcatattttttgctaattgagcagaagcgtaccaaactttgcagggatactccccggtaaaggactaacttacactgaaatgagcgccgagctagctggctcaaaaaaattttcgaaaatctgagtctttcgtttttatttttttttttgcaaaattaattcttaaatattttttcagaaagggttctgaaacgcaccagattttatttacatgttagtttaggcactctgatgctttttctatcaaaaagggagatgaataaaatttttaaaaatttttaattcctttttaaacaggccaaaaagtttaggcttaacttttttttcagaaactgatcagaagcgcaccaaactttgcagggatactgaaaggaagagaaataacctattttaaatattatctagtcagttcatttaaataatttttatccaaaaaatttttttttgggttttcggggcagtccccctgaaccgatgcgcccagatttatggggagaccgaatccttccggaatagcttcactatagcctgtactttaattctgcgttggatttttgctccccataattgtttgagtaccccaaacggacacttgaaaaaatcgatttatttttgttttcggggcagtccccccgaaccgatgcgcccagatttatggggagaccgaatccttcgggaatagcttccctatagcctgtactttaattctgcgttggatttttgctccccataattgtttgagtaccccaaacggacacttgaaaaaatcgatttttttgttttcggggcagtccccccgaaccgatgcgcccagatttatggggagaccgaatccttcgggaatagcttccctatagcctgtactttaattctgcgttggatttttgctccccataattgtttgagtaccccaaacggacacttgaaaaaatcgatttttttgttttcggggcagtccccccgagccgatgcgcccagatttatggggagaccgaatccttccggaatagcttccctatagcctgtactttaattctgcgttggatttttgctccccataattgtttgagtaccccaaacggacactagaaaaaatcgatttttttgttttcggggcagtccccc

SEQ ID NO: 24827 - DNA, 970 bp, Heterodera glycines
gaaaaacaaaaaaattcgattttttcaagtgtgcgtttggggtactcaaacaattatgggagcaaacatccaacgcagaattaaagtacaggctatagggaagctaattcccgaaggattcggtctccccataaatctgggcgcatcggttcggggggactgccccgaaaacaaaaaaatcgattttttcaagtgtccgtttggggtactcaaacaattatggggagcaaaaatctatttttttttatttttctattctttttttttaaggattcggtctccccataaatctgggcgcatcggttcggggggactgccccgaaaacaaaaaaatcgattttttcaagtgtccgtttggggtactcaaacaattatggggagcaaaaatccaacgcagaattaaagtacaggctatagggaagctattcccgaaggattcggtctccccataaatctgggcgcatcggttcggggggactgccccgaaaacaaaaaaatcgattttttcaagtgtccgtttggggtactcaaacaattatggggagcaaaaatccaacgcagaattaaagtacaggctatagggaagctattcccgaaggattcggtctccccataaatctgggcgcatcggttcggggggactgccccgaaaacaaaaaaatcgattttttcaagtgtccgtttggggtactcaaacaattatggggagcaaaaatccattttttattattgtactatagtctttttttctaaggattcggtctccccataaatctgggcgcatcggttcggggggactgccccgaaaacaaaaaaatcgattttttcaagtgtccgtttggggtactcaaacaattatggggagcaaaaatccaacgcagaattaaagtacaggctatagggaagctattcccgaaggattcgcatctccccataaatctgggcgcatcggttcggggggactgccccg

SEQ ID NO: 24828 - DNA, 2616 bp, Heterodera glycines
gatggccttttcggcttgaaaccattcagtgaccgtcgtcccaacaacaacaacaacaatgcgttgtcgtcgtcgtccgctgccgttgcggaggatttgcgcaaaatttttgtcaaaaatgtgtccgcacgggccaccaagagtcaactgctcagttttttcagcaaatttggccaggtttttgtttttttgtatgttgtatcttgaagaaaaaaaaaatgtactaattttctaatttaaaaaaaattcattaaaaaattttcgttggaaatttgccacaatttgcgcaattttgcgcaccattgtgatcaaaaaaaaaaaaaaattcaaatccaggccccaaaaccgaaaagtaccacgagctgctccaggcatggggttttccagaaatccaaacccgtggcgccaaacatgaatgaatcactggcccagactttttttttcaaaacaaaacaccataaatccaatttattcgaacatttttccattcctcgtccccggcggccatcgggcaacaaaattctttttttttttgttgccaaataatttttttaattttttttttattaaggtgctgaattgtcgaattccgagtgaaaaacgtcgtcttgaaacgtcgctgtacgcaacgttgcccaaacacccgaagaaatggcacggcacttgcaccgtcacatttaagtatgatgaataagtatccccgttttttttaaattttaaatttgataggtccgccctttccgcaacaaatgcaaaactcgcttcgtccgacgaattgttgttctacgggcaacaaatgcatttggtttcggtattttttatggattttcatgggggctaaaaaaggattccgatttttttttaaattttcatcctcttctgtaaataggtatatgaatttttgttgctgttttttaattcattatccaacaacattcatccctggtatcatgtagtccaacctgcgattcctttcatgtgcatggacaagatttccccccccccccccccgtctcattcgttcgtcgtttggccgttagcctgtgaaaatatgggaacaggacaaaatcacgccgccgaaatcacgccgctagaaattaaaaaaaaatttttttcatggaaaaatcttagaaaaatttttataagaaaatttaaacaaaaaaaattttgaaaaattttctgctatttttttataattttatgataaattactaacaataagttttttcgaaaattttccaaatttttttttatttttcttgaaattttaaaaaaaaattctaacggcgtgattttggccggcgttatttcgatcggcgtgattttgggatgcacccgaaaatatacacccttatggcatatatgccaaaaaaaaaaaaaaaattattgaatggcaatggcactttttagcgcttaaacaatgtggaacacatcgacctgagcggatgcattttggtgtccaccgacagtgtgcaagcgttgtgcaacgcgttgaaaaaggaggaggaggaggagaatgttcaacagcaaacggtggaaaatagtggcggagagtcaaatgtgagtttgaattttcatgtatttataagcaaaagggctggctgctctgcttgacagtcgaaattttccgagtctcgaaaaatttcccgctcgagaccgacaatctcgagcagccggctaatacgtatggtaaactttagtcgttctctgcccatggccagttttatgatggattttttgctcaaaacttgaaaatcttttggcagagtttgtgaaattgcgaaaattttactagcgatttttttttaattttatgatgaattaataagtttttttctaaatttttgaaaaaatcactgaaaaattttaaaaaatcttaagttttccttcaaaacattttcagatttaaaaattaatttgatgggtgcacctcaaaatattgccgccttttcaaactgagaaatttttctagaaaaaaaatttttcgaaaatttttataagaaaatttgaagaaaaaaattattgaaaattattttggaaattttttcaaaaaaaaactttgtaatttatcataaaatttatgcggcgatattttgtcccgtccccaatttgatggggggagggacgtgactgaatatatggccagatttttaattcaaaatccccaacatcaacaggtgtgtggtgcgcaacagttggtcagtttggtggtcggtggcactgtgtgcgagtcgcatcgccttcgtgttgggcgctgctcccgtgttgtagtcgatttcagcgacaacagcagtggcggctcattttgtgccgccaacgcgggcggccgtgccaaaatgaagaaaatgtttgtcaccggcggcgacggcacggagcagcagcaggacgacaccatcaccgatgaacaacagcagcaggaagacgaggatgacgacgatgatgatgaagacgaattccgcatactatctgcacaccgtaagcaaagaaaggaaaaactactcatttagaccatgctgatattactgtatccagttagttcaggaggtgttgtactgtacctcggcaaaaaatttttgaataagttgacgacaaattgaccaaaaaaaacgttaaaaa

SEQ ID NO: 24829 - DNA, 1356 bp, Heterodera glycines
tttagggacacccccattaaatggaaatacataggcaagaaatttcaaaaaaacacacaaaggaattattgctcttgataaagacaaatcttcggatttctacaatataatattcttaatatgatgtatttttgaaaaatgagacatagtttatgctttcattttactttaatataatgagtttttgaatgggataaaatcaaagttgctatagaaaaattgcaagaataaaattttgggtttaaaatatgaaatatgcttcaaacattcaaaatgtcttttttcatcaaaaaatgatatttttgaactttaaggtccggtccctccgaataaggacaagtgaaaatggaaactcctttcttaaatcaatcaattttcctttcatataaaattttcaatatacaatagatttctttcaaaataggtcccacattttctctccggtccaactgcacttttcatttgctttccgtgtgctcgtgccgcaccgacagccgttgtttttgatcctggatgaacggataagcttttcgtccccgccaaaactcaccacctccacaaaaattcatcattttaatccctttagaatgttgtatatgagtggtttaatgactttaatccacatccctcatttcattggaatgggggacaaagcgggggaggggatgaaaagcaatgaaaaagccggaagaggcggaaatgaaaattaaaattggacagaaaccgtagtgcgacatttgcggaccgacatttgcggaccgacatttgcggaccgacatttgcgggtcataatttctggatttaattttcaaaaaaaaaatttttttcttaaattggatgatcatctgaatattgaattttatatgtgatttttcggagttaagcaagttaatgcgaatgaaaatatgaaaaatttataaagtttttccaaaaagttcttttttcaattcctcttggtgctaaaaattttgatcacttcatatcatccttaagtagtgatctgatcaacttgtgcaatgcattagtttataaattcctgatttacaagaattatgttgtcattgataatgtgagtaattcattttaattttgctttttaaagatataaaatatatttttatatcttttatttgttcttgatattaatgttaggtatgcttgatcaaaatctaagctctttagactaaggctagtaggtgaaacacgaaaaattttgcgtgctatatattttgtgatatgatttttgtataaagcattttattaatcaatcattatttcaatttgatgataacgaaaatttatttgaaaattcatttaaaatttttttttctctttttttgataatttagtcacaaa

SEQ ID NO: 24830 - DNA, 1522 bp, Heterodera glycines
  unsure (1)..(1522): unsure at all n locations
cctgcannggtcacaattacaaaaagggaccacggaaattttctgactcttcgaaagtaaaagaaatatgataaaatatgtattttctcacatatctcattaatttacagctgaccgacattttagcaagtgcaaaaagtgcgataaaattgtggtcccaagcagccaatgaagccgaattgcagttgattattgagcgtaagttaacggaagaaacattttccgcttacacttgattggctaagattttggtgctatggcgttacccaaaaaccatcacaaaaaattttttgatatgactttgctcaaagcaaccgaatttttaattgttgatttctttcgatagccccaagtgttttttaaatcctgaaaaatttcattatgtttcaaagagatcaaattcaaaaaaaaatatctggtttttgaatttctcaggtcatactttatttaaactatgatttttttgaataagtataataaaaaaaatatttaccgaataatatcaatgttataaatttggttgcttttgagcaaagttgtgaataattttctgtcaaaaatttaattttgatgttttttgagtaaggatccggcaccagaattatattcattaaaattcctatttttggagattttaatggaatatgcttagaaaacttgctaaatttcaaaaatttgcccattttttttgagaaatcgcaattttaagacttttaaggaattttcttaaatgccgaataaaccgaaatttagcatttttggacattttattatataatgtcctctttacgcttttgaagaatttttttgtcaaaaaacataaaaagatttttattaaaccatttttgtacaagagtttttgtacatgtttcttatcccagccctaatgaaaacattcaaaaaatgctataatattataaaatctttataatttttattgacaaaacgtcaaaatattaaaaataaattattattttttccaaaaattccaattttttttgaccaatactaatcaaatatttctaaacagacatggccctgttccgtgaagaatatagccaaaagaatgttgtgctggcttttgagaagttgtgaactgaaagactctgccgtggtataaagaggatatgaaaatattttcattcacctattttattactagggctccaatttttagggtttagcctattttttcctgaaatcccagtggtctgaaatgcacaaaaaacaaatttttttttggtggttgttaagctacttttcgagttattatcaactattttctattttttgtttttttaaagcctaaaaaatttcaaaaaaattttaaaaaatacaccctaagaaatgaaaatttctcaaaatttatctcaaaaatttatttatttattttcttgacaagaaattttgatctgaaaaataatttagctcaatactgatttggcctagtttttttttacctttttgaataaatttcgtcattttacaccccctaaatttgagactttttatagcctatttt

SEQ ID NO: 24831 - DNA, 2274 bp, Heterodera glycines
ctcgatttgttcacgatgacgcgcacactcccacacgtgtcacccttgaaaggaatatcgccgcgcatcgccgacgcttttccgattgcgcggaaacgacgcccgccgctgccagcgattcgggtgctcagccagacgaatcagtcccacggccaatccatcgtcgcaccgctgaatttcaggcaaatcatttccgaatcagaccgattttatttaagagctttttttgcatatgtcatagtggtcataaattgtactgaactgccccaaaatctctcttcccatttcagcgccggaaaagtgttggcgcgcaaaaaggcagcaaaatttgagcccggacaatcctcaacacaatcagccggacaacagcaacaaaaaactgttgttgctggtgttggccacggggaacacatgcaacaaaaaggacaaggacaccaaggaattcaagggcaagaacaccaagtaattcaaagacaaggaatttacaacaagggcgcaattgaaggctttttatgtgagttagggcaaagtttaaaggtaaaaatttagcaaaactcagaaatatgacacaaaatcttccaaaatgacaatttaaaaaaaaattaatttacttgcaataattcatagccaaataaaactattggttcttcattacccatttttgagcaatgcatggttaatacgagagaatcttttttaatgccaaaataagggccagcaggcgatacgatgccaggaatatgcttaaaattatcatggccaaaacagtcaaagattaaacaaatattcgatcaaaatatttgtgggaaaataaattgaaaaaaatgcaaaacccaaatattggaaaaggtaaaattatcggaaaaatttagtgtattgcgtccgtcatattgttctgatgagtctccgctcgttgcaaattgcttcgcctgactcttttctcgatggcacaattcaacaaattcgaaatggccacccgctggaaatggcattgggtcccccaaaaatggcattggcacaaaaattgagccgaatgaatgccatggaagtggcaaaaggtatcaaaatgcatttgttgaacgatggagagatcaaaaactacaaaatattcgccgaaatcattgaccaaaccatggcaaattgtgtcgcggtgttcggccaaacgggcgttgacgttggcatttattttaaaaacaaatattatataattttaataacactttggttgggacaacttcttataaaaattcagaaaaaatatgtatataaaaatattattttataaatctttttaaaaagtaaaaatattttgactgggatgtagtccacttggggggggggactacatccacagtcacaaccaatttttttaagattttataaaataatatttttatatacatatttcttctgaatttttataagaagttgtcccaaccaaagtggtattaaaattatataatatttgtttttaaaataaatgccaacgtcaacgccgtttggccgaacaccgcgacacaatttgccgatggtttggtcaatgatttcggcgaatattttgtagtttttggtcgctccatcgttaaacaaatgcgattttgatcccttttgccacttccatggcattcgatttggctcaatttttgtgccaatgccatttttgggggacccaatgccatttccagcgggtggccatttcgaatttgttgaattgtgccatcgagaaaagagtcgggcgaagcaatttgcaacgaacggagactcatcagcacaatatgacggacgtgttccactaaaacccatttaaataattctattttatttgccaattaataaattcgattttaaattaaaaatcattttctttgcatggtttatgtgtaattagtttaatcagaatattattatctgacttattttatttttccttttttatctcatgtaacttccatcctcctcctctgctgttcctctcatttatactcacttaagtgagctttgatcctcataattagcatgactgctgctgtttttggccttgtgttgttgctggttttggctgcaattttttgctgctgaaccccagcgaccatttgttgtcctacggaggactgtccgggctcaaatttcggcaacgatttgcgcgctttccctttgtcgctgaaatgggaaaagaacaaattatgatcttcttttgtcaaattttaaaaagggtaaccgaattaaatgaacaaggaacttttaattagtggctgggttgtttcgtaaaaaatg

SEQ ID NO: 24832 - DNA, 1187 bp, Heterodera glycines
attcaatatatgtattcgggaaaattaatttaagaagcttaatttaaaatcttaattaaaacagtaagatatttaaaccaactcaataaaattaatttcaagaccaaaattgaaattgaaattaataaatattttttatttattttttttttataaaacaccaaaaaatttctaaactaaatttattgaaatttattaaagatatctgaattaaatgaaaatttattaaatagcactagaaaattactgtttaaaaaataattttaaatttaatatttgtaaaatgatacttaaattcaaaattagcacatttgaaaaacaagtattataacttattttaactaatatctctgttaaaatattatttaattttctacgataaaatatattagtttaatttggttatctaaattaagttttttttaagtggtttttcctatttcagcagttaaggcgaatcaaaaatttttaaaatctatagtttttgaaacgcaaattaatttaaaatttttcaatttaatatgtttgaaatctatattaaataatacaattaacgggtaattttaatcaactatttcaccagatttaaaaaataaaaattaaaacatgcattaagattaattaaattttgaaatattaggttcagggaaatttcttaaaccctaataaaaattaaaataaacataatttcaacaattgcttaataaattaattaactaattgtttaaaaaattgccattattttaaaataaaataaaagcaatcacatatttttatgaatatgtgtttgcaaaatttaagcaattaattattttaaagtaaagaaaaaataaacaatgaaaaaaaaatataaataatcatttaaatgaagtgaaaatttattgataaattaataataacaaaaaaatatttcataaattttacaagcttgacataattaaatgataataaatgttattaatgttagagagaatattttatataaaataagaaaatttttttttttaaaaattttatctataattgtgaaaagaaataaattgatttagtaaatatttaaatctatctgcttatttttctcaattataaattgaagtctaagttttcaaaacaactcaaatataatcaaattatacaaaaatatttaatatgcaatatttaaaattatatgaaaaataaaaaattag

SEQ ID NO: 24833 - DNA, 992 bp, Heterodera glycines
gaaaacaaaaaaaatcgattttttcaaagtgtccgtttggggtacccaaacaattaggggggagcaaaaatcccacgcaagaattaaagtacaggctatagggaagctattccggaaggattcggtctccccataaatctgggcgcatcggttcggggggactgccccgaaaacaaaaataaatcgattttttcaagtgtccgtttgggggtactcaaacaattatggggagcaaaaatccaacgcagaattaaagtacaggctatagggaagctattccggaaggattcggtctccccataaatctgggcgcatcggttcggggggactgccccgaaaacaaaaaaatcgattttttcaagtgtccgtttggggtactcaaacaattatggggagcaaaaatccaacgcagaattaaagtacaggctatagggaagctattccggaaggattcggtctccccataaatctgggcgcatcggttcggggggactgccccgaaaacaaaaaaatcgattttttcaagtgtccgtttggggtactcaaacaattatggggagcaaaaatccaacgcagaattaaagtacaggctatagggaagctattccggaaggattcggtctccccataaatctgggcgcatcggttcggggggactgccccgaaaacaaaaaaatcgattttttcaagtgtccgtttggggtactcaaacaattatggggagcaaaaatccaacgcagaattaaagtacaggctatagggaagctattcccgaaggattcggtctccccataaatctgggcgcatcggttcggggggactgccccgaaaacaaaaaaatcgattttttcaagtgtccgtttggggtactcaaacaattatggggagcaaaaatccaacgcagaattaaagtacaggctatagggaagctattcccgaaggattcggtctccccataaatctgggcgcatcggttcggggggactgccccg

SEQ ID NO: 24834 - DNA, 916 bp, Heterodera glycines
cttcgccccatacggcgattggacgacgctggcgctatcaacacggagcagcaacagcaactacagcagcacaaccaaagacagcagcagcaacagccactcggctggcgcagtccgttggtgcgcgagtccatcgacctggtctacgacttggtcatcgcatttgagcactgctacgcatccaacttcacattcctgcgcacattcattgacaacgagatcattgcggttagtagtaggagcgggtgcattacatttccaatccgccaaaatttgttcccccctcccggaatttttttttaaaattttcaaacttgaaaaataaatagataaaaattcaaagggaacagtcatttttctttgcagaaggcctctctcccttggcgacgtgccaccttcgccaaactgatcgacctcataccatccgccgggcacagtgtccaactcgtccgtttcgtgcagtacattgtctccccagtgttcgcatatgcatttgaggtatttcaccaacatggaactactaataattaatactggtttgtgagagtttgttttgccgattttgaattcatataaatatttttttaatccaatttttcccggcaatttcggcattttcgtttgactttccatcattttttcctctccgttattgttcagatgtttgacgttgatgcggttgtgggcggtggagtgggcccatcgtctgctgcctcaactgctgttgatgatgagaacattgtgcttttgctgtgccataaagtgatccatcggctggccaacgagcgttcgttggtgtccgattcgctaatcatcgtcatgtacttgttctgctcgttgatggtccaaacagtgtccattgcacatctatgatccccctaaaaggtgggtcaaatatgaacccaatttttggtaa

SEQ ID NO: 24835 - DNA, 1435 bp, Heterodera glycines
tcagtctgtccgccagactcagtcaatttaacgcgtgcttcgagcttaaaaagacaaatacaacttaatattattaaaagtctaaaaatataaccagtcttgtcttcgcctcctctttgcggcgcagaatgtcccatgcacggtttggcggacccccattaggtttggtgcatttttgagaatgtgaaacttcccctccatggcttcttgatatgtatttggatgcgtatttcgcacattgatccaagcacgccaaagattatgagtgtcgtacccactgtaacttgaacaacgcatctaaattaaagccaaaaattattattgcttgaatagaccgctaatcacaaacaaacatctaaaagccgctgatgaacacgatccatttctttctccgaaacatcagtttctccgtttttcatcagaagagcgctcacatagcttacggcttttgccaaaaagaccgttttgttagccattttccgcgaaccctcgattgaatgatgtgcatttttttcaaaggtgacttgttgatgttgtttttgtccttggaactgtgttccgtagccacttcgcgcaatggtgcattgttgacgttgtttttgtctttggaattgttttccgtacccacttcgtgtacaaccgcctcaatcatgtccgtttgggtagccttcgccatgacgtatttaataaaattgcttttaaaatttgcacaaaaaataaaactaaaagaacgaaaaaatcgaagtatatgtcaagagctggaaatcattaaattaataacagcagctgcttaacaaattcattcattcaaaaaaaacataacttcaaaaaaggattcaattttttttcgtacccacagcaaacaaaaaagatggaaaatttaaaaaattaaagatcatttactatcgctcagaaaagtagcggaatttctgctgcccaattgggacatggcacggcgtctccgtccccggatggtcggcaattctgaacaacgcacgcccattctcgccggcagcttcatttgggtggcggtggcttggctccgacgtacccacgccgttgttttgcacaataaagtgaaaattacagtcacactcgggaatgtgacttaataaataataattttgttggtaggctttatcccaattataccatttataacccgctgcacatttgttgtccttgtgccccggcattccgcagttccaacagccaccaactaatgatttaaaagtataaggatgaaaaaaaaaaattaacgatgggatgcagggtggcgatttaagcattctcttgcgctattgcttccaagtgccacatctgaagaatctttcctcgctttcggaccccccccagacaattgatgggtgggcacgccccaacaatatgcttggccgtggcaagaaaaaaaccacccttcatggttactcaataa

SEQ ID NO: 24836 - DNA, 1503 bp, Heterodera glycines
  unsure (1)..(1503): unsure at all n locations
ttttttccgtaaaagctttccctgttcggttgcgcaaatgcgtcgctttttctcccttattcggatggccaacgaccgattcggagcagtacaaatcagtgacgaagttgttggactggtcctccctcttcccaatgcccccccccccaccttagaatgggtgtccaatcatcgccagcggtcatttcccttcgtcaactgataagtccgatcatcacagcttactatcagctgctcaactcaaattcgaagtgccaaagttcggagatgatcagcaatcgaatgaccaagaaaaggccacagacaaattcattgtccaatgtgaagtggcaatgaatggcggaggagaagagcaaatgggcgaagaagaagaagaaaaggtgggccaatgcaaagaaatgccaggagagacatttatggacagatcagaggcgatcaaagtcaatttgggggagggctaacaaattggacatcggcagatagtcgtcctttcatttccttcgcctcatcgtccgaacaattcgcgatggacgccccggcgcggcctttgccactgccaaagtcggccaccgtcggtgccaaacggcgccttaattaaaaaattcaaaatattaatggacgaactgctaaaaaagaactaaaaacaacgaacttcctccgccatcgcatcggccgtatttttaggctgaaacattctgagccgcgtatttctaattggcatttgccttctccgaccgtcgttttcgttgtttgtgttggcattgtactgctcgtccccctcggtcaaagagagtaccatcagtggaactgaccaaggaggaaaagcatgaggaaaagcatgggggaggaagaatagtatgcaaatttcgccaccctttgcctttgccagtgaatggctttttggctttccccactgttttcaccttcctccgcttccgtgaacggttcaacagcagctgctctcttcccgaacaattctcgtgttcttcgggagtgtcgttcgtaatttgcgactgcaaatggcaaagaatgccgatggcataattctgccaattcttttttgtgccgcgttttcccacctgctgccggaggtggtgcgcttcgctttccgaaaagttcgcgcgccctccgtttttggaatgcgtccaatcgatcggaaggcaattcgaattcatcaaagtccatgccattaacaaactgggcaatgatcagaagcaaaatgggcaaaagggacaaaagggacggagaacggcaaaagacggaagagaatgccattgacgaaacgaagaacgaatgatcaatgaatgggagaccgattacttctgctgaaaatggcagcgaaaattgaaaaacagagaaaaacggccaaagtttaaatgagaaaaaatgcgaatgttttggctgctgctgaaaattgggctttttattgcgggaaaatgccttttttcgtgaagccaaaattggacttgttgcaaaacaatcactganatgcgtccgatttca

SEQ ID NO: 24837 - DNA, 1046 bp, Heterodera glycines
agaaataaaatggaaaagataaattttaaagcatgatgcaatttcattaaaaatgggataaccttaatttaattggaaatgttccccctcttcgtcgttctattcaaaaaatatttgtttgtttacattcaattcttattcatttctcacacaaaaatgtattaatcagcgaatgacaccctatttaagtcgtggaattgttattgaaatcggttcagtcggaataaaacatcattcccctgcttgtctactgtttgtcccaatttctattttgccaaaatttttgccgggccgaatttgcctctgtttggtcccgacaagaactatttttcgtgcgttttcaaacacactattagtgctttattcaccgctacaatagaagacaaaagttggtgtccaattcccggtagggatttaatcgtgactttcagagatagccattttttgtcaagaactatttttcgtgcgttttcaaacacactattagtgttttattcagcgctacaacagaagacaaaagttgtatccaattcccggtagggatttaatagtgactttcagagatagccattttttgtcaagaactatttttcgtgcgttttcaaacacactattagtgttttattcagcgctacaacagaagacaaaagttgtgtccaattcccggtagggatttaatagtgactttcagagatagccattttttgtctagaactatttttcgtgcgttttcaaacacactattagtgctttattcaccgctacaatagaagacaaaagttggtgtccaattcccggtagggatttaatcgtgactttcagagatagccattttttgtcaagaactatttttcgtgcgttttcaaacacactattagtgttttattcaccgctacaatagaagacaaaagttggtgtccaattcccggtagggatttaatagtgactttcagagatagccattttttgtcaagaactatttttcgtgcgttttcaaacacactattagtgttttattcagcgctacaacagaagacaaaagttgt

SEQ ID NO: 24838 - DNA, 1919 bp, Heterodera glycines
ggggggaccctttggttttcaaattttttaatatatagtcatgaaaattattcctggtggttcatggggtacatgacctcgaatagatgtcaaattcgtgatcagcgacctctaaaagcccggataacaaatttttatgggtttttatcacaaaaaaaaaattgcaaaacaaaagggtcccccttttgtttttgataaaatccaaaatcgggcaccttccaattatacgccattattttctcgaaaagtacccatttccaagcctaattagttaatgttgtttttttgatctcattgttttaaaacaattgttgtttcaattctatttttatttaaatccacattatttcagcagaatccgctgcggttaaagcggtcaatctttccgctgacacttggctgtccgctcgttgttaccttcttctcggtatggtcaacaggttcggtgactgacaaaatgccattaaatttaatttaatattttactctttaagtatgaaggcacgcaacagttatttttttgaacagaagaaaacactgacattggaaagcataaaatttttcgagaaagcaatcgaattggacccttacgacgacttggcccatttttactgtgccatggaatatgcaaattgtacgtgccatttccaagttgttggttggtattgcttcacttctctcccgtttcagcacgcaatttggacttggccaaagagtgctgtcagacggcactcaatctgaacatggaaaaccccttcgccattatgctaatggcactgattttcacggcccgcaaagacttcaaaggcgctttgcaattggtcatcaacgccctctccgattttcccacacattatggactgttggtgctgaggttggtaatgcttttgctacgagataaaattcaaaaaagtaagcaattaggcttaaattggaggccaaatacggtcgggtggaggaggcgctgcaaacgtcgcacaatttggtctatttttggcgcaaaacgcgtcctccggtggaatgcttttcacccgaagaggaaaatggagcggagaacggaggcgaaggcgcatcacggattggggacagtacaatgacactgagcaaacagaacgtaatgccggggagaggagggggagggggctgtaattttttggcatggcatcgctaacaaaacggcaatcttagtccaatttcttgacaattttttgtgttttcagtaccacagcagagacgcgctggtcactcccctcactccgctgctcaccgcgtccattggaattgccaccccttcggcccatctgtcccttttggccaattccgcttgcgacgcaatgacttctttctccctcaacggtcggtctccccattatcgtcccgattaattcattctccctccctcctactttagacgtttctgccatcgatccctccaacaccacacaaatgtccgaatttggtgccgcaccgccgtccaccgattcgctgagtaatgtcacttcgtcaagcaaatcctggatcagtttctccgcctttcgaattcaggttggaaaataacacaaatgtacatcgtacggtttattagtaaatgtgctcatttcaggcggacatttgggtcgaattggctgaatttttcatcgaaattgaccgggtccacgatgtccaggcgtgtgtggaggaggcgtgcgcaatttacccgcattcccaccaggcgctttacctgaaggtccccgccattgtctcactttaaatcaaaaagaaatacccctttttctttcagggccatttgaacttgagtcgtgccgaaaaattagcaagcaaagatgccgcgctgagtcgaaagttccgcgaagacgcacggaattgctttttgggtgccctatcaatgtgcgcgtggcattgtccgtcctatgcgttgc

SEQ ID NO: 24839 - DNA, 1810 bp, Heterodera glycines
  unsure (1)..(1810): unsure at all n locations
ttttacgggaatcactgtgatagacccaaatatnaatatgatagactaaaaggtctttttacataaatgacatgatagacacaaattaaaaagatattttaaataaataatttttcgtgaaactatcagccaataattgattaaaaattatttattaaaattatatataaaattcctttattttttattgtatccaattaaacgggccataaaattcaaattggcagagaatatattaatgagtatttaaaatacaaatattttttttatatccttatttagcatttcataaacttaaagtataatcaataaacgaggagatgcacaatttccgcaccgacttcaacatggaggcggtgcacaacgaaactccatctggaatgccgactcacaaactgaccatcaaagtgaacaaaattttatttgattattgtttaaccaataaatccaggtgggtagtgttgaaagcggccccggcgctttcacagtgccccttggggccttggttaaataataataatgaaacaaacaaaatttagagtgaatctccgaaagcgaatcaaattcagcaagtcattgcgcgaatgaggaaacataataaaagcaaaaattaaaagcaaaaaataaatacaatttcattatataagaaataaatagttattttttaaaaaatttaatgggattaaaaaaccatattaatattatatagaatcatagaattaaattatttaatgaatctatacatattacttcttaattatattaatttaaggttaaaactcactcaattcattaaattttaggacgagattcaccatgagaataaatcacaaaaagaattcattttctcaattaatgaatataaatcaacaaataattttaaacatttgaaaaataactcaaattagggactaaataattaggtaacaaatattttaaaattaatttaatggtcgacaaatgctgaaattaaaaaattaaacgtatacaaattatttatattatactatcagaaatacaataatttaactaaattgctcatatatttttatttctcatataaagctattaatattcaacaattaaacaaatttattaaactaaaaaaataaaatgaagtattttctcaatattactaaacaatatttactaaaatgtaaaaaaagttcattctttataagaatataatgcattatttaacgattttcatttttttaatatatataaataaaagagcaaaggtaaatctttttttactataaaaacatattagacttttagttaatgaaaagagagaggaataatcaatacaaaataattagcataatttaatgcgcacccaattaaaataattttcttttctgtaaaattattattaattaattttttttaataatgtttttggaaatattatttaactaacctgactataattaatgacatatgtatgcacaaattcctaataaaaaaaaattgaaaattcttaaatagtttagccaaagatttttctttaaatttattttatggttatgtcatactttattttgtagtaacactctcccggaaaatttaagatctttgaatgaaaaattaaaatttttatttttacttgttaaaacagttcgccgcttaaaataatataattagtaaaatctttttaatttctattcattanatatatgacttaattattttanaaaagataatataaaaactaaaaaaatatctgaacataagaaattacgaaaaaattttatattcattttaattattatgaaaaaatatacagattatattggaaaattcaaaa

SEQ ID NO: 24840 - DNA, 946 bp, Heterodera glycines
  unsure (1)..(946): unsure at all n locations
aaaccttctaatgtgtttataatacgattaaatccttacaggagaataaacaaattaaaaaatgtattttttattagaatttaatttaattctcaattatatttcccgaaattaccatataaaccctttagattattcatttttccattttaatgtttggatatatacttaggttttttaattaaagtatctttttttctctaatttacaattgcgtaagaaatttttgtcggaaaacattccgacaaaagttatatttatggtaagggactgaagtgtacaaattgaaagtgaatttgcgagaatattttggccaaaataccactgacttcgaaccgtttctcggcctgccaaatgaggcgtcttccgctggcctttcaccaggcgaaaggcgtccatttaacagctaattgtaagaagatgaaccaaatcggctgtcttctgtttactctcagcttcgtaagacgaaaacaatggaagaagaagtaatttatgaagaaggaaaagcgaacgattaaacgcaacaaacgaaactttgacgagaaaagaaccgaacgaagtcgaacataagccaataaaaagagggaatgaaacggaagggggacgcagaggaggncgggaagatccccgggattccgccccccccccccccttttttgatattctcgaaaggaaatcccgccggggacagtgataaaaaataagtcattaattaattaataagaagggacccagcgacaaaaaattgacaaacttttttcgtgttttgaacaattaatttttgcttcaagaccggagtcagttgacaaatgatgcaatttggccgagagtcaactcacaatcagtcgagaaatgataaaacatatttttaatgcgaattttcgtctttccttgggtttttttcagttttttttcaggtttccttagttttttaccttttaaatcc

SEQ ID NO: 24841 - DNA, 1720 bp, Heterodera glycines
  unsure (1)..(1720): unsure at all n locations
gacccccgttttggcgaggttccccgtgcccatccccgacnggggaagatgatgaaaaaaaatcacngaaaagtgatcagaagcaaaaaaaaatgatcagaagaaaaaaagtgatcagaagcagcagaaaaaagtttcgctgttgtgctgccgcgcgtcgtacagaagtggaacggtgagcgatttggtaattacagtgcccttttggcatttccacaataaatttattcttaatgtgccgaaaatgttcatacaaagggtgaaatattttattatatttttgatgaaaaattttaaaaaataaaaagaaaaccctaaaaattgttaaattttcattagacaatttcaaaatgagttcaagcaaaaaacagaggacagatggatccaggtagaaaagcgaaagcaaaatttaattgttccgtaaatgtgttaattaggctaatttatttgggtttttttgaaggtggatttgaatcccggcaaatatgctgtcaatcgaaagctaacgaatcggcaaatcgaattttgagctaaaattcttgagcagaatgaagctaaggtcaattcaaaaatagcaaattaaaaaatttagtttcataataaaataaggtttttgccttttaatcttacaaaattaaaaaaacaattaaaactttcgcaaatttaaaacagcaaaaacttctgaccatcacaactttaaaaaagagtgataatccattctccgggacattaaacaaaaatccctattaaacgacagtaaaatttagtgttcgaaagtcatatacacagttaaaatttggtttgtctatttagggtcattccaagcataagcattttttgaaatttactgagattacctaattttgaaaatttatttgtctattatttttaaattattgaatgaaacactttttttggattaattaaaaattcaaaaagcgggaagaagggcttggattgatcagaattaattattattacattcgtttgtaatcaatcactttttatcattccgaaattcgtcatattttttgagagaagggctcttggattgatcagttactattatatccgatcactttttatcattttgaaacgataattttgctaatttaattgcctattaatccatgcaatttctgttaaattttaaattagaatttaaaaccttagaataaaaaaagttaagctcctaatgcattttttggcctggaatttcgatatttaagataattcgcagtaacaaaatgtcatcgcttttattttaaatggataaaaaagcacaaaaaaaaattaaaaaaaaagtaaattaacatgatcataattatttgttttgatttcaaaattattgtactccgatggcactgatcagtgagtgatcagctgactcagtaaattcctgccgattttcgtttttcttctgcagcagaagcatttgcaacttaaaataattttgaaaatttatttgtgtatacaatattttaaattgttttttattttatttttttgtaaaaaaattaaatatttctttttataacactcacctgcataattgtgctcatcattgtcgactgttgttctttgattttgccgatctctgcccgcagctcgccaaactgttcatccactgcaaatatttcaaaaataattgcctaattagaattttcacggcatttttcggtaaactaatgaaaatccgaaacgaaaagccgacataaag

SEQ ID NO: 24842 - DNA, 1300 bp, Heterodera glycines
ctggagaagttaattggggggcaaattactgaatatgctttggaagaccaatgaagccccagcaaagttcatggatgagaattgtaagttaacgaaacgggaagaaataatatgccgtatttataatgagtggctccgaatttcggaatcccgatttttttttgggaggggggggggggggggggaaatgccggagttttatgtaaattacttaatttttatttaagttatgcttgatgaaattttttttcgaaatttcaaaaatcccacaatcccgcgcatgatcccataaattttaaatatgggatttgtaagctttatccacgggatcccgtcccgcaaaaaatattctgagttccaatcccgtagcgggattcgcaaatttcaaatttccggttctaattagtacagctttggaaaataatacagtatttgatatgacatactgaacggcttagctacagtatgtgattggcatactgtgtgtgtcaacagcaataaaataattataaatttttttcatttttcttcgacaaaaaccgactcgtggatcattacaccagcgctctgctggtgagtgccaacatgcctgtagactctgttgctgatcggatgcgtaacataaaaagcgctgatctgattgtgtggatgcaatggtttcaatcggcgcataagggaaaagcggggcattcgatcaaacgagaatttatttggctatatgcacgtgttttttacgaccggtatggaaatggatttgacaaatattttgaagccgaattctccagaattgaagtgctgatggaaagtaagcaattacagtcccattaattaattaattgggtaattaataaatgatttaactacagaaatcacccaaatgcacactgatgctactgctgctttcgctttgcagaaaggcatttgctgtgaattgccagaaaaatggcgtaccataatcaaccaaggtacgatgaatgagagcattttggaagtgatcgaatcggatgagggaaaggaaagaaaaatggggacaaatgaatttgtacaacagttgcattttgatgtgatcagagagttttgccaaaacattgatcaaaccgaagaactggttcagagaaaaattggaaatataataaaaagtaaattaaaattataaagtttttggcaagtaacggaaaatttttttaaatttttaagtgttaaaacagagcaaagattatcgacgaaatttgaaggaataatgaacaaaggacagatcaaaaaaaatttccaacatattggcattccatttgatgaaaaa

SEQ ID NO: 24843 - DNA, 877 bp, Heterodera glycines
tttatttgtttttttttgaatttgcttttgcatcgtttacctgaatgtcaattctctgtgttatgaaaagaaatttatctgttgaggacatgattatacacagcggcccaattttgggctccaagtacaaatatgctggatttttcgtcttagtggtctgtgagttagtcaccaaaaaggaagtctcaggttcaaatcctccttgtgtttgtgtataaatttcaattttttaaagcaaataaataaaataataataaaaacagaacgccaaaagaacaaatacaaacagtaaaaggtacacactatattttacccttgattttatgaaatttttttagcttataacttggccaataatagaccaaacaaaaccattttgtgctcattttgaagggaaaattctgaagaatatttcttagttagtcaaaagtttaaaaaattgtttattggcaaaaaaatgaaccatgtgttattttatatgtcagagacatggaaatagggtaatagtaccgatggtatcacaccttttttgaaaattttttaaaaaatttcaaaagtcaaaaatatttattataaggttttcggggtcgctgagcacgaatatggcatccatttcacccaattccgaacccctgatccgaattcgaacaaaaatcgaaaactcaaatttttcgaaattcacatttatccaacaaaatcgctccaaacgcaaggagattcataaaaagcagaaacagcctttgttttaacgtttcagttcttttttttaaacttattatatggctgctgtgctagaagaacttcggaactttacggcccaaaaattgcacgcgaaattggcactagaagacaatgagtttgaccaatggcttgaaaa

SEQ ID NO: 24844 - DNA, 1318 bp, Heterodera glycines
  unsure (1)..(1318): unsure at all n locations
ccccccccccccacctccaccgcaggaaaatgcggagcagcagaaagggaggggatgagagagcgaggccaaatgagagggtgacagacacagcgagagtcaagaaaagcgggaaaagacactgaagagagaagggagtgagactacgcaagagagcggtcagacaaacggacggagcgcgagcagacggattcgcgcgaggacttggtaatgtgcatgggccttttatcagttaacttcaatgggttatatagtggcggagtatttagagaggactctgaagatgaatgagagaatgtcgggcagacggtgagagagagagggatatagagggagagggaaaagaaaaaagagtagaaagagagagggagagagagaggaagaggaaagagggataaacaagagagagagagagaggagaaaaagagagaggggagaccgagcgatggatgagagagaaaggaggaaaagagagaagaaaagaatggaatgtgagaaggaacggggaaaagagaggaatttccattattagtcgagactctcgaaaaagccgtttgagtgcgtctgcctcacgtcggcggagggcagagagtgtgtgaatggtgggcatttttcattctttccctccttcctcatcagtttgtctgctattccatctttctctgtttctctgatggttttgagataagcactattcctccccccccccctctctttcgactttttgtccacatttcttctctgactctctctctctctcactctctctgcttcttctgcccctcctcctcctccgtgtggccaaatgggttttagctgcgaatggcaccccccccccccaccccccgaagcgacgggagaaaagcgcgacgaggaagcgaatgattttttgtgaggggggggggggagaaaatgtaaagggaaattgggacagaaaaatgggaaggaaaaaaggaagtgaaatgcgaggggtttttttaataaacccatgggttttgccattcattttaatgcgcaagtgcaattgataaaagtcattttggcattttccatggcatttcagagatcaaaggagccgagcaatgaatgaatcagtggcctttttccccagtttttcctatttattgtaagaaatgttttgatttccaagtttcggaatttttgtacctatttaataactttttgagtttttttatttgcctatttttctaccgatttcgttattttttcttacctaaaaactcccagccctattaatcaatttanaattaaatgctntttcaatttatttggcgtaaaatgttttccatctatcaaa

SEQ ID NO: 24845 - DNA, 1497 bp, Heterodera glycines
  unsure (1)..(1497): unsure at all n locations
aaattcccaaaaatttttgagcaaaatgcataaaaattctnntaagactaatcattatntaaacctnttgtctttcattatttgtcgcctgggttcaatttcccactgggattgaagatttttcatattttctttaccattatattaaatgaaattttattaataaaaaaatattccaacttttaaattctcaaaaaatttttcggcatctaatcttttcaatttttaaaatcataataaagcaatttatttttttatttgttatgaaaatagttttaaattaagataaattatatttaatttcgatgggcattattttgagtagaatttagattattttgattctcttgccatggttcttccgctttccgtactttgtcaattcaaatgttttttttataattttttttatctttgttcttttattcatataaaaattaaaagtcgttaaaaataatataataatgagaaattattaattcttttacctttttaatcaataaaaaatattcgtttagtaaatttgagaaaatatttcatttttatgaattattggatgaaatattttttataattttataaaacaaagaaattttatgcattattgtttttcctttcttttatttttttaaaataaataaaaattatttaaattcaattattttaggcataccgacattatttatgaaacagaatttgcaattattaaattatttattgattttaatttttgaatatttgtaagagcttgaaaaaaataataattttgttggttcgtggtaatcggcgatgtttgctctttttatttaatttacatatatgctgcataattttattattttattattaatttaataaacttatttcttcttttagtttataaagttttttttttgcttggaaaatttggtattatttttttaaatttcaagcttttttatgtattttttattttcaaagaatttagtagagttgagcggtaatcggtaattgcaaaaaaaccggtaccggtactgaccggtactgcaaaaaccggtaccggtaccggtaccaactttttcatccggtaccggtaaaaaccggtaattttagaacataaaaatttttggacaaaattttccaaatacaaaatttttattcagttttcgcgcgagtacctgttttttagcattagaattgttcagaagtatatgtatattgagggtgaccaagtttttttttcaaattcaggacatagaacactaaaattcagatgtagacctcaaaattcagattattgcaaaacaaggggtcagcagccaattttccaattttgcgaaggggtctccggccatgtaaattaatgtaaatcaatgacctttttttgctttcaacaccgcctttaatgcggcacgttttttccaagacttttgggggacaaggagggccggcggtgccgataggcgccgccgggaaaaattttgtaatttttaatgcgatttgttaactagaatttgt

SEQ ID NO: 24846 - DNA, 1260 bp, Heterodera glycines
cgaaggagagaatttaattaaatccattccttcgggtcatgtgccgggtgccgcggggtaagcagtgctggttcgtctttcacggcaccgaaccttttggctagtcagcaatcgttgcttaacttgccagatcggacgggtgcgcatgattccactgttccaagcaccccaccaaaagcaaaacgatataaccaaaatataaggaaaaattttttaaaaatttttttctccatcttcctttttgatactaaagcatcagagtgctaaaattaagttgtaaataaaatttggtgcgctttagagcactttctgaaaaaaatatttatgaaacaaaaaaatcgattttttcaagtgccctgtttggggtactcaaacatttatgggggagcaaaaatcccttgcagaattaaagtacaggctatagggaagctattcccgaaggattcggtctccccataaatctgggcgcatcggttcggggggactgccccgaaaacaaaaaaatcgattttttcaagtgtccgtttggggtactcaaacaattatggggagcaaaaatccaacgcagaattaaagtacaggctatagggaagctattccggaaggattcggtctccccataaatctgggcgcatcggttcggggggactgccccgaaaacaaaaaaatcgattttttcaagtgtccgtttggggtactcaaacaattatggggagcaaaaatccaacgcagaattaaagtacaggctatagggaagctattccggaaggattcggtctccccataaatctgggcgcatcggttcggggggactgccccgaaaacaaaaaaatcgattttttcaagtgtccgtttggggtactcaaacaattatggggagcaaaaatccaacgcagaattaaagtacaggctatagggaagctattcccgaaggattcggtctccccataaatctgggcgcatcggttcggggggactgccccgaaaacaaaaaaatcgattttttcaagtgtccgtttggggtactcaaacaattatggggagcaaaaatccaacgcagaattaaagtacaggctatagggaagctattcccgaaggattcggtctccccataaatctgggcgcatcggctcggggggactgccccgaaaacaaaaaaatcgatttttactcgtgtccgtttggggtactctcacaattatggggagcaaaaatccaacgcagaaataaagtacaggctatagggaagctattcccgaa

SEQ ID NO: 24847 - DNA, 2309 bp, Heterodera glycines
catgcatatttttttcctggactgtgggaggcctgaaacgcacgaaaaccatgtttttagcttgttttgaagcttctaggatgactttccatatgatatttgtgcatatttcgcgatttatgtgcatattttggcatttcgtgcatattttatgtgcatattttggcgtttttccaaaaaacctctaatagatcggcccccaacagacaaattggcctttttgacctcaaaaaccggaaaattttccaaaaaaataattttttagcaaaattttcacgaaaaatattgaataaataaattttctcaaaaaatggttaatttatgttaaaaataagcaaaattttgcttttcaggttgatttttcgctaaaatgagtaaattttaagctgtatcgtgtttttttctcctaaaatgctttttaataccacatttagccatttttgaagattttactttatgtttaacaaatttgaagaaattttgagaaattacaccccaaattggaaaaatttatgtgcatatttttcactttttatgcgcatattttgcgattttatgtgcatatttttgccaaccttatttttgaggacaggcgtcctggctgccgccgggtgtcctatttcatggtcgcatactctcgccggcgtcgtcgtcttcgtggatgtcgtcgtcgtcttccccgaaggacagtcggggccgcggcgcatccaacggcttctgaccatgattgggaattttatatattttagtaattattcaaacaattatttaattttcctaatgagcagggaacggtaacttcccacccccccccccctccaatttaccctaacaattcgtccgcaggagcggcgagacacgcgcgtcgtgcgcacgattttttttgttggcgtgttgacgccatgcagctgtcgaacctgttgttgttgttctggcgtgatgccaggacgtccacggctcctgcctgaaacgcacgaaaaacatgtttttagcttggtttgaagcttgtaggctggatttctatatccatatttttccatatttcgcgacatgattgagaattttatatattttagttaattattcaaacaattatttaatttaaggaacaccagagagaaaaaggaatgccaaatttaaattaacgccaaattatcataacgaaagcaacatattaattttaaattccaacgccaaattacaaagaaacattttgctggcggccaggggcggagaaaaagccgtcaaaatagctaaatttcaaaatccattgtgtaaacgatggaaaaaatgctaatttatcgtttcaaatacacccctattttcccagcgtcgctggtatgagcaaaaaaaaaggtcgttcgggcgaaagtttttcaaaaatacacccctaagaatcgggcgaaaattttaaaacaaaatcacacaaatttgctagcattctaaagctcttgatgagctaagtctaaaaaacaagttataaattcgaaccgatgccatctgagcactggacaactgagtcccagtgaaaatggacactttaccgaaaataataaacgggaaataacaatttaaaaacaaaatttcgcaaaagggagcattttatgcaaaaaattttaattcgaattaaaattttgtagaaatatgatttttcattgtcaggcatttttatgtaccaaatgtccggagtcttttgccacaaaattggcctcaccacccacaccaggtggcacggcgcagaaggaaacccgcaagaatggtacttactgttttattattattaaatggtttaaaaattggaaaattttttaataaatgcgcggtgcgcggcctcggcaatttgaatgcgcgatccgcggtgcgcggttttttttgcgcgatccgcggcaatttgaatgcgcgatccgcggtgcgcggccgcggtttttttctgtgcgcgccccacccctggtttgggtccacatttttggtcaaatttttcaaaagcgtaaccagacagtcagacagtgcgctatttccttctttatttttctcacttcttcccttttcctacacacaatgctgctgcacagccagcacacggctgcttactgtctgcccttccacccgccgcgcccccacgagacagacaggtcagacagtgcacctatttcttccttctctccactggctatacggaagaaaacaaggaaatagtgcactgtctgactgtccggggcaggtgaactcgtccaatttgcacttttcctccgtccccttgtcattgtggggacatttgcctcgtccgaccattcgcgcagtcctccgat

SEQ ID NO: 24848 - DNA, 1904 bp, Heterodera glycines
ataaaaagtaataatattaaatttgaaatgctttttaactatatttcatgtttaatactttgcttaaaaattaatatatttttatttaattttaattatttatttttttattatttattattcaaattaattaaattgttttaactgtatgtattaaatctgttcattaatattagtttaaaattcttcataatcaccttttctcagccaaatttagcaaaaattgctttgacattatggaagaaaaacaattgtgaaccaacagaaaagcaaaaagaattatggcgtgaataaaacacagattcattttacaataaataatagttttaagcttaatttaaatttgtatttacaataaataaaattaattccctcgaaatttcttcgatttaaataataaattattaatacaaaaaacaaaatttcgcattgtttaactctaagaaaaaatgctgaaatgaacatctttgtgaaaatgaatgaaattgtaagtttaaaataattctttttttcttaaacaattaaagatttgaaaaaattggtttaaaattaattaataagtgaaaaaataataagcgggaaagtattatgacaaagaaattaattgaaaataataaaattttattaataattaataaacaaaaatgtatttattttcatattttttcgaaaaaacatcgataaattccttttgttttcactgtctgtcactgataaagctttgacagaaaagtattaattcagcaaaacattaacaatgtttacacaaataactttacgaataatttgcaattgtaaaacattaataaaaaataaatttattaacatttaatatataaattgaaactcagccccggcttaaaacttgctcaaaaatgggttttcgaatattttaggcctttatttttgtacagcgacaaaaaatgtaaattttggttataagtatttgtcaagtgctttcgaacattcctaagagaatgtttgatttggctgtgaaagaaaaaagaattacggtcctaaattcgtccagggctattttcggtttcggttttttgtcctttacctggttaacgggaaataaaatcggttttatcaaactttcttttttatgtaatttatttataaatattccatcgttttcatttaatttgaaacaaatagttggccaattatggattttataccttttaaccaacatttagatttgccgcataattgaaatgttttattggcattttaaagaaaaaagaaataaatttccaaaaagcgaaaaaatatttgtcattcattgtcacagtttcattcatttttcagttttcgtttttagttatctgaaagctacttatcctacacggtaagtaaacaaaaaaaaattgtgtatttgttattttataaaatgataatttttttggttttgggcacaaaaaatacagaggaaagttttgattaaatataatgcgcaagtaaacaacattaaggcagttttaagtagggttatgccccgatccgatgcggggaatacgaatcccatcagttggactgcaaaggacgaacgaaaatgttttctttaagagaatttcgaagatatttttgttttgaaaaatttctataatcttttcctcctttttatgaaaattcctccccgaagaggatattactccccgacattttaattaaatttctccatctatccccgaaaatttttgacggggaatttcctcacccatccccgactttcctctccccgccgagggtcgggggtttaacaatagttttaaggaaaataagcatacattcgagaaaatgtataagaatctaaaaaatcaatatgctttttttaggtcggcatatccaaattagttaggaattgctttctttatttattttttattattactataaaa

SEQ ID NO: 24849 - DNA, 2664 bp, Heterodera glycines
acaaatatgacgaatgtgttttccaatatttccatccaatattgaatttgattctcttttccgtccctttgatcgtccgcccgttccgtctcactgatcagagtctcaccaacccttaagcgttgaaacgcgtgtccgccaaaatatgcccgttataacagaggcggttgttcagcacagtataattaatctggtcggtgtcctcaacgcgcgggatgaattttggcgtactgctggagggattaattatcaccgttaattgattagattggctagggagactcaccgcttcagctcgttgaaattggcacgcccgcgcttggccaattcggcagcctggcggacgggggttggcaaacccggggccaatgtcacaatttgccaattgcagcagagcgaaaggagaaaactggaaaatcaattaaaaagcatgacaccagcaacaaattaaagaaattggagacgattttgtgttcaagttgctgatatcggaatcccccacccctcggcaccgtttttgtccctttttttggttccaattacatagaaatcgtaaatttttctcaatatattaatccacctttgcaactcgttgttattggccatgacttggttcaccgggaagacatattgagggattttggtggttccctgtaataaagcataattaagcgaataaattcgtaacgaacggtccgtcatttcaaggccatcaaaatcaccttcaacggaacgtgagactgcagccagaactcgtgaatgtcaatgcgcgtgaatttcgaatcgacgacgcttcctcaaaattaataactttaattttaattcagcattcgtgctatttttgatattaggcatcggtcggagaaaaagtggcttatccaaattttggggggaaatgaaacttttttgaatacgacggcacttatgactggcttttgcccgttccgtatttgaaactgatttcggcattcctgcactgttttaggtgataagccattgactcgtaaacatttgtgccgttctcaatttgtccgttaattgttggccaacggatgaatgagggaaaggcatggcacaactaattaaccccacccggctccgtgttctccacttgctgcccgcttttgacaaagaagcgcttgttgtgtttcttgtccacaatgcagtagacaaacttcggtgaccagttcggaaccgcctttttgcacgcgtcgacgtacgcttggaactcgctgtgcgcgttctgaaagacggaggacagagtgccaatgccaaccggtggaattgcggtgcaaattcaaaccgaccttcggcaccattccctcgctgatgccgtcgcggatgatgaaaacctttgagaaataacattttgttcgtgatgatcagtgatttcaatttggaaggtccaattcagcagggattggcacgaaattcggatttcgacattttggggtcggaatttccatttccgaaaatttttggggcctcggaatgccatccctggtccaattcgttgacttaccaccgacggcatcttccctcggttcttttgcactttgtccaaaatccagccgaatttgtattcgagcatctgtttttgcaactgatcttgacttaaatgggaagaaataaaacgggaaataataattatttctattattaaaaaacaattccatgcattattattaattggaaggaaaagcaaacggacgtgcacggttggaagtaataatcgccacagaacttgtaggggttcttcagataatttgcgcaaatgccaactgtgaaattgaaacaaaaaatcacttaaaaccagccgaattttgggcatttaacaatggattagagataatccccgggagcgattcccgatcggcggaatgccaatgatcgctgtgccattgccgcgcccattgactgtttcgttcacccaccggtcatcggttcctcggaggtgagctcggccagccccttgctgcacagtttgtaccggtcgtacgccgtcgcttttggtgggcgactcgtgtcaatgccaaccaccagcaaatcgccaccgtccatgttcagcttacccttcctaatcgttgagaaaacaaagtgtattgatcaatgagtgatcagtcagtcgatcgatattgtttttttaaattttcaacaattaattgtaatttttgaaaaatattttgaacagccaaaaaaatgtccctcccaaagtggcacacgttgaaaaacttacgtgatttgcgggaagatgggcaagtagttgaagccgaacattctgaaacattggaaaattatgaaagcattcattaatgagtcagctgattattctgatcagacttcatgttcattttgttcagcacatttgacaatgtcatggcccgcgctttgctcgccacttcaaaggtcacgtgctgagtgagcaggccgaaacgcttctcgttcagtttgaggatggctaaacaaaagaacgaattggcaattagagaataggcaattgttgaagcaacggttttaatacatattgtaatgccgaaaccttggaccaaaaatggcataccgtactctgaaaactacgataacccccccctccccccacccagcagtgccgacatggcagggaatacggtagatgtcaacaactatcgtacttcccaccccctc

SEQ ID NO: 24850 - DNA, 1661 bp, Heterodera glycines
tcggtggatgggttttagcgattggacatgaatttttcctctctccattccatcattcccttgacaccggggggcaattacctccccccccccccttcccctcccccttttcccccgtcccttccctccctcacaaataaaccttttcgcccctctgggcttgtccggtgggtccgcccgccgccgctgtttgccttttccttcctattctaattattttttgccgcttcaactcgccccacttcactctcggcgtggtgatgatgatgagtatccccatcccccttatgccttggccattgccaactttgccctctcctcccccccccgggcttttgccctttcactctcttccctttccctcgcccctccctttgtgtaattcttttttattgtgttcgctccttccccctcaggcgccaatgattgttctcgttgtccccctctctcttcgccccttcggcgcggattgctgttgagcctggtcctttcccatctttcaccccttggccattctttccgcaacattcccccaaagaatgccttctgccaaatgggtgtgccatccgtcgcttttctgttcactgtcgatgattctgtctttggtgctaggccatgaagcgagcggagacgccaaaagcagaagaactgtttccggcactggcgctgcaatttcgccggagggtgccgagggcaaagaatgccccgcggggtgcacttgcgcggagctttcggtaattggcagcgatcttcttcctcgaactttacccaaacatttgctgcagttggaatgcgccggtttcgacttagaaaccgtccccaacgaatggccctcgcatttcgagcgggtcgttttgcgcaattggacaatgtccaccatcgacaaaaacgcattccgtcgcttccaatatttgcgcgaattgcacattttggactgtccacggttggatctgatcgaacggcacgcgttcaaacagttgaggaaattgaggtgagaagttgaggctggtcaaatgcagaataaatttcgaaagaatattccaacaatgtcaaaatgtggcactttgaaattttaaattatggaaattaaaaaaaacatggctctgaggggggggggggggggaagtgtcggtttgtcacgggagaagggggaggaaaggcgttggaaaatgtttgtcggtcatacggcgacccattggcagggaaatgccattcttttgcttctttcaaaggctgcttgtgatccggggcaacaaaagtcttcgcgagctgcacaaagcctccttctcagccatcggaaatgagcagtcgctttccattcaaattgcggacaatgccatcgaacggattcgctcctttgctttcaagtgccattcctcttttatgtacaatttcgacataaatttgtatcataaatgctcaaaatctgcgcgaactgtcaattgaagagcgctgcttcgaattggaaggctgtgccctcgggaccatttcgcgtttggactttgtcactttgcacggggtaaggcacggctttttcctttcccttcaatttgatttggtgccctgcttaatcaattattgttaagcttcttccattttgattttccttcttccccccttttcggtgtgttctttggaaccgttcgccttccaaaacagca

SEQ ID NO: 24851 - DNA, 1215 bp, Heterodera glycines
ttaaatgctaaaattttctctcttataatttttttctatttttttatctcatgctatgttggttgtttagaatcgccaatattattatatatattaattcataaaagagatgaagtgaagtaaacaaataatttatagaagatacatttggtgatatttttataatcttataagtagaaattaaataaacaaaagtatattttagtattcctaaaatttatttttgcaaaaaattaatatctaaatgaaaattattagaagcagaaaaattaaatatttatgccattatcaatctattcaacaaccataagcttttaatgctttatctcatattcaaatcaaaagttccatgcttaaaacgatatatgaagaagactgcctaaatgtacagataacaattaaataaaatagaaattatttaatttaagaaaacatatatatttgttgatgactgataatttcttttctataaatataatattaatttctaaaattaaaaggtttctccaatattttaaagaaaattattgcaaatatatttagcctttattattttatgctcattccagataagaagaaagaggaagagtaatgagaatacgcaagaaaaataaattttaattattattatttattaaatttaattttcattaatagtaaaaataaaaaaaatattgttttacattaatataaaatttctaaattttaatgtcaaattttaattttttaaatataatattaatttattttactttcgagaataaataacttaaatcattgaaaaacaaaaacttaaaatcctttttctttaaaattagagatgggaatttaaagctaacctaagtaattaaatcattattaaaatgacgtatatttaaaatattttatggtcgcttattgtaatatattttgttaaaatttaatcatagtaaagcaataatttttttaaaaaattttcatgtattcggtcattatatttaaagaaatgataattattatatgaaaataatattaaattcatataaacaattaaattaaagaatattttctcaattagttcataatggtaaatcaaaatgaaaaaggaatttaaaagaaaactcaatctatttattggttacaaattagtgcaaaataccaattaaaacgcactcaacgccaggagagaaataaattaattcagtttaaaaataatttattttatataaagtagta

SEQ ID NO: 24852 - DNA, 1132 bp, Heterodera glycines
ctctcccccgccctccccgttccccgcccgattttccccgagattcgtttatccccccccccccacctatgtgttatataaaacaaattcaaccccgttaaattagagttttaaacttttttccactttaattgacatgggtaattaattgattgaagcggaactctaactcattttgataaaacttattagggaaaggaaccccaattaaatattaattaatcatcaatattcatgaaatgcctgccatcccatttattctcttctccgatcgaaagcggaagctgtgccatctcattcttcctttaagaccatttattctcttctctgatcggaagcggaagacgtgcaaaaagcagtctcatttttcttacaaattcccgaccattgaaaagggtgtcgagactgtgagtgacacaatgataattgcttgacccttttacccgttctcgtcaaaataattgctcttctccccccccccccccttccaaagtgtccgcttcacccgttgacggctggcggaagtttgtttaattaacctccaccctttcccgaaaaattaaattttaaaagtttgtcgagactttaattagtccaaaccagtacaaaaatcaccattcaattttccagactaggcagctttgcaaacattgcttaactctccctccccatctctcccccgtaatttgctcatgaaagataaaaggcccattagttgttaaagtacttccgcaccattaccttccccccttcccccgccgtttgttgtgttcgtcttgtcttcgtaaatgcatgcatttttgtttgaaagttcccgccactttcaattactctccaatccactcccccgtcggccaattcattgccccttcacctcattaaactcacctcctctctctccatctgccaacaactgactcacttaattgcgaaaaaggttaaaaaccgatataatgccgaatttatttctaacaatgaaaaagccactaactaataaccgtctaatcatgttcgagagtctctcttaatggcaatcattacgaaaatccgcttttccatttacgaattaatactttatatgtattactttaatatttttgaaaatttttttttattaatcaaaagactctag

SEQ ID NO: 24853 - DNA, 1733 bp, Heterodera glycines
ttaaaaatcgataaaaaatcaatcttttgaggtttttcccaccaagttttgctttttttccttatttaagctaccatcccttttcccttttcatatgattgacttttttacaccaatttttgtggtgctcttttttcaaaagacttttcgggaggaaaatttttaagattttagtgcaattttttaacagattatatccagaaatatccaaaatttttgcggttttgagccaatttttttaagaaaaatagggattttgggtccggtggaggcgaatggcgccgccgagaaacattttgaccgttttactgattttcgccttttcaagaaactttgtgacacactttagtatattatctgctcaaacagtgacggtgttaccatcgcataatcattatgttttatacatgatgagacaaactttgacttggaggggaactgatcgaacgcaaaaattaggaacagaaccaagaacagaacacactataccacgaatatgtcaacaaaatttaacaaaaaaggacctaaaatttataaaaatataaggttactaaaagccaatcattgctttttgcgacacttttatcattttcgttttgcgattttggtaaatccttattaaaaaaagaaaaagacaccccctaaatatcaccttccaaattttcaaaatacttcacaaaactagcttttgatttgggaaaatcttagaaaaaaagaactcaattatccaatgacgcacgcataccgaacactttataattaacaattaattgcccaattcattcattgttcaactttcaaattaattttaacttcaataattctttttattcaaattccaacacattcaatcactttacacattatttaatcgcttacataaatttgtttttgctgaattgttaatgagttttttttggtcagctttcacaaattccgatattttctgttttccattgcaaaatgtgatgattgtccaccatccatctgctgatcgcacagcacaaattggcagataactttcccagcaaatttttgatcggaaatggacaaaaaattaaatttgttaacattgattcatcagagggagaacaaaaataatatgtgaaaagtgatttgaataaaaatggataatattttgatgaaatgggtaattaattaagctaattatgagttgtaatcagaacaatttgattggggaagtgtgaaagtatcgttttttcggtcttcgattcgtctgtcagtgatcactcgccgatttcattcttcagaatttcttctaaaatcaaaattcgccacaaagtttcttcggtgccgttttgttcttccaattgtttgttttctgcattttcaaaatgaaactttttgatatttattttactataaatgaaccaccggccgttaaatatcattttgcatttgaaattgatttgatgatttatgattggatttagccctcattaaagatttccgagatgaaaaattggaagaaaagggtggaataataaatttaatacattgtgtgaagtgatcggaatatagaagttaggtgagtgtaagctaatgataattgaaaataagtttaaggaagtgatcagaagagaactcacaaaaagagtgctgcatcttttcatccttagcaattttatctcatttttcattgtgtattttaatttgttttccaatggccaattgtcactcaccaaaccgtaaaaataatggtggattttatt

SEQ ID NO: 24854 - DNA, 1723 bp, Heterodera glycines
tcaggccacactttacaatggcagtgccggcgtcagtgccatttattttcgcgcatcaaaaggacaccaacaacaacaaaaacaacaattaaaacagaagcaacagctgaagggggcacaaaatttcactttgggcccagtggaatgttcgggcgaaggtataataatggtttcgggattccaatggaaacctaggtctgattgatgatcaaattgatcaattttcatggatttgaatttctcctgataaaactgatctgataatttaattcgattaaatttggctaaattttcatatattttttttgatcacttctgatggattagttaattgggccggatattaataaatctaactgaattaatttaatcaggcataatgacctgatttggtctgacctgctgataagaagttaaagatttaaagttaacttttgtatatgattagcttgatagatttagttagtttaatctattttctttgcttaaatgatcttactctttttttcatgcttatttaattagctcgattattaggccctgttcagtcaccagctgataccatttctatcactatttccattattagccggcacttcactgcccggcgcggtggtcacactccgctcgccgtctgtcggcattggcaccgacccaatgggccaatggcgtcagctggaatttgacttccgcaccggacagccggacattgagcaaattgtggccggatgggacccggcggacaatgggcttcaaatgaaaatctcgctcagagcaggtggccaattataacaaatttcgtccatttgtcccttttttcgacattttgtcatgccaaatggggccagctaactcgaattgcttagtcatagttctatctagtcgagaaatttcttgggttttgggattctcggctttctgcaattagcccattttgatactttgtcgtgcgatgtcgaccatttgtccaatttattaaaaaaaaatttggttaaaaggttcataaaaacaaggatatttttcaccttgtacagaattaaaaagtattttctcgatagtctttcattttttgttaccccaatttaaaccgtaacccaatgtgttaggctaccgtatcgagttgacactgtcacatcaggcgaacattgagcaagcagaaaaaagtgccgaaacggatgacaacatggacacatccaatgataataataaagtatttgtccatcaacaaaagcggggcatacgacgagaaatgagtgtttccattgcatcccaacggcctttaaacgatttgttttggcacagggtaattaattaataaattaaaattagagtattcaacaactaatcaatgctaattgcttttaggtgttggtcgaagtatttcgtggtgaaattcgtttttctgtcgaccgtttgaatgcatttcaaccactttcatttccattcgcaacatccacgaaatttagcattggaggcgatgaaaagtaaaaccataaaaatcatttttaaaaatttattataaattttattttcagaggcaatggctttgtcggatgcattggcaacttccaaattgatcaaatgctgcatgattggacccagcaattagcacagaaggacagggatgaagatggtaataaatatagcccgacacatgacagtatcctatacaggatactgaacgtttctgaaaaacggggttcatagggcttcgcaggactag

SEQ ID NO: 24855 - DNA, 1878 bp, Heterodera glycines
  unsure (1)..(1878): unsure at all n locations
acttgctcgaggagtgccgcggaatccaatcgctgcaaattcggtggcagcactcggaaatcctggtcaggttcatgcgattcaaaatcggccncaaaagctgaatgatggcaatcncaaaagattttttccaaagaaaaatcgggattttccgaaaaagggtccaactcaaattttaatgataaacgacaggaacaaagacagaaatgccaacgttgtggaaacgcccgcatgctcaaggactgcacttatcgaaaggatgtcaaatgtcaaatgttatggttgtggtaatctcggccatataagaccaatgtgcccatccgccgtgtctcagtcgcattgtgtggcgtcaaccttcagtgttgttcaggcgcgagattggatcatggttccgatccaaatcaatggacacaaaatcgaattggcagccgactcatgctcacatctcacaatcattcaaaggccgatgtggttaagtctcggagggccaaaattgattaaaagtggtaaaattgtgggatctttttcaggccataagctttgtttgctaggccaattcaaatgttcggttgagtttaaaggtgttcagattgctccttttgaacaggcaactgaacaaccaatcgcaacgacgttgagttccgaacattttcaaccgaaaactttggcaattgcaattcccgatgaacctcaagggctggcggaacagcttaaaaatgcttttccccaagttttcgcccccggaattggcagatgttcaaagatgaaagccattctgcatctgaagcctgatgcatctcccattttctgtcgagcacgtccagtgccacatgatgttcaagacgcagtggacaaggaattggatcggttgctcgaaatggatgccatcagaccagtcgatttctcacgttgggctgcacccgtgctcgacgttcgtaataaaaatggagcagtaagaatctgcattgatttttcgacgggtctttatgatgctctagagctaaaggcaccccctgccccgcacagatgacatttttcatgcattgcgcggctcgaaaattttctctcagctggacttccgtgatgcatatttgcagttggaattggacgacaaatcaaaaactcttgtgggaataaacactcacaggggtcttttccaatttcagcgtcttccgtttcgagttaaatcagctccatcgatttttcaaaagaccatggaccagttgacagccggaattaatggtgtgttcacatatctcgacgatgtcatcatcgcttcaaggaacgaaaatgagtaactcggttcttgctttgaactatggtaaacgcagtaagccaagttggttggaaggcaaaattttaagtgggaaaggtttgatttggaaggtaaacattccaacattgggaattacggtcactcgacacgtgaatcaattacggtcttttgttccctaccaagcaggaaaagttcaaaatgatcagatccatcagcctgaaccggtccacgaacaaaatttgccagccgaacccgccgaaccgattcctcaaacgccgaaaaccgtccgcttcctccaactccacgtccagtccgtgaacggcgtccggttgttcgttactcacccgaaccatgggaaagacgaaaacggaaatgaggacaaatgatttaaaaggggagatgttggatagggatttaaatgttttattatgtattgacacgaattaacatcatccatttcatactgtatcccatttcccaatccttcctcatttttcattcattcgtcgcatttcccaattttctgattttggacttttaaaattatattttcttttctctatcttattatttttgtttgtcctttggacacaacagggctc

SEQ ID NO: 24856 - DNA, 1576 bp, Heterodera glycines
  unsure (1)..(1576): unsure at all n locations
tgaatttgcccaaaaagcgtggaccatcagcngtcgacgggttcatttggggcacacaaatggtaaaaataaaatatactagtatttattgccttttttaagaaaaatttattattgttgtctaaaataggccaaaatgtaaaggaaatctctattaaaaattactcattttttcagtttttttttaaatttctatttctgtcaaagggaaacgattggatgtggccttcaaatattttattattttttttggtctacataatttttcacaatttttcccaaaaaaggtacgcaattttgttggacagaacagcggaattggagggcaacaaagcgcgcatcgccaaagcaatggaggtcaaaacgcattttgaacgtgccctggagttgaacccaacggacgcgaccacttggcaccttttgggttcgttggccaaacattcaaaaacaataatgtaatttggtgtaaaataatattttgttttaattttcttggtctaaccacatttacaatttattttaaaaaaattaaaacgaattgggaaaaaaatttaacacctcattttaaagtggatcatccaaagcttttgaatggtatttttacattggaatgtttttgttttcactaacaattttaacacccatttttatgacgaattaaaattaaaattaataagatttccatcaaaattcaatattgccaaaatcatcgcgggaattaaggcgtgtggcactacgaattggctgatctgtccacgcacaaacgatggttggcctcgttggtctatggcagtccgcccgagaccacttatgacgaggcattgcgctgctttgaacgagcggaaacattggcggtaattttatttttgatggatggatttttttttgatttttttttttttggtggtggaatttttaaaatttgtttttagccttgcttttactcggccaacaattattatttggcacttgtgtatgaaaaaatgaatcgcaaagaagaggcagtgaaacagttcaaattggcatataacgcgccaatggccgaaccggacgacttggaatatcacaacaaagtaggggaagatgccaaaaaaaaaatttttttaattcaaaaatccattggttttaggctctttcacgtctcaaatcctacaaatataacgaagaacaattgtgcaaagagaaatgaatcaattaaatgaattattttggaaccattctttggaatttatcagtttgtgccacctttggaattgtgcctgataattgattaatttttgggcatataattaaaatgtgtttttaaatatagaatatttaattttttaaatattgaacggatgattcacaatatatccatttgtaaacttttcaaattacactttccattctttcattgtccttttaaatgaaatacaatcacaagtttataaacaaaaaattgtcaatttttgtatgactcgttcggactctctgtttgttgcagcatctctcaccattccgatcaatccaattagctcgtggcacacacacattcgcccttcatgcatggcaagccgaaacagtcgtccgaatt

SEQ ID NO: 24857 - DNA, 1701 bp, Heterodera glycines
gagaaaagtagcaaatacctagtttcataagataaaatagttcttacagattctttctacaaatcattcgacaaataatgacttacaaaaacgtggaacgccaatttctgcaatgattcctttgttcagagtgatttgctttgcacttgaagaaggcgatttgaaacatgtaaaaaaggcaattaccgatgggacttaagcatcgaatggatgcaaaaattgatgccagtggaaacgttaaaagattttcgtgggatgaaagcagagagcttgttctgtcgacaattttggaccctcgtttcaaactttcttttttgaatgcagaaaagcatgatcgatataaaatttggcttacaaatgaagcagagaatgtccaaaacggctcaagtgaattccatgatcttttctcccgatgtgaacaaaatattgccacagaatgcggattagacattactgcgcaaccgttacctagtccagaaacattgaacaaccgccaaaaagcggaagtcataattattaaattttcaaaatttatttgtttttaattaaaggttgaagtcaatgattatttgcatgacaaaaaaattccaatcgactctgacccatacgggtactggacgggggacaatgctgtaaaatggccccttcttacatgtcttgcgcatcgttttctttccgcgccggcgacatctgcagaaagtgagcgcctatttagcgctgcaggattaataattaatgatctgagaaaaagattgactccggaaaatgcagagattttgttgtttttgcatcacaacctcaaaatttatgattttgactattcgtaaaattttttgaaaaaaatttcgcttttcgcatttcgcttttcgcattttcgcatattttggcttttcgcatttcgcttttttttcatttcgcatattttggcttttcgtatttcgcttttttttcatttcgcatttttcagtttcgcaaatttcgcttttcgcatttcgctttttatttttcaatttggcccatccctggtatagaggcattaatatcatttttttatcatagaaaattgttacttggcaccgctccatgcatcagatgtgaatagaagccattttcatacttctaattaccttttggttttttactcaactaaaatcgctttatgtttattatagaacaagataagaatttttaaatttagaattgttataaaatatataaatttaatctttaacgcaataccatagaatgcgattaagataattttacttaaaattaaagtaacattcttctaaaactgtagagacatttgggtcgattatatttttaattttgaggttgcatcaacagagtcattaaaaccttccaatattaacagaacaggtgggatatcttattatcttctaaaatattattttcagccaaaaaatgcatatatctatgagtatataattatgtttctgaccaataaacggttgacattttattttatttattagtcactttttaacaacattcaagcagttaaaaaattccttagatggtaacaccaccttcaatgacgttaaaatttagattttaaactataaattctgttaaaaaaatattgaaatagatattagcttaatatacgagatttgttttcaatcattgaacattaagaagttgttttagttgttttgtttaattatttattttttattt

SEQ ID NO: 24858 - DNA, 1642 bp, Heterodera glycines
  unsure (1)..(1642): unsure at all n locations
ctcccctcagattctccacgaccaatttgccaaggaggcggacgcgcgcgcgctgatttttgtgtccacccgcgcgtgtgcccaacgtttggccaaacatttgatggaggtgaagcccgaatttccaatgtttttcaaacaaaaggtacgcaattgcaataacataattaaataattttccaaaatcccattagattttcacagaatgtcggttacatggtcagctccatccaaagcggcacaatgggcggccaatcgtcggacgaacagcgaaggatgcgcgaagggttcaaaagcggactaattaaggcaaaattgaataacaaaatccccaaataagcatatttacataaaaaacattttcaggtgctcgtggtcacttcagtggcggaagaaggttattaattagcaatcgtttttgagcgattttattttgaataattttacctttgttaggtgtgaacatccccgcttgtaatttgatcatccggtgagttttaaatgctcatacattaaatgggggggagggctggtcaacacccctgacttcgttcgtatgaggggccgaaaaagggggggggggacttcaattggttgggataaaatgtgggaatggtcggtgattttcaccgactgcgctgtaaatgctgttttggatttatcattccttcacctttgcaatttaaggtacaacaacatcggcagcgaacggcagatgatccaaagaaggggtaaaatgggcgagggattggccagggcatgggaccgatttgaaggagcatgagagcgtttacaatcatagtgggactgatcacgaggcattaaatgattgtgaggggctgataaagcacatggaagcaatgagaagcactgatcatatggattggattgaatgaaaaatattttgctgattgtggtagctatgttagcatcgcgcgagcattatcatcgacattttgcccaacacattatttataggccgtgcccggcacaagcacagtctgtccattctgttggcactggacaccggcattgagcagcgggagttcagcaacatgcgcaaggaggccatggcaagtgaaagagcggattatcagtaaggctgggaccgaaggccttaaaatttagcgaaagtccagtccaaaaaccatgaatccggccccacatctggcttggatgttgatttttaaagtatattttatccaaatccaacagatgatgcgctgcattgaggacatgcaagagcaggatgagcagacactgcgcagatcggtgggtggcatntggcaattcgaganaatttccaaataaaaaaaatattcatttactataataggtgtcaattttttttacagatcgaggaaaaggccattgaattggccgaacttcgcaacgacgagaaaatgaaggaggagaacaaacgggcccagctgatgggcagacggtgtgtttgttttatgtcattgtgccatttttaatttatgattattttcagtttcgatttgagatgcgcctgtggcacagtgatttgctgcagtgaccgcgtccgatcggtgatgggcactctgtttgtgtgctgcgatccgaaagtgtggaagcgatcgaaacacacgctgacacgggccccaacggtggggagggg

SEQ ID NO: 24859 - DNA, 1376 bp, Heterodera glycines
  unsure (1)..(1376): unsure at all n locations
ccccgccccctttggccattcatttattcccctctggccaacgttcgttttcccatccaacaacatttttgtttttttttctcatttggccaattgtccgtctccattttttgctcattttactacaaaaatatgcaatagttgaagcggcaccccacaaagtgtccaaaagagtaaaaacccacgaaatgtacaaaatttttcaaaatttataaaaacaaaatgagtctaatttaggatttttaggggtttcggggtcgctgaatacgaatataccctttatattaccccttgcctacccttaggcccatctgaataataaaaaactcaaattcgagacttggacatttcgtgggtcagcggttgaagcaaagaaggaagcaaatgggaaagagaaaaattgggcttacaattagattttatctgctgctgcatttagcgacatttctgacattggaaaaaatgttaaaaatttgccgccaattgaaactacaaaaaatatgcatacagtattgtttattcaaatttattagcgccagagaaaaacaggaatttgtagtggttttttgccaaaaaaatgacagcaattttgcaatttttggggccaaatttccgaaaaatgaaaaataatggtacaatggagtccggctgtgctgacgcttaaataggcaattactaattaagttaaatggaatttgggttgggagacaaacaatgaaatcccctttatggacgacctatactgactgattgatcactactgatgctgatcatgccaaaatttataccccccccgccactgtgcgcacttcatccgaccccttctcgaaaaattataacgcagtttatggacaaattttagttcaagaaatcactaaatttatccttataacatacaaaacacaaatatacatatgttgatcaattaccattccatgctaaaaaaagaacaatttttgagcacgtcaataattccataattcaaattggtcgatcacttctcagcaaatcattcattcattaacttctgctgctgatcacttgtgcccggatttgcatcgagaagcctaaaaaccgaaaagcgatgactgaatttttgaaaaagcattcgcttacccatctgccatttcgtcaatttggatgaaaatttgattccactgaaaagaatttcgccaatcatttgcttcattttcccatttcgcccatttgtccgcgtcacgcacaattgggcaacgaatcagcagaaaacagttgcaagattcacaaaattcagttcttttcaatgccaattttgtccgagtncatttcgtggtcagcacaaagggcacaacggtgtcagcaaaagatgaacgaaaacgaaagacaacaatgaaatt

SEQ ID NO: 24860 - DNA, 1374 bp, Heterodera glycines
ttttttcgcggcgcgctttttctaaagacttttagcagaaaggggtccggccgataggcgccgccgggaaaatttttgaaaatttggatgggtctgttaacagattttgtcaaaaaaatgatagattttttcgaagctttattttctaacagattttaataaaatttatgaattcccgtgaaatattatttatttttttatattttgtaaaaatatttacttttcatgatttagtcaaggaaaattaaattttttaatttcaacgaaaggaaaatagagtttaatttgtcaataaattatgaccaatgggattttgtttaaaaaactctattaatcataaaaaaaattaattaacaatgaaaaagtcaatgaggatcgaactcatgacaaatgtagtgttagtgttaacgcactaaccactacagaaatactacatatgactgaacaaaagcgggtgtatatttaaccccgagtcgaggttaagggtcggggtcggggttaacccgaaaaatgggcaaaaaagtcggggcggggtcggggacgcaaccctaattcgaaagcccaaagtctaaagaagctaaaatatataaaacctcagcgtttaggcaatttcaaaaatgctttaattaattaagtaatagttgattattttcgtttgttacttttttaaaatgttaaaattctcttgttttctcatattaataccttatttagactttggggttttcaaattatatcaaaaagatagggtttgttcgaatatgaacaaagttattgtataaaaacccgagattgtcaattgattggactcacaaaatgaattagagccttaatgagtctaaatttttcgaattttttttgttacgacttttgttaaattccagttttaagaaatcactaaatttatccttaagacatacataacacaaatctatgttgatcattccaacaacaaaaaaggaacaatttttatgagcacgacaataattccataatcaaattgatcggtcactttccaatgtcaattacgttccactgatcaagaaagttccaccaattgttcatgagtcgattcgttggccgtatagaagatataaaaggttccatcgaagttcttctcaaattgaatggaaacgatgaaattgacttgacggaagatgaagccgaggcaaaagcctacagagggaaaaaacagtgaaaaattaaaaagcatttcctggtttgaaatagaccaaaaaatagtaaacaatttgaatttttgccaaaaacaaattgagtaccgtctaaaatattttgtcagcggctgtaaaaatgtcaattaaaatcaaatcaaaatcgccgctttgaagctatcaagcctcaacgcgaaaggca

SEQ ID NO: 24861 - DNA, 915 bp, Heterodera glycines
acacgtaaaatattccaaaaaaagagatagtgattttttctgggattaggccggagaaataaaaattaccagctatttgaaatgcagtgggcaagcacagcgagtcgcttaaatgcacaccctttgacacgtaaaatattccaaaaaaagagatagtgattttttctggattaggccggagaaataaaaattaccagctatttgaaatgcagtgggcaagcacagcgagtcgcttaaatgcacaccctttgacacgtaaaatattccaaaaaaagagatagtgattttttctggattaggccggagaaataaaaattaccagctatttgaaatgcagtgggcaagcacagcgagtcgcttaaatgcacaccctttgacacgtaaaatattccaaaaaaagagatagtgattttttctggattaggccggagaaataaaaattaccagctatttgaaatgcagtgggcaagcacagcgagtcgcttaaatgcacaccctttgacacgtaaaatattccaaaaaaagagatagtgattttttctggattaggccggagaaataaaaattaccagctatttgaaatgcagtgggcaagcacagcgagtcgcttaaatgcacaccctttgacacgtaaaatattccaaaaaaagagatagtgattttttctggattaggccggagaaataaaaattaccagctatttgaaatgcagtgggcaagcacagcgagtcgcttaaatgcacaccctttgacacgtaaaatattccaaaaaaagagatagtgattttttctggattaggccggagaaataaaaattaccagctatttgaaatgcagtgggcaagcacagcgagtcgcttaaatgcacaccctttgacacgtaaaatattccaaaaaaagagatagtgatttttt

SEQ ID NO: 24862 - DNA, 1970 bp, Heterodera glycines
  unsure (1)..(1970): unsure at all n locations
ggcggtacgacaattgcggaccggcaattgcggaccggacaattgcggacgacaattgcggacgacaattgcggaccgtacttttgcggacgacaattgcggacgacaattgcggaccgtacaattgcggacgacaattgcggacgacaattgcggaccgtacttttgcggaccatacttttgccaaaaaattaactggaagggtgggcctcgtcagtacgatcccttccgtattacaaatttgaaatcctaagtgtgtttcggcccttccgtagacacaccaaataagaaagctcacagcaataaattaataaataacaaatagaaagcacaattaaggagaaaaaagcaaagcataggatgataaagctataatatgtttattttattggcttgctgaaggcccaacaacagcttctacaaatacaacttatgaacataaaaataactcaagactttttccattcatcaaaccatacataagcactatagccattgcttttcgtgatcgtccaatttttctatccccaccatctttagctaaattacttatttaaatttaattattccaaaatttcttactgtaaaagcaaatttccttaacatggctccgtccggttatgtcttcaatcattgaaaaaaaatgtgaataattgaagtctttggattctagcaaaaattcattcttttcgagagtgaaaagaattggaaaagcggctcaatcaaatccatgtcgtctgaacaaaatacccaccttagttcatgaaaaccattacctttggaaccgatattatttaaggggttccaataaattggaagtagaatagattaagtattattaggtggaaagtttaaaatatatttttaaattcttaattagaagaaatgaaaggtaatggattaggaaacgaatacccaggttaaaaaattgatgcaaaaaaaaagaatctacaatcctttgaaggcaagtatgaattccgcgacaaccggccattataatgatatttttaaatttaagggttgtaataataatttttattttaaaaaataaaaatcgatctaaaatatttgataacaaattagctaataaaaaaattaataagaaaaatcaataatgattacaaactaataaattaattatcaagaaaaccaaagttcgttttcgggaatgaaatgtgattctttatgctggaaaatttttttttgttgatttattcaaaaagcttcaaaattataaatgtataattcttattatgaataaattaaactataaatattttaaccatgtttatacaataaaaaataaaaagttgtgaagtaatttaatgtcagctaaataaataataactacattaaacataactgtttatagttagtttttttttatatttataattataagcatgtaagtgttgtgaaaaagcaaaaaggtttaaaaactgaaaattattataatgaaaataaaaccaaaaataaaacaaaagtcaaaacaataaaaaaacaattttaatttacttaaagaattaataagtctggactcaaattaaaaataaaattgcttgctatcttctaacagataatgaatgagtgtgtattaaatcaaatgatttaaaaaaattaatcattcttcgtgaaaatcaaatttatctatcgtgattttgcataacaaaaaaagaaatagatcatttacggaaataatagagaaaaaataatgaaaaggtgtattttaattttaacaactaactgcaataatttaatagaaaacattaatcgaaaaaatgtaaaatatccactacggatgatttaatgaaattgaaatttataaactagcagtatagtgccatcgatgtttattaatgttaaatggattanaatgattaaatcanagaatttaagaaataagaattanattaaattttaaaaatattttanataaaataataaaaaatccctgaatttattcatatgtt

SEQ ID NO: 24863 - DNA, 1114 bp, Heterodera glycines
aaaaaatggcctaagggtaatacttgagaatctgggctccaccaaaaaaattttttctgctatgaaaagataaacccggaggttttcggggcttctgatcacgaatatgatatcagatttgcaaaaatcattgattttgaaaatcatagattttcgaaattttgattaacatgatcaaatgctgttctttttcgagtgaggcaaccatatatttatttaggctctactccagtttatgcgtccaatcgttttttatgcgtccaatcgacttttatgcgtccaatcgctttttatgcgtccaatcaaagttttgtgcgtccaatctcatttcatgcgtccaatcgctttttatgcgtccaatcattttttatgtatcaaattatgtttttttgccaaaataaaggttttatgctttcatgagtcaaaaagtttgccacactttttatgggcagccgctgcccttttccattagtcggcattgagggcagtcgccgtttttccattaaccagaattgaagtcagccgctgcctttttccattagtcggcattgagccacgagacggccgccgccactttttctctccaattttcggcaataacacagacagccaccactttttcgacaaaaattggaatgttgctattagctttattttcggctgtcactgtttcggccgccttatcaatgaaatgggacggctatatcatcgacaaatacggctacaaacgagcaaatccatggcattgttgcggagtttgtcatgacggaaataaattttacgaaaaagggcgttgcgtaaacgaaaccagctatgaaactgcaaccgaccgctacattcgcaacacaacttttgtgtatatgactggtaattgagaataaaatttttcggtaaaaaagcgagtatattttctttgatattagcacccaattacagggctaagtataacagaggcagaatggtgcaacgacagtacgattggttgttcgggatgcttgagagaggcacgaataaagttcggtttttccctgtcacaaatcgtgatgccgctacacttttgccattgattgctgaaaacatcgagccaggcacaatgatcatttctgacggctgg

SEQ ID NO: 24864 - DNA, 1251 bp, Heterodera glycines
aaaatgcgtaaaatttttttgtgtctttttgaaattagtatctgaaaactgcaactaattcataaaaattaaatcaaaaaaaaaaaattgtgtaaaaatattaatgcgccgcacagcaatgagaagttttcgcccgatttgagccctcggccaccgctgatcacaatcttggcaccgcccaactcaggccgctccgacttggacagttcctggcccaggaaggcgctcagttcgactacgtcgggggacggcggggaaaagtcgggggctggaaaatgaaatatttattcgataaattgaattaaaaagtggggggaaagaccgaagtataaaaagaaagaaaattttacaaattgaatttatgatggagccaaaaaaatagacgcgggcgggccaaaaatttttaaaactgaaaacttttttttattgtatattttttcctaaatttctaggtgttaaaagcgtgtcccgacatttgcggctcaaccaaaattagacttaaaataaccgacttatctatataaaaacttttttggctaattttcatgttatttgcatttttttggcgttttgtctcttaaatcccttccctgcaacacccataaatggctttgcctccatggcattgttaggtcctatgaaggttttcaattgtggcgtcatgcatattccaattataatgcgaaaataatagtggttttatgtaaaatttactaaatttatgcctaaataagtctaattttggttgagccgcaaatgtcggaaaatggcccttaagaaataggccgcaaatgtcggaccgcaattgtcgtttttggctggggccgcaaatgtcggaccgcaattgtcgtttttggctggggccgcaaatgtcgtggctcccctactgatgatgatgcattcttttggtttttgttgttttacgatgcgttttctaagcaattcgttgttgtcattaatgtattgttgcatttttccaacaaaaaaaatgtgtaaaataatgaatttgtgaagccttatagtccttttgtttcctggcaacacatctgaaattttacaaataaaatacctttatattacggctttctattcgcaaaagtttaataaatttcataattcaaaatttcttacaaacattcggagttttttaaagtttaaatttcacataaattcttatactataatttttaagttttaaaaaattccctaggttctcgaaaaattttgaatttttgtaggttaaaagccgcc

SEQ ID NO: 24865 - DNA, 1074 bp, Heterodera glycines
ggggctataggcatggaattaccacaaattttgacgacattcaagactgctttttgttaaaatatgaacacatatttaaccggaaataatgaaaggtgtgtgcttgatcagactttatcttctctatttgttacactatcgattgcttatagaaaattgcataagatttatacaattaataaaattacaaaaaaaaattgtttatttaattgaccttctccaaaacataatgaaaataaacaagcctatgattttttaaatgctttgcaatcatagaaaaatgtttgataattattgtttacttaataaagtacatagaaattgaaaaactcaccatagaagagttaatctgttatagaagaaaattgagaaattattagtgaaattaagatttctcttaacagggtaggcgaaaagggcggcaatttgttaaaaatattaatacagtttagttccccgtttttagcatagtcgtttagatgtgatcccagtgcaattaagaaagtaggtatgaatgcttgggaaaattttgttgtttaaaacagagcaaatagagcggtgtgcgaggaaatgcttatcgtataatgtgggtattgaagaaaaatcgacaaaaaatttaatgcgctccaattgcatgggcgcctgtaaattcgaaaccagcacaaaaaataagcctcatggcaaaattccagcgcaattggtcggggctatagccatggaattaccacaaatttcgacgacattcaagactgctttttgttaaaatatgaacacatatttaaccggaaataatgaaaggtgtgtgcttgatcagaacttatcttctctatttgttacactatcgattgcttatagaaaattgcataagatttatacaattaataaaattacaaaaaaaaattgtttatttaattgaccttctccaaaacataatgaaaataaacaagcctatgattttttaaatgctttgcaatcatagaaaaatgtttgattattattatttacttaataaagtacatagaaattgaaaaactcaccatagaagagataatctgttatagaagaaaattgaga

SEQ ID NO: 24866 - DNA, 1252 bp, Heterodera glycines
ttttctcagaaaaaaatttcaaaaatttgattttttgaagggggacactaccatcggtactattaccgacaatagttttggtctaacgaagcaaaagttttttaagaaatttgttaggaaattcattcaaaaaaatttctaatattttttctgaaaaatttctaaaatttaaaccaaaaaattatttcactggccagattccgtgaccccttcaaatctgagcaattaattaattctttttacaatggcttaattgacaaaaatttattttcgcattttgcagggtcgacgatgttcaagcccgttgtgatgagctcaatttgcaatttgtgcaccgttttggggtgatgccggaccagcatttggtgaagtaagtttggcggattttttaaaatttattattcaatttagaaaagatatttttatttgatcatttatttttaaaattaaggttttgcccgaagaagttcgacatgctgtatgtttaaacaacaaccataaatttgatttttttctcaagcaaattattagaaattgaacaattaataaagtgctcaaaattttttccagtttttttggttgcaaaattttagttttttttaactttttaaggaattaagttgggagcagtgctcttccccccccccccctctctcgccaaaaaaaaaatttcaaaaaatcttattttctaattttttattaaataaatttaaagactggtgggggggggggggggggtgagaatgtcatgcaccgaatttcgtcccaatttttaaacacagccttggaatcgatttgctggttggccttggattgagcatggactatggcaaattggcaatcacccacaagggcaaaatggccaaatggttgaccgaggaggaaattcaaatcgaaatggaggacagctactgaagaaacgaaagaatgaatgaacaaaaagtgatcggaattttgtgatcagagaaacagaaatcaaacaaataaatacatttatttggcaccatttgcgagaataaattggtttttttgttgcgttccaatcccactgcggcgggtgcattttttgaaaatttcaagacaaaatgccaatttttagctgaaattagcaacaaatgtagggtcggggtcgttttcgcgtggggcgagtttttgaactataacttttttctttgtcaaccaaaaccaatgattttggtatcattcgagagccctaaaggttctctattagcctacaaaattggaaaaattc

SEQ ID NO: 24867 - DNA, 1827 bp, Heterodera glycines
ttgctggcatatgaacacagcacgaaaatggttggtgccaatgcaattgaataaaatggcgtgaaaattgaaacggattccatttgtgaaaggtgagatccacttcctttactgtgttttatcgtgtttaatttagaaagtcctttggatctagaattatacttttctaaatttacgccaagatattcaaatcatttttatgctgaagggcataaccgaataaataatcagacagtgaattaggttaaaatcgaattgccaagaaatctttgtggttatttttgttcgatttagtacccagttgcggatgcgtcaatgaaagaattagacgtgttgatgcagccattgttgtcggacacgcaaaaggcagtggaagggatttgaaagcgaatgccacggatctcaaacaacaattctctcatcacttttgtgtgtcattatttacgaaaaagtcagacctcctaaatcctgaagattttaaagtattaaagtaggtattatcatttcatttatgtcggccgcccccccccccccacaatgttcccaaaaagttttttggaaccgcccacaaaaacgcgatttaaaaaattaatagattgttaatttattcaaaaaaaatccagaattttgggactcagaaaatccaagattccccccccccccgcatgaaaatttaaaaaaaaatttctatataatggaaaaattcttcgaatgcctcccccaatgagtacatattttaatataggcaattttcgtaacaaagtgcagtcaaattttcaaattttttttcaaaaaaactttcacttgggaaaattttattgattaaattgaaatttttgaaaattttgtttttaaatgcgcggtccgcggccgcggcaatttgaatgcgcgatgcgcggtgcgcggccgcggtttttttttttgcgcgatgcgcgatgcgcggccgcggtttttttctgtgcgcgctccagccctggtttgaggcgatgaagcgaaaatatttggtcaatgtttgacgtaagagcatgagagatttggcgaaaggtcgcggattgaaaatcgacaccgattccattgggtgaaataatgtgccaatggttgagagtgcgaaacggacaaagaaatacagtgaaaaaatgtgctgtgtatcagagaaagagacagatagagagagtacagagaaatgatgaaacccagatatcatttccatattacataaattattcaacacttctataattaaatccctttgcatttgagaattgaagaaaaagaattcaaaaagtgatcgaaattatgtcgcaattgtaaaataaatcggacagtcatggacactaattatgtagatggaataaacttttaagaagtcactttaagtgaagaactgaggaaaaaatggaaaaattaaaatttatttaaataaaaaaaaattttaactaataaaatttttatcattgtttctctcttgagtttatcaccagaacttgataggatattgtttgaaatcgttggaagacaaataaaaactcagtttggaatgcatgatgaaactacgtactaaatttagaattaattttaattataagatattttaaaatacccattaaaatataaactaggtccattttgattttaatttagtttcattgaaaaaagcacagattttcaaaattttcgcccctattttaccatttttcgtcctaaaatctgccacttaatgattaggcaatacgaaggcttgttattgatatggtcccaaagaaaccctaataatcaagatttgatcaattatcacatgcactaaatatggggcttggcgtgaaaagc

SEQ ID NO: 24868 - DNA, 961 bp, Heterodera glycines
  unsure (1)..(961): unsure at all n locations
gatttcggaattttgtttgcataccggtcctcgcngagtccatnttgaatggttttcccccgcagaattattttgggaagaacactccgcacgccttgtcaatgcttgaaccaagacagcacgcaccaaacgagaacgacaacaaatgtggacagtaccaatcgaagatgtcacagcagtacaaccgacatcatggcacaaaaagccgttcattcaattcaggagactcagtctgtcttgaattatggaggagtggtaagacatcatggttggaaggtaaaattgtgagtggtagtggtttgatttggaaaatcgaaattccaatccttggaattaccgtaacgcgtcacgtcaatcaaatgcgttcattttccccttacatttcaagtaagattgtgtccgatcagattcaagccgctccgcaacaacacattcctccaatggcgccaattcaaattgatcagacacctgtccgtgatcaaactcctgtccgtgaccgcacacccgaaccagtcaaatctcctcgtccgcagcgacagcgcaagaagccaattcgctattcgcccggctaattgccacggacggtctttccaaaagagggagatgttggatgtgttgatatttaatattattaagtttcgacacgaatacttttattgattagttatttgttgatgggtcctctcccatcgactcattctttgcatttgtgttattttgcaattcggtgtttatttttcggactttctaatttgactccgtcgttattttattattattttgtgattctaattttattgtttattcatttaataaatttatcttgtttgtctgttagcaaaacacaacactaaactaaaaccaatgcattcaaaatttagattccaatgttgttgtcattttttgaatttggtagtctttgacgcgctcaaatctgaatgtctatctgagatcatatata

SEQ ID NO: 24869 - DNA, 2130 bp, Heterodera glycines
actgccaatacatctcacgcccaattatgtctttcccaccatagtttcgttccgaatcacgttcttcgcgtatatcattacctggagaacgtaagcaaaaatgattaaaataaaattattttattgcaatattcaaatttaaaaaatatatcttaaatcatttaaaattgagcaaattattgtcgatattttcttgcagaatctcatcttttgtaaaaaaaaaatatcaatcaaaattatttttttttaatttattatattaattcgttgtaaattattggctcatcaaaatttttttatagaagctggtgctgtgcacagcactctccgtgcgctagaaagggatgttaacaaaacaactgaagttatacgacggcaccatgaacaacaagtaattgaagctcgaaccggatttaatcatgacgacttctgaaatttcgcaatttattttttatttttttgctcacaagcatacagaagttgcctgatttaaacaaattaatcccctagtcttagtgattttatcccgcaaaatcccaaaaaaatttctgtttttattatggcataaagccgttttgtgcctattatcccactccccttttagcttctcgataagaagacatttcaaggtgagatggaagtaagcggacgaattgaagtggagcctcaagagacttggctgaatttgcggctaaaatcagtgcgtaaatgatttattttagaaagcgaattaattaattaacttaaaatagctgaccccaataatcgaaattattagtctaaattagggttaatccccgacccaatgcgggaaatttcgaatctcattcattgcactccaaagactttcttttttgttttagaaaatttcgttatttttttcgacttttttttttggaaatttcctccttgatgagggtggttgctccccgacatttttttaaattactccagccatccctgaattttatccttctaaaagatatcttttcaaatattgctttatctcaggtgagcacggaggatttgaagaaggagttgggtcgagtgaaggatgatcaacgtgagaaaaaacaattcaaattattcggcaaaattaaaaaagccaaaaaatttccaggccaaaatgcttaccaggacacgctggccgcattggtgtacgacgtgaatgcaacagcggaagtgcttcgccgcggttcattgaagcgcaaaaagcccaaaagtcacgaggtgcggtttttgtcagcgcgatattcgtgcacagatagacatgtacagtaatttgaaagtaatttaaacttggatgtacagtatacccatttagatcaaattaatttaaacaatagtagttatcataactacttacaattaattttttaacaccttttaatatttgtaggttcattttttattgttagtcttgccaaattgcttaaacatttttatccaaacttaaacaggagatcgaatatcgtctgcgcctaacacctgcacccgacgaagccgatttgtaccaacaggacgaaatgccaccacttggtagctatttaaatttaatttttaataattttaattcggttgcaatggctatgcaatttattcctttttttaatttaatttattcattcacctgaatattcttgatacaaaaatatttttaaatatttttttttgcctacatttttatataggtatgaagaaaagatagaattgttacaataattagggaagcagaattgattgattgggcggggcaggcagacacttaagaactttctttctgctgatggtggtattaaatattttttatgtaatcaattacgattagttaaaatgaatcaaagcgcgcgccaacaaaggcagtcgcacaaaattggcgcattaatcaatcatttttggctcatttgtcagagagaaggcagcaaaaaaaagtgggggtgggtttttgggggtttccccccccccccctttgggaaattttaaaattcatatttacattttcaaaaatcatggatattttgttaatctatgaacagatgtcatcatatgtcaaaacaaacaccatattcgtgatcagtgaccttgaacaccccaaaatatgaatttttaaatttttcgcggggggggggg

SEQ ID NO: 24870 - DNA, 1100 bp, Heterodera glycines
tcagccggggcagcgccaatttggcggactcgcaacgaacggaccaatttgttcacgaacacttgtcgcttgcgtagagttacaaactgaagtttgtacggcacgggaaattgggatagaatgtggggcaaaatgccaaagaatggtccagaatgtgccaaatttgacttgttttcgctgtacttttgtgctcgggtccctgtcccagtaaatgtcgtggaattgcaaattgctctccgaaaggcgtgggaaaaggtggcaagtgaaggagaagtggtcaaattcgtcctgccgcaatgccatcgccgccggcactgtcccctccgtgccgttgaccccttccgcctcctctttctgttcggcttccgctgcgactgtccttttaataaacttttgcctttttctctctcctccctctttttgccgtttgttccccccatttacatttttgaatttggccctttttggccttccgttggccctccgttttgcccgcgggtgttcttctctgcttttgttgttgtcgtctcttgcttctttttcctctgcggttccttttgctgttcttttcctcctctctctctcatttcctctcgtttctctcccattttccctgtttcctctctcttttgctgctctttttcctctcccttttcctctcgtttctctcccatttgctcctttccctccccttcctctctctcgccgtttcctctcaccttctctacatatttcgtcgcctcttctttctctgccgctctctccttttccccttctcttttgctgatcctttgcctttgtttagtttttctgctacttattgatgaattctttgattcggcaatagcagaagagcgttcatcattggaagaatcgccgtcgtaattatcgtacatcgaaaacaaaaaatgattttttggggtgggaatataaaacggatgtaaaatgagcgaatgaatggtcagtcggtgccaatgccaatggattcggccgttcccatggcaatttgcttacgaacggatcgccattcataaaccagtcccaattttgaacaattgttaattacaatgtgtacattttacatttgggtacttccttat

SEQ ID NO: 24871 - DNA, 1014 bp, Heterodera glycines
  unsure (1)..(1014): unsure at all n locations
tttttaattaatttgttttgtattattaataataaataaaaattttaattaaataaaattattttggtgaacaaatgttttaatttaaattatttaattttttatntaattaaatatttgttttattaattattttaaattattttctgatgaataaatgttttatttaatttgaattttcgagaaattaattcctttcaatttcaataaatattctatattataaatttctaactttatttttaataagtaaaaggatttttttaatttgataaatttataatacatccattaatataatttttttatttatttcattttaaaccatgattgtacctcttctaatcacttttgtacctcttctaatcactgttgtacctcttttaaaaaattaatttcattttaaataaaataaatattattaattttcaacgttgttttttattaataatttaaaattaaaatgcattcgatttttaatatttaataaaaaaaattacttatttattacattttaaatcatgttgacctctttcacgttgttgtacctcttctaatcactgttgtacctcttctaatcactgttgtacctcttctaatcactgttgtacctcttctaatcactgttgtacctcttctaatcacttttgaccgcttctatttactgttgtacctcttttaatcactgttgaacctcttctaatcgctgttgtacctctctaatcactgttgtacctcttctcatcactgttgtacctcttctaatcactcttctaatcgctgttgtacctcaaaatttaaaaaacgggcgcgaagcgcccgtatgagttcaacgaatttaaaaaacgggcgcgcagcgcccgttcaaggccaacaaaaattgaaaaaccgggcgaagcgcccgactgaggccgcgaagcggcctaacaagctaaaaaacaggcgcgaagcgcccgtatgagttcaacggatttaaaaaacgggcgcgaagcgcccgttcaaggccaacaaaaa

SEQ ID NO: 24872 - DNA, 1178 bp, Heterodera glycines
ttttatgagggatatatcgatgagggtgggtgcggggggggctctccccgagcccaccttttccaagggatttaagaaatgggcaaaagggggatgggagagaaggacgggtggggatggcatgccgtatggtgagtaacgagtaatctttggcaaaggggtttttggcattttggcaaagattactaattggagaccactcccccccccccttttttgtgtaagaattgccatcttctcatcggtgactcatccccgcccgatcattcacagctgatccttccttagcttacaacttccccccacccctcccctccctcaaaactcacatcgctcatccttttccccaatagggccacacttctgcgaacttcatgctttgcctgttgctcaacattgtccagtgcgacgaatttgtccttcattttgtccaaatttcggaaagaattcattttggcatcgacggattcgtgccgttcccgaactttttcggtatgtttctccaatttcgccatgttcaaagcgcccaatggctcatcaaattcctacaaatggcacagtgaattgggcgtttggttcggtttgtgccgttcttacgacgagtgcctccgtttcgtcgcaccagaattccaactcctccatctgtccgcttatcctcgtctgatccgctaatcgttcttccatcgctcgtttcttcgctttcaccattttcgcgcactcattaaagtcgttcacaaataattgaatgcgctgctggtaacggtctcttgccgacgttgagagttgggaagagattgcattcagtcggttttggatttgctgaagacggaatgccacgggagggacgcggttttccagtgccatttgcacggcttccaactcgtccaagtcgggcgattcattccgagcgggagactttgtttgctggaaattgaatacaattgttgtcgtttgctctttgctcacttccttctccggcagtttgtcctttttcggcatttgtcgctccgttcggcactgttgcgacagttcgtccaacatctcttcgcattgcgagtacagttcctccaaagtgtgtaccgtctccctgcgcctgcccaactcggcctttcgttgtgcgaattgtcctcggagtccactgattcggcccagcaaatgctccgcttctccacttccat

SEQ ID NO: 24873 - DNA, 1824 bp, Heterodera glycines
cgcataaaaaacatggtcaacataaatttgctcctcaccccacagcatgtttcagagcgaggacgaactgaagagcacccttgtaggaggacaatgtgaagtacgagcggttgttggcccgattccatgagttgagggaagcggctgcgcatcagctcgaccagttagtggtggttcattttggttttatttgcctttcctttccccctttagggccaatttggaaatacaaaggatgaccaaacagcacgaggacaacactttgggactgcggtgtcgcctgaagatgaacgatgcccagttgcagacgctgggcaaaaccattcagggcaaggtatcaaccaaagtgatggccaaaaatgccaatatttgcaaaactctgggacctcgggagagggatgcaatttttaacgctaagtctgacacaaacccttttaaatatttcaattaatttaggacgatgaaatcaaagagttaaaagcgatgtgcgaggaattgatgcagaaaaaagggataatggacgatgatgaagacgaggaagaggaggacgacgacggggaaatggacggcgaatagaacaaattttaatgaatgaccgacaaaatacccccatgattgtatgccctacatttttctacattaccctgtacaattcacttattatgggattgattttattatggctgcctattgatgataagcctaaataaattctagacaatttcttttgtgcgttactcttgggaccattaagttgttttattttttttgtaaaatccctcataaaataacacacatggcaataatttatgtcaacaattggatacatactcaaaataaattacgcggttcatcttgaaaattgaacggatcatatgaaaaaaacaatttgatcgatgttaccgcgcaacatttataccacaaacactatgcatttggaataaattaggaatggacggcactctttccgtcgctcgggcaaatcattgaccagtatcgtcattaaattctgtttcaatcgaaatttgggagaagagagttccgccgaatatataataacaacaacaaccaaaagggcttttccccgacaattcccctcacgaatctctcccccccttttttgggggttggttttgtcgatcacatcacccgttgcgtcccttctcattgtcagactacccttcgcacttcgaaaaagcgtttcagatagtagatttggccaatcgtcatgcaaattagcagaatcgcctcgaacacagcccatacgaccacgcgactgttcgtattctcattgactgaaatggaaatgaacgttttgattgggtttgagtttgcgtcgtttaatttctcggggatcaataattgatcaaatgcaacccaaataaaaaggacaagcgtttttattggaatgcaccaaacttcaatagtggatgggatttgatagggtactccatcctctccccctttttaaaagttccgttccgtccctaccctccactagcccttctattttttattttttttttgtttgccgttccgtcctccacttacttgaacggtgcactctgtcccgcacttgcatgtactcctgctcgtgtttgaccgcggtgagcattgccgacaactctctgatcatttcctccaatttgtgactgtccgctgcaaaattagtgaaggtattttagccaaagacaattaaaaaggaatttggttacatcattttttctaatatgaatcatagtcagcgttggatttatatgatagttttagaaaatatgaaacgaagttttttatacagggatttgcgagatgcacacaaaaact

SEQ ID NO: 24874 - DNA, 1340 bp, Heterodera glycines
  unsure (1)..(1340): unsure at all n locations
tccctgctatatcgatgatgaaaaattgtaattgctaggaaactgaggcggactctctgatcggggtnttccggatntggtaattctcaccgatcgatgcacgttcaaatgcacgaaagcttgcctttgatttgaatgttgcttgcttatttgttagctcggattcgtatgtacttgaatggcaagtacgtacttgaaattgactctcatgcgagaaaatttagaaaaactctcgagatttttcgtcactaaaaatcgcaacctttcttattaccctagtgaatttttaattatttttttctaagcggggggatgagtgaacccttaactacttaatggatttccaaattctctagataatcgtttcaatcgaaaattcatttctcaaatacaattaatcaatttaattattcatttccgtacacttaatcagcagacgacatttccgttgcttttatccgcttcttcttcttctttttcttcttccgttggtggcgacaatggcctaaaattaattaaatattttatttttcgataaaattcaaatgctattgctgctgctcactcaatggatttatcgaaactccacagatcaaatctgatactgttcaaattggcactcggatttaagctgtctccccatttaattgctggcaccctcgccgtctccccaattgggcaccgttgcaacagccaattatacacatttacgtcgaattcgtcgatctcctgtttcagtgtcagcttttcattcgtccgtttgttcaccaattcaaatggttcagttggaattgtgttcacatgaaaataaagttgaatattgtaactgacagaagtggtggcactgataaatgtctaaacaaatttggaaaaacaaaaacaatttatagaaaatatggctagacacacctctttgaagttgttgacccattcgagattctgtggaccaaaataattattgcgatacaatcgcttcggttggccatttttgctcggagtgtgaagccatttgaccaaagcttggccagcagttgcatttggtccatcgtcagcaattccatcggggaacagttcattggaatcaattgaattcaattggtcaagaccagtgagaattgtcggcgagatcagacgacgcaaattgtcaaaggcatcgccactggtaaagcccaactggcgaatgcttttcgcaaaaaactcaaatttggtgcccattctgtcccaaattggcttgtttgaacggataaatgtgagcacagaatggtcaatgtagctgaaaagggggaacaatgatgaagatgaccaacatgcagtctagtcagcccaatcgattgctatcg

SEQ ID NO: 24875 - DNA, 1948 bp, Heterodera glycines
ttgacctatcgccaagttttccagaaaatagtcaatttctgtaggtaaataatttcatgcatttaaatacgtgccctattttttatgaaatttgaatttttgtctgttctttgaaaaaattggcatttgttttacgatacaacaggttatttttagtaatttcaatttttctttaccgaaacaaacaaatcgaaattatggtaatttaaattaagagattttaaatgatttagctactgtgtcacagtgaattgtcatgacgaacgtgctactgtagcgaagactttagaatacaacattacaaaagactcaaaagatgggttgtggacgaccttttcagaaggaggaaaatcatttgaaagggttctatttgactttaatgaagaaaagtgcaaggactattcaatttttatcaaaacaaaaaaactggaaattgagaacaaaaaactgctggaaaacgaacattattcacttcttggcatcttagcaaaggtaaattaaaattctaaaattagatgtaataaaaaaatgtatttgaaaataaatgaataagtaattgtaaaaaggtaagcattttataatatttattcattttttatttaaaaatatttgacataaggaatataatattgggaaaaagaattttataaaaattcatttttagaggggcggcatattttaaaaaagctaattagtgagagattttcttgatcattttcaggattatgttcacgtgaataaaaaagccgagtcaaacgggaggacagaattcaacataacttgcaaatatttttttgtcaattttacgccggtgctcacgcgaaaggaggaattttatgagattaaagtgtactgtaatgataaacagcaacaaaatttggtttatcatagtgatatccaatgtggcaaagacggatgccaacgaattattttggcggatgaacaaaaatgccaaacaaatgtctatgacgttcaagtgtggcgctggagcgagcgatggacgaggtaatcgggtcagagttcgggttcaaaatgacggtttttcagggactctattttagatgggcaggacagacaggaatttaggagggtgaaggggctgcatttaggaaaaaagacacctaggtatataaaaagaaaaattttaaacaaaaatgagtaaaatacaaaaaatatatatatatttaattttaaattttagagagaaacttgtcttactgagccaagaagcacatatttttcagacattcatataaatgacggtggaatgctagaaattcaggaaaatagtgacggttttcaaacattggtgaagaaaaactaagacagaagtagatattatatacattctttctatttgtcatggtgtagtattattatctttttcacaattgttgctattttttttttgaaaaaatttccatttttggttttaaggagatttaattgaatttaaaattatacaaagttaaaataatattgtgatggaaaaggtcgaaatttggttaattatttctatcaatatttattttaaaaaaaattttaattttgaatttgaatttttgtggctaattttcggatacttagtgctctaaaatgaaataaagtatatttaatttggttattcctaacaaaaattataatcaaattccgctagcattaattaaatccattagcaggtgggcaaaatgaagcataaatcataaaatattgccattaggcagaccaaaatttttataatcttaatagtcaaacgggtttttgtcaaaacaaagagatagaaaaaatgtctttgtatacaaatttcacgcttcaaaaactcataattacaatatttacaaattattgcgggacgggaccctgcaggattaatcccgcaatttccaataattgcgcgttcgatgttggatcctgcaaaatctcgagcgggataccgtctcaaccttat

SEQ ID NO: 24876 - DNA, 2171 bp, Heterodera glycines
gagtatatttttaatgatattttaaaaattttttgattttcaaaatgagtcccaatttcccatttattcagtcgttgttctgaagtggcaatggcggacggtctccgaccgataacggaagagtttcgcaaagaatgccaaatcgcatgggaccatttcggctcggaaggccggcgcgtgttcgcatttgcgaagaaactcttccaagcccctcagaacaccaaattcacggcacaatcggacaattatccccaggacggactcacttttttgggaatggccgccattacggacccaccgaggcaaatcaccactaaccaaacaccaaaagaccaattaacttttactaattaacggtgggaattattaacagaaatgaaacagcagcggccattcagcagtgtaaagacgcgggtaaaaagagaagaaaaaagcaatggaatgataagctaagcgaaaattcaggcattaaagtgttcatgatcacgggtaaccattcgatgagagaaatggcattttaaaatcgaaaaaccaaaaaggcgatcacccgacggcggccagtgctgtggcttcccaaattggacttttcggtctacaaaatgatatggtaatggatattaaaaagcaattaaaaacgattagtccgccaattattccatttccaatcgaaggtaaagtcgcgcggaaatcaacaggtgaagctgagtctcgacctcagcacaaaagtcgattgggccattgtgcttggcgagtcgttggcacaaatgagccccgctgagtgggaccgactgttggcacatcgatacatcgtattcgccaggttctgctggaaattggcgaatgtccgcccaataaaaattttttttaagaacgacgccggaacagaaattacttattgtggaggaatgccaaaaaagaggtgaagcaaaaaaagtagaagaaggctgatgagtgaaacccaaatgatcgcaaaaatttattaattaactaattaggggagaccgtagcagtgactggcggcggagtgaacgacgccccggcgttggccaaggcaaacatcggaattgcgatgggcgttaatgggagtgacatcgcccgaagggctgcggatatgtgagaggagaggggggggggagtggcacggcaccacccaattaacgcataaataaacattttaaactttctaaaatttatgatttgcaattattgtctcatttgactaaatcacttcctcttgagtgtgctgactgatgacaatttcgcctccattgtgaagggcattgaagagggtcgtcttttgttcgacaatttgcgtattttgccccccgcggcgtttgtcccaccaactcattcgccatttagggctgtccattgcgtacactttggcccatctttggcccgaagtgtgtcccatcattctcaactttaccctcggaatgcccttgggattggagccactgcaggtgaatcatcagccgatgaaaagaactgacggagcaaaagcatcaatctaaacagattctcagcatcgatttggccagcgaattgccccccgccgtctctttggcctacgaaagccccgaaaggtcggcaaaagcgaccaaatgcaacgcaatgcctttgaggccctttcagagacataatgaaaattccgccgcggaatcgaaatgccgaattggtgtccagccgactgctgctctattcctatttgttctccggcacttttatcactttgggatgcattggcgcttatttgagtgtttattggtctgattattcttcttttcatgcgggttttgcagacagctctttttttctgctaagggacaatgggattacgttgatgtgctaactgtgtgtaccataacccctaatttaattcttagtatgttttaattatttctgaatttaatttaattcatacattttaagtcactccttttacattgatctgagtttacttgaaaactctctagttttgcaattgttggaaaaaaaattttgaaatttgcaaatatttataattcaccaaacttgccatgtcgtccaaattcatgagcaatttgatttatttaattttgcttttttttaaatttaaatccaaagtaaagtcaacaaaatcaatggtcgaggatcacaacaaaagcgtcgaacaatgcaaatggtaatca

SEQ ID NO: 24877 - DNA, 1443 bp, Heterodera glycines
ttcaaaaattacatgtgcgcgattcgggaggcagcaaaatggtaaacaaatgttggtccacagagacattctccgtcggaagttcgacctttcggacggaaaagccgagattcggggcaaacgcaccgacaaaatttggaaaaatcttttgagaaattgcatttcgaacattggaccttttgaaatatattgatcatcttaaaaatcatagaaatgaccgacctcgagttgaatgagttcaaggagtgtttgttgttttgctccctattcccttcctcgtcaacttcagccccgtcattccctgctgattctctctcgccatttttttgctcggatgtgtccgcaatttcagaggaaggcggcggcacatttaatggttcagtgacgggaaacaaaggatgcttaaataagaaaacgaataattaaaaaaataaataataatgggtgaaaaaaacctcatcagccgcatatggttgaacttgctggatataatcatgaagttcagttactgaaacaaaaagcaaacaataaatgggaaatcggagggacatcgaatttactattaattccattggctccgaaaacataagaaacatcttccaagccaacttctgcacgaccagctgaatttgtaaaataaataaatgaaggggagaaaatgaaaatcacaattaatggccgagttaagcgagtcgcgacacaattgctcaaaataagttctaagcagaaaagacaaggaactgactgcggagctgttagaagtagaaaactaaaagacaaaacaagaaaaatgtaaatttggaaatgaatgtatttgttactccgatattttcaacgatggccatagtcgcatgtcgaaatttgtagagttcgtacttgttgaatttgttgcttgagattggtagtttcatattactttctgcttgtgcatttttaagcattccttaaaagttaattaatatacataaaaatttcagaaacagtgaaaaaaggcaatgacaaaagtaatgaaatagtgtcgccgatttcttaaaggaaaagcttagcttacaaagttagcatatcaattaaattatactttttgctaaaattcaactaacagccattgatcagaaatcacttcacgtttcaaagaacaaacaacacaagcttgcacagcattcgccctcctctcccttcccattcccttcattttcattcgcattttgccacaattctctctcttctgtctttctctctttttgcttttctctcccgctcactgactttcccaaaacaaacaacaaacggtcgaaacaacaacaaataaaagtaaaagtaggggaaaccatacggacagaaaatctatgcacagccgagcatcttttttacggtgtattgtaaaaacagcgaaattattcatttttcgccttatttacatttagtaatgccataatttttttg

SEQ ID NO: 24878 - DNA, 715 bp, Heterodera glycines
gaaatcggaaatttttcaaaaaatatacaatataataaaaaaattctaaatattttaataggctaaattttttaattcttaaccaagtaaaaggtatttcacaaatgtttttagtatattcgcttgaaaaaattattcaattattttatcaaaatctttttttgtcatttttcattattttagaacatttttgggaaaaggagtgactatttacacgttttttacagcgcgattttttcaaaaactttttgggaacttggaggagagtacggcggtgccgataggcgccgccgggaaatttttaaaaatttcagttcaatttattattagaaattgtacaaaacttactagttttaaaaaaaaaattaaaaaatttacgacttttcatcaaaaatttcggaagtcggaattccgaccccaaaaatgtcggaaatcggaagtctttccgtgccatacctggtgcctatcgacatctgcgagaaattttatgaaatttaatgcgatttgttaacagattttgtctaaaattgaccaaatgacgcagtttttgactcaatttctacaggattattaagtaaaagcctatccggcggtgctgataggcgccgccgggaaaatttcacaaattttgaatgaaatttgcgatgaaaaatgagttaactttaattaaatttattatttaatttttttaaaaatatttggcattctgtcttag

SEQ ID NO: 24879 - DNA, 1296 bp, Heterodera glycines
cgccaataacctcagatttactattttcgcgaccccactttttgaattctgacattttcagctcattacgctctaaatataaacagcatcagtgttccggaaggatcgatttgaaatcgccaataacccccaaattacaatttcctaccgtaaacttatacagattacatttggatataagaaattgaaatattgagaatatcacaaaagtgatcatgaaaattgtaaatttgagattattgggacttatcagctcggtcctccgcaaacactgattcagtttatatttagaggataaggagttgaaatggtggaattccaaaaaggtgaccaagaaaattgtaatcgaagattattggcgattatcagctcggtcattccgcaaacactgattcagtttatatttcgcgaagaatgagctgtaattttgcgaattagacaaaaatgatcataaagtaacaaatgagagaatttcacattctgctaattaggctttaaatataaactgtttaagtgttgcagacggatcaggttgataagcgccaataacctcagatttactattttcgcgaccccactttttgaattctgacattttcagctcattacgctctaaatataaacagcatcagtgttccggaaggatcgatttgaaatcgccaataacccccaaattacaatttcctactgtaaacttatacagattacatttggatataagaaattgaaatattgagaatatcacaaaagtgatcatgaaaattgtaaattggagattattgggacttatcagctcggtcctccgcaaacactgattcagtttatatttagaggataaggagttgaaatggtggaattccaaaaaggtgaccaagaaaattgtaatcgaagattattggcgattatcagctcggtcattccgcaaacactgattcagtttatatttcgcgaagaatgagctgtaattttgcgaattagacaaaaatgatcataaattaacaaatgagagaatttcacattctgctaattaggctttaaatataaactgtttaagtgttgcagacggatcaggttgataagcgccaataacctcagatttactattttcgcgaccccactttttgaattctgacattttcagctcattacgctctaaatataaacagcatcagtgttccggaaggatcgatttgaaatcgccaataacccccaaattacaatttcctactgtaaacttatacagattacatttggatataagaaattgaatattgagaatatcacaaagtgatcatg

SEQ ID NO: 24880 - DNA, 1689 bp, Heterodera glycines
tgatacatttttctgtcgacagttaagaacaactcaaatataaaacccgataaatctcatcacttcagcagatttacacgattaaactcaaaatcactaaaaactgaatgaatttgagtcaatttgtagtctcatttagccgttcactctcatcaggtctcgtcattcagaaggacagtggtagagtaacacaggtcccagtagtgtggcactccgtacttttcgagcagttcacgggcctgcttatgattggtcacaggagtgaagcgtggctcaccagtgaatgctcgcttttgcacgacgccctcccaaatctgagaattgaaaatttgaaattggtaagacaacaaacattggttgggatgcttaccaaaacgcactcgttcctcttctcttccgctggtccatcctccgtcccttctcccatttcattcgctctgttatgcgtcgcccttcggtcgtgcttttgaccggcaatttcagcagaccatcgaattctgttgagcatcaagtttttgaagaacttttgctgcttgggaccttaattacataaagtgaataaaatttgcgtgccgaaatttaggtttttggttttgctcctacacctcaaaattttaaaaaaagtcaataagggcacgcgggaagccattaaatgtacgacactgttttgaaggcattgaacaaaaaaaaaattcggcatattatggcattttcacgtatgaatattttggttaatcagttggccaatttatgctattggaatggttcaaaaattgtgcgttccgtgcaccttttgttgattttttaaaatctttaagtgtagaagcaaaacggaattttaaactgacctccctccatcacaacaacatttatgtcttccaacacaatgacaacaccggtcatttgcaactgtttggcgttcatcatcactttgaatttcttcgcagggtttgccaacgatttgatcctgcagagagaatgaatgaatgcattggcattgtcccgttttgctttgctaatgatgccccttttctctaatgtcccctccccttttttccccacttaaaaacggtgacgtgcactgccaaagttgtgtcctccccaatcttccggatggccttggcggccttctcttccctggtcagttttctgcttctgttgtcctccacgtgcttttgcgcccgttcagccatttgctttcgtacctaaaaaatttcaaaactaatcgttttttctgtgaatttgtccactgactttcgcttccattttggttgggtcttgaattgcatcggtgcctaacacgcgcatcaaattgctgattttcaattttggatccggcggtttttccaatccaagccgaattttctccgctctttctttcaatgcctcgcgacggttttggcgtcgcaattttttcctctcctttttggttagagaagcctaaaatcaataaatttgcagagttggccatcaatggctcccttgccttaatgtattgcggttgcaatggttcgtccggtggtttcagttggatgggatgctccaccaaatcggtgacagaatccgcgtaacgttcaaccggggccaactcctgccagggcacttcgttgtagctgtaattggtttagcattggctttggctttaccctcctttcgcccactctttgcagttgttcccgagcaccactt

SEQ ID NO: 24881 - DNA, 974 bp, Heterodera glycines
tttttctttacgtaatgacaaataagctaactgatacatttttacgaaaaatccttttaatattttttaaaaaatgaagccttcttgaaagcattcatttagaaacaaaataaaaaatattggaattgatattttaaaagaaaatgattgcttgtgaatatttttcctcttttgttgagagaatttaaataaaaattttgtcggactacaaaatcaattagccgaaaaatattatgaaaatggtcaaatgaacaaaacaaaaatgaaaatatattagctaaaaaatcgaattgccaaaaatgatgtttaaaaaacagaggatcttcacgtaatttaaaaattattgacctaaaaatcgaaattaacaaaattagagtgcgccgggaccgggaccgggccgggaattcccggtcctcagaggtcccggtcccggtcccagattttgaaaagctcaggttccggtcccggtagggcaaccgggaaccgggaaaaacaagcactggtaagaatggtggtcttggtgaaaaattagagatgaaaattagagtaaaagggaaaaatttaaaaatatattaatatattctttaaaagtgacatggacaattgcgcaaatggcctagtggctagtctccctgactttcccttcttctttcccctggttcaatccctctacagaaagtaaaatatttagaattttttttttgtaggctcatggctttcctatcgacaaaatatgattcctcatagttttattttaattgacacatttttatcatttttttaaatgaaaatccgtacaaattgagcctaataatcccaaaaagaagccatttttcttgaaaatctgttaacaaattgcactcaaattcaggggcttttcagaattacataaaaaatgacgatggagcgacaaacgaaaaatttgttgtttttctctgaattgtcgttatgacaagaaaatattataatatttt

SEQ ID NO: 24882 - DNA, 2031 bp, Heterodera glycines
ctggactcctccattctacgtcctgttcaaactgcaccacagtcggttggccaaccgggtaattggtgtacatattccttaaaaagccaaaatttttcaattattaattttttccggcatttcttaccgcgaaggataaagactgttaaagtccttcactttgattgtgcggcttttccagtcgcccgtctctgggttgatcactgaagcgcccaagtattcggtcccagttcgacctgtgccggaaaattagttaaaaattaaatggaaaaggtaccgccaaagaatgcatcatggaagtcaattgggccagaatccgggcagttgtcgaagtacgccttcatggctgggttgtcctccagcattgcgttcaagtggcactcccaaatcacttccacttcgaattcccgcgcaatgtcccgggttcgttttgcgtcccgggccctgagggctccggccgtttctcctccgcccacaattgccgcatcgtcggggaagcagctcgggcatccatgccaatagcaccttttcaatgggtaaattggcacatttttggaatttttccttacccattgacctcaatggccaagtttttgtcctcatctggacgctccatcatcccatctaagctgtagttgccgaatttgaactcccctccagggctttcgacatggcgcaggactcggccattctcccgcaattcttcttcggcacgccactgagagtcgacaaaatgtaaaattaaaataatttggatacactttcaaatatttccgggcgatggagctctgtttgcctcgcttctcgtatcccaagtgtgggatgatggcaacccgttctttgtcgtggtgagccaactgcacccaatacttcatacagccggacgggatggtgaccgaatccgtgatgtcatgccgagtctcggacaagaacagctgccgcatctttaccataccatgggccaggatttggacatcttcaattttttttgttatttttgcatgtttttttttcaaaaattgtacctgtcttgcagtagtccgcgatgacttcacagagctcaaaaccagtttcccggttctcgtcgtaccactgctcaaactttgcgcgctctgccgggaagaggccacctgggtaatagttctcaattggtggcagggtgtccagcacagtgccataattttccgcctaagattgtattaatttttatttatttttttttttataaattcctcttaccttattgaatttgtgtggaaaatatttcttgttttccacgccctcaatttctagaccaaacgtcttgacaaaattggcaagttttattgggatcaacttgtaactaaagtgatcaaaaattttaaaaatatttaatattcaaaatatttacctgtcccggaaaacggtggttgtgtagactcctgttttgcgggccttcatttccaggagatggttccctggcggatgagatcaggcgggacagtcatgtgcaacatttcaatataaatcagcacatgatagtagtgggaacttttaaattttatatatttcaagttttttaaaataattcctaaaaaactggcgtgggtgtttgtgtatgttgtcacaggataggaattttctcgggattattgtaagatagaagacaatcgcgctcgtaatccattagaattatgttttcatgatttttgaaaacaaaaaatatttttttcaaaaagggggtaccaactaaagtattacacatgaaaatagttaaatttgagaaatattacttattaaatttttatgtctcaaagaaaattgcaaatgatctttattgccttcaccaaacgaacactgtcaaatgggctcacaataaaacaaaaaggaggaatttatgttggaaaatatttcacaagcccaatacaaaacggagaattcggaaatatacaaaaataacggaattttaggctaattaaagggatggaaatggcgcttgatttctttgaaatatatcaaaaagaaaaccagcgctttcccagaaaagtaaat

SEQ ID NO: 24883 - DNA, 1718 bp, Heterodera glycines
  unsure (1)..(1718): unsure at all n locations
ttgctgttttcgccttcttccacgtgcgccgtcctgcatggcatctgccattagtccggcctccactaagtcaagagctacctttgctttgcgcttcagttcatgctgatggtcattggtgcgtcgtttagtggtgtgcgtgtcagaagagggtatgtcgccatagggtatgttgaacacacgagacttatttttcagacggaaaaaacaatgtcccggtaaatcatacacaacatcgaacgggatgaattgggccttctctatgcgggtgcaccaaagcgtgatgccttctttcgtgatcacagtgtcaatttcggactccgttcccttacaacacctacaacggcccgcttcatcaaaaggaatgaagcggggtgtcgagaggcggggaccgctgatggttataccactcgaggtcacggtgaggtccgtttggccgaggatttggttgcacaacgattttttgtcggagatgttgatcgccataggaattgtgaatttgaaaagggacgccaaatgaaaaatgccacccggtgagcccgtatttatacgcaaaaaagtcgggccaggtgccacgcccattttataataataattttggcgagatgggcgctcataaatgaaccccgtgtgaccgatcaggggaagtaacaattatttcctttccaaatatttcttctcaaattttatttttttttaaatcacatccatcaccaatgagttcaatcatccccccttcgtcctgtcaccaaaatatctgatcactcatcatccatttcatggcttggttcccttccatttgatcagtcctttgtccagtttgtacaacagcatcttcacatgtttacatggcattccgtgcgcctctgcatagtcgcgcaagtcgatcagcatctctttagcgcggtccggtccgtacaattccatcatctgaaatggattaaaattgagggaaaaaatggaattttcaacaattatttacatcataatcaccgctctcaaagcactcgaggtgtagaacacgttcatcgggcatttcgcagtcgacgtcgtccggtgctgtaggtgaaagattgttaatgttaagggaggaattgagtgttttttaccattttttgattccgatgtagacatttttaaaatttggaataaataaaagttagtttatggataaatgctaaacaaaattttatttttaaatttattggaataatgcaatatggtaaaatgtaaacagtaaatgtgaaaaattttaagaaacgaaaagagcagggtgggaggcgaatgagttaatttaaaatatattttatttttgcataaaaacaatatttgaaaggaattatgaatttggtttatgaacagtaaaccttcgtactgccttttatatccaaaaaagctaattaattacaattcttgacccatttcattgtcttgttttgtcggtaaatttgaaattttgctttacttaataccgacaaaattttgatgtatctgctaaattaaaaattccctaattatctatgcaccgatcggacgacgaattcagatttagatcagcccaaaccacacaattgaaattanatatgcacaaattcggactcagaatttnaattntgacaaatccaagccgcgaaattgacctaattcgaatgatttaatattcatacgaattaaatatgcaataattggacaacgaattcaaattttggtcctaacat

SEQ ID NO: 24884 - DNA, 1343 bp, Heterodera glycines
  unsure (1)..(1343): unsure at all n locations
ccgcccacngggaatgccttgaaatgaggcgctctcgcccatagtgtccgtaatatttgcagagcagggtccttagattcaagtcgttttgtcctccgcccgtgccacgacggtgcctgtaaaatacaatttaaaaaataattattgtgttagtcacttttgttcatctgcgttctctctttttgctattttctttaagttgtgccatttttccttgcactgtttttccgaaatgctgctcccgaattcggcattaatttctgaagttaaattggcccaagcattttgcgaacggcgcgaaaacgctgcctccttgctttgcggaaacaattcttcgtaattgtcgcgaactttttgcgctaaagcgcttgacatttccttggtaaaatttgacattctaaatttatttgtgatcttagatttaattataaaatattattattttatgagttgatcattcgtctttaactcacaaataaataatatattggcggtgcaaaaatacatgtaacattttgggtaaacataaaaattgatcaataggaatgatgtgttatgcgatagacctaaaaaacaaaagttatttttccataaaaaatgtgtaaacaaattgtcccaaaagtgcacgtggtcaaataacccggtagaataagatcatagttcatggtcgtttgacggaggttggtggtaaaaacggcacttcgtggtcattttcttattctacgggtttaccaccaacttcatggtcatttgaccaggtcatttaaccatggtcgtttgacccggtcatttaaccaccttcttattctacgggccctgttcttcgctctcctcggaatctaaaaattcagtttaattaatggacacaaattgaaattgtgccattcccccgccccgcactcaaactcaccactcgaagagaaagagtagctgctgtccaaaaggagagagaaataaatgcaaaattttcagcacctcataactttaaacgggtcggggggctcggtttagtacggctcgttttagtacaagcgccagttcttggctataacttttttctttgccaacaatatccaacatatttagtatcgatccatattcctaactgacctctattaagctgctatattgccaacatctctgacaatgttcagagaagttatgactcgaaaaaatgctcacaacgtattctagaaattgtttatgacctttctttgacattgctctgaaattggtaacactttctcatatagagtagcataacgaccgcgttctgcagatgaagctcgcaataccataagtcgtttttgctcacgaatatcaaaccagtccacaagtacaat

SEQ ID NO: 24885 - DNA, 1253 bp, Heterodera glycines
  unsure (1)..(1253): unsure at all n locations
tggttgcgttgaaggctttgggcgtgggcccggccgagctttccaccagtgcagatctggtggttagttagcaaattttcaaagtgagatccttgaagactaaagtggaaaagggttccacgtgaaccaccagttgaatgtgggtaagccgatcctaaggcaccggctaacgccgtaacacactacgaatgacgacttttctgtgcttgcgccagttggtccctccggttgccgaaagggaaagtgggttaactttcccacgccaggctagggaaaatgacggttcgcaagagctgttttgcgcggtaacgcaaatgaactcgcagacgtcgtgtggagtccgagcccagagttctctttttctggtttagggtgtgcgtgcctggaagtggctcagcctgagatagggatgttgcgcccgtaaagcaccgcggtttcctgtggtgtctcgtgcgctccacacggccctttgaaaatgcgagggaagctatttgaatctcctgcctgatcgtaccgatatccgcagcaggtctccaaggtgaacagcctctagtcgatagaataatgtaggtaagggaagtcggcaaattagattcgtaacttcgggaaaagaattggctctaaaggtcgggtcagccgggctgttgcgtgaaacaggcggcttttgcccgtggctgcgtgctgttctttcggggatggtgcgtggactagtggtgagagctgcttgtggagcgcttcagctgcgtgtatgctcgtcagggtatgcacttcggttggcgctgaacgaccagtttagaactggcacgaactcggggaatccgactgtctaattaaaacagaggagacggatggtccttgtggacgttgaccgtgtctgatttctgcccagtgctctgaatgttaagccaaggaaacttgattaagcgcgggtaaacggcgggagtaactatgactctcttaaggtagccaaatgcctcgtcggctaactaccgacgcgcacgaatggatcaacgagattcccactgtccctatctactatctagcgaaaccacagccaagggaacgggcttggcaaatttagcggggaaagaagaccctgttgagcttgactctagtctgactttgtgaagaatcatgagaggtgtagcataagtgggagccgcaaggcgccagtgaaataccactactttcatcgattccttacttaatcggtaaaacgggagtgcgcccgaaangggtgtccattttggtgt

SEQ ID NO: 24886 - DNA, 2510 bp, Heterodera glycines
  unsure (1)..(2510): unsure at all n locations
taaggcttggcatgccgtcactgaaatggtcgagtccgaggcacgttatgtgcaaaagttggcactgctgnaaaaggtgggcggcttggcaataaaaaaaaaatgccgggacagcaaaatgccattttttaaattttgaatttccaaaaagttccgcgatttggtggagagggcgcgcgtgttggacaagcgccagttgggccaaatgttcgccaacatcgcatcactgcaccaattccatgagcagcatctgttgccccagctgatggaccggcacagagaatggcaaagcagcaaaaagtgggccaaaaaatttataattttaaataattaaaataaaaaaagaattaatcactttgatcagaaacccatccaaattttacaggacaataaaaggacaacgatattcttaaaaattggctctcattaatctgtgaattttataataggcccaaagaagacgcagaaaaataaagagtgattttaaattttaaataaataattgatcaccataatttaaaaaaaaaattgatcacccataaaatcgtctaaaattgatctaaaaattcacccaaattttatagggaaaataaaaggatacgataatcctaaaactcattaagaattttaaaagataagtaggccaaaacgtggcagataaaataattaaattttttttttgctatttttggaaataattattttttacaaaattttttttagcaagttttcctttctcatttcttctaagctgatcggaactgaaccatatttaaaaataatcaaagaaaaagtggcatatattttttatatttttaaaataaaatcgaataaaacagaattttttctaattttaatttcaaatggattttcatttaaatttaatttaatcatttatttttatttgcctttccacagaataagcgatgtgtggcgaaagcaggccccgtttctgaagatgtacagcgaatacaccaacaattacaaggcggccattcaaatgtttgaggaaagcatgcgaagaaagcgcaattttgaaggtgaacaaatggaagcggggacaaatgatcaaaggacaaaacggggaacggacaaatgatcaaaaaaggggatggacaaattgtcgaaaaaatggagaaaaatctgatcagatcacattcatattttagaattggtaaagcgagctgaacagtgggaggaatgtgagcacttgtccatggtgtcccatctgatctgcccggtgcagcgagtgatgcgctaccaattgttgctgagggtcagtgatcggagggatatttatttcagaaaagattgattgattaatcagtgacactgatcagtgatggaagcgtgatcacggtgatcagagaaagagaagagagagagagagagaaaaggagagaggggagagagagagagagaaagaaggagagagagggcgagggatttcataaaagagatgaaattgtgatcaactgagttgatcattttcattatcgaatgaattttgattattaaatcaatgatttgttcatgaatagagatatggataagtgagtgatcagttttcaatgctaaggtgatatgataatatataaataatttcaaaaatcaattaatgactgtgaagcaaaaagtgatcagtcaatgatcaagaggtataaactgatcaatgatcgaaaaaattaattagtaataggtacattatttgattactgtacatcattttactcatacgatacccaaggcttgatcaatcactgttatgtgatttgtttcaggaataccaacggcatctgagctcaacagaccccgattgggaggacacagaggtagccaatataaaaattaaaattaaaaaaagaaagcgaatatttaaaaaaacaaaaattgaaaaaaaggtatccaataatttaaaattcaaaatttttcaaaggctgccctttcgcttgtgttagaagcggcttcacatgccaacgaaatgatgcgcaagcttgacaggcaaaaacaaagttaaaattgtaaaatttcagatttgatttgggcaggtatcgaagtgtgttggaggtgcaggaactgttgggcaattgcatttcattggtaaattattacatatttttaattgatcaatttgggttaattaattttcaaaaaatttatttaaatattttattcaattgaccaatttttctttatttatttcaaaaagattaatttattgactattcttaactttttttttgaatatttttataaataatttttacttacctaattaatttaatatatttttttaatatttttaattattttaactttttttcaattatttataattaaacattttttcttcttttttaggttacgcctacacgtgaacttctgacaaaagctcgtctttggaagtgtactggtcagttttggaggacttttttttgtgatttttaaacacaaaaaattaagccataatgtagggccccagtttttagggtcatttttcaaaatgntaa

SEQ ID NO: 24887 - DNA, 935 bp, Heterodera glycines
tgcttcgtttatgtagtttcttcacgcctcacacctcttctccccccaataagagcgaggaggccagactgaactggcgagacgcaaatgacccatttatccctagtaaatgccccacaacctccctaatcgtgcttaatgatgcgaagagattcggagattcaccaacagaaagtgggcggacgaagaaactttggaacaaaacgacgccacttggaggcaaaaatttgcatttttcctcatcattcgagtcactctcaataagtaattgtttatcactgacctcaattttcatttttaataatatgcccactaatatatcggtgtttgatcagcaatgtacataagccaaaacgggggacggggatgaaaaacccgggaatcaacccccccccccctcgtctctatgtcccctccccggacggggaccaaaagtccgggaattactccatccctccggtatccatcccctccaccggctccaactataattgaatttttatttattatatcctgattacgaagccttctttatttattgttcgcgactcgtcagaagcagggcaacagctgcgacaatgtctgatcacccgcgtgaagcagagcgaaatttaaagagaatgtgatcaaagcaatttaatgaaaaaaaaatttatatttttatttatagtgtcacgggacgggaccgaggcaggaattcctggtcattcggggtcccggttccttcccgatcactttaattgaaaaggccaagtcccgtatcacgctaaaattaaataagcaaaattgggtgaaagaaaaaacgaaataaagaatttaaaaccagaaagtcttacaaatcatgttatcttctgaccgggtcaagattaaattcatgtgtttctctaaaaatattggtcatttgaactaaacagatttaatatttgaaaaactta

SEQ ID NO: 24888 - DNA, 2531 bp, Heterodera glycines
  unsure (1)..(2531): unsure at all n locations
ctggccatgaattgatgcacgcgctggcttttaggcatgagcaaagccgaaatgataccntaaattacatcattttacggaaaaatgaatgggtaattaacacaaatattttaaataaatttttcatgtgctcattataaagcaatcgaaaattcattcaaacacgcaaaacttcggcttcgcttacgatttcgggtcggtgatgcattatccagctgggggcaatcatgaacagtaagaaaaatctcggattttaataacctaaaattggaattaaaggggcttatacgacctgatcactttgccacggttttatcaacaaacgattggtcaacgagaacgaatctcttttaaagacgcggccataattaatcgaatttattgcgaaggcaaaaatggtcgaaaatttcgaaaaattttaatttgtttagactcatgcaaaggccatgaggacaagtgtcaaaactggggctatttgaacccaaatgattgcacaaaatgccattgtccggacggatacggtggtcaaaactgtaaagaactcgaagagagtgagcattaattccatcaattaaaacaaattatataaattaattgaagatttgaattgtgaggatttgagtggaattgcaagagaattggtggccaataagtcagcagtgttttcgaagacgaaggccaaatgtggggggaattggccgtgccgatgccattggcgaattaaggcaataaaataatgtttagaaaattataaaattattttgagtgttattaatgcaaattttaattgctttcagcctgaagcggggaaaaaggcgcgaattcagttcaaaagtttgaacaatttgtttgaatgcacatacaactgctcatcggcgtatgtcgaggtcaaataccgagccgacgaaagggcccaaggcaaaaataaataaacaattaactaattagttacaattattaatgattatcaaaatattgctcattaaggtgccaagctttgttgtgccgcatcactcactgatctgaacgcaaatgaatataaaaattggattgcggcggaaaagccggacatggacattgtcatatccgcgtgcctttcaccaaaatggaccgtaccatctaccgtattcgagctgacgtatgaatcaggcaaggaaaattgtgaaataaatttttatatattttcaatatttctataattaatttattttaaattgaaaattgtctttatttcaatggctttcgtaaatcagaaccattacacaattaaaactgttcaaaaatgttaaggcaaagtcaaactcataaattcgaacaaatgcgtaaataccgataatttgtttgccgagaaaaggaaccccggcaccggcggtttgaaatgttatgacgagatcaagcaccaatcttatgactgctcctgtcacggtgatagaaatgcctcgctgaagaaaaatgggcgcacgacgcctttctttgtccaataataaaggtaattaattaatttattattattaattaatgccaaaagacaccgccacagacaaatttcatataatataggcaatttaatttttaagtagagtgaagcgggactgggacctggtagcggacaactgagtaccaaggttccgggtttgacatggacctggggactagtcccggttttcccagccaaaaattaacggtttttcaactcgaaaaggtcccggtccggttttacccaaattcccggttccgcttaactctatttttttgtatcaaaaaaccggaaataataaaaaatagggacgataaactggaataaggataaatatgacaaatgataaaaactctattttattaattaatttgaaaattcaggtcaattcaatttcaaatcaaaggaagccgacacgagtgtttactaacccaaaagattttcgatacaattggactcggattgaggttgattgttatgtgagttggggttttctaatttcaaaatttgtttaattgattaattttacagaaggccgatgcgggcaccgtaagcttttggggctacagtaagccggagacaaaggaaatcattcgggtggacgaagtccactgtttgacttatgaaactgctggagtgccaaaacggttcaaaagtttgcaagtcgaagaacagccgccgatgaaaaaactgaatccaagtccattcttggccatgcttcatcacttatccatgtgttcgtgccatttgttggccatccatgagagaagggggaaatcagtgatcagtggatctgtctgtgagtgatggtgatcagttggccaaattccatcaataaatttttatctttttttttactttttaaaggtgtcaatgtttttaattcctcgtatatgtatttttagcgcattatgcaccagcatgggctatattattttttggctaaaagtacaaaaatatctctcaactaaatagacatgataattacaaattttgtcaattaaaaatttaatttttgtgcctgtggtggtgtctttttgtttatttttttttt

SEQ ID NO: 24889 - DNA, 2324 bp, Heterodera glycines
gggatttgcttttcccgttttccaaccaaaaaaaaattccgccttgttcgtctgctcctcgagtagtttctgtgttttgttcacccttttaggttttccgtcgacagtccgttgaaaattgagggatttgcctcccgttttccaaaaaattcaaccgatacttaattgctctgttttctaagtacttcgaaggtttccacaatagaaaagaataagaatgaaatttttttattaaataacttaatttatattttttaattattaatttctcattgtagtttgaaaaaaaataatagtatttataattttaaaaattactcgagtagttacccccccccccgggaccgtcgccgtttgacgttaattagaagtgacaggtggtgtaattgggggtgactaattggtcaaacctacacctattgagggttttttgtgtaattaatatattattaattaattggggaggggggggggggtgatggatggtagatgtgatgggcgggaccgtcgccgtttgacgcttaatagaagtgacaggtggtgtaattcggggtaactaattggtcaaacccacacctattgggggttttttgtgtaaataattaattgattattaattaattgggggggggtgatggaggagggcatggaagcagatgtgatgaaggggggggggggtgacagatgagaatgggggcagatgttaaaaatgggagtggggggggggcttttcatcatatgcttacagacattccatcaaactgacatttcgcctacacacccccaaattgacaaattgccaaaaaatttatttaaaaaaattacaaaaaatgtttttattttttcttatgaaccccggggtctttaataatttcatctgttccccatttcatattcaaccatgcacaacagcgtccaattcttgtattggcacatccaacacgcctacagatgaagacgcggccaccagacaccggcaaattgggatggggagggcgggacttgtgtaggcatactctaccccttggtagagtattatgttttcggtgagaaatatcacttcctacaaattgtaatttaaaatgtcaccccctccccatgttttaaagcagcagcagatggtccagctcggggcaagcacggagaagcagcagcagcagggtttggaggagcagcaacgggagaggggggtcgggaagcagcagcatgctcgccgtcgtcgtcggctttttgttgtactgcttgaacttgttggcagtttttttgcggtttgctggtgtcggcccccactactcaccgtcaacatcatcagtgcttaactctgcccaaaaaatgattatataaaagttgaaagggattgccgacgagaaaggaaaatttttcaaacatacaaaactgtttggatttaattacccaaagttgggagcttttttctatatgcttaatgaatgtcgtggcgcaaatggcgattcgtatattataaaattattaaacaatgtaatttgaaattttaattaaaaatatattcattaatttaaaacataaaatgggatcaaagagaattaaaaggatttaaactaaaaactaactatctgttataataacatttacgatgaagcaataaagaagaacattttttgctagtacgcaataataaagcatatgagagaaaaataaaaactaactcataattaatcaaaattttatttgaaaaacttgctaattaactagtaaaattaggcagcttgacagattatttcaaaatacatttctagttgattttttaaatttctaatttcaactattatatttatacttcttttgcataaattatttttgtcatcatttattttgtcataaatattaaataaataagaaatatttttatttccctaaatattttctaatttgaattttttgataattaaattagattatgtattataattgaaactctttcaatttgggacataatcgaggttcaaaatcttcaaaaaaaagaataaaaaatatggtgttctcttttatatttatagggagcaaaatacgctacaaaagctataatattttataaggctattaataaaattaataagagtccacaattacaacttgattaactaccgatatcattaaaaacaaatatattaaaataactggtgcgtaaaccgtcggatctgggaatgggataaagcgcttcgcccttcttgagcttcgctacctaggctgtgaagcgattcaaattgatcaaattggttgagagatttttttgaatttttaaaaaattattaggggtttttagtacacatcaagcatcaagacgg

SEQ ID NO: 24890 - DNA, 2153 bp, Heterodera glycines
  unsure (1)..(2153): unsure at all n locations
aagcgtccgtcctgaggccgcgaagcggccgaatgtttcccacacaattaaaaaacgggcgcgaagcgcccgtcctgaggccgcgaagcggccgaatgttccccacaaaattaaaaaacggccgcgaagcgcccgtcctgaggccgcgaagcggccgaatgtcccacaaaaaattaaaaacgggcgcgaagcgcccgtcctgaggccttgaagcggtcgaatgtcccttaaaaaattaaaaaacgggcgcgaagccacgtcctgaggccgcgaagcggccgaatgtcccccaaaaaatttaaaaacgggcgcgaagcgcccgtcctgaggccgcgaagcggccgaatgtcccacacaaaattaaaaaacgggcgcgaagcgcccgtcctgaggccgcgaagcggccgaatgtcccccaaaaaatttaaaaacgggcgcgaaccgcccgtcctgatgccgcgaagcggccgaatgttctcaacaaaattacaaacgggcgcgaagcgcccgtcctgaggccgcgaagccgccgaatgtttcccacacgataaaaaacgggcgcgaagcgcccgtcctgaggccgcgaagcggccgaatgtttcccacacgattaaaaaacgggcgcgaagcgcccgtcctgagaccgcgaagcggccgaatgttccccacaaaattaaaaaacgggcgcgaagcgcccgtcctgaggctgcgatgaattgctaaattacatcactttctagcgacgcggcgaagccgcgtcccatagcgcgatagcgctttaaaacatcacactaatggaattaatgttttgtatgttttaaaataacaaatgagggccatatattaccaagccacgcatgcacaccatagccaactgggcaccctagttatatatatgttatatatatgttatataggttttgagtttcgttgctaaaaccattttctcccggccgaaggccgggagcgccctgaaagtggtggaagggtcttacaactttttgaggagaatccgggaaaactatagagaaaaattcagcgcggacgactgagtcccggggaccgatttctcactttttcttgcagtttagggcccgtaactttttttctaaaactcggatcaaaaaattcccgctgtgagggcactccgcagaagtgtcctctataatccagtattttttattttttgatcagaccaaatcccggacctgtacagacacggagactcagttaatttttttttcccacttcagtaccaggcgaataactcattagggtttgatctgagcgaggtggctccagcggacttattgtagagctttgaaagctcgatttttccagattttaaaatttcgaaaattttcaaaatttttcgagttaggcctaaaaaacggttttcgggttttttaattttatgattttttaacgaattttcccagaaaaacggagaccacttccaaaacatagtttttcgagctctatcgattggtaatttttttggaaaattttcgatttttttccagaaatagaaaaaatttttggcctgagcgggacatttgagtcccgggcccataactcgtcaggggttggttttagccaaaaatggccttagagcaaaattgtagagctttttaagctctatcgaacggtgtacttcattttcgaaaattttcaaaaattttcgagctaggccccctagaaattttcaaaaattttttttgggttgaaaaagagggtgaaaaaaatttttctggggtaaattagggtcctgagcacaaatatgatgtttattttaagtttcagattttttagaattttttaaaaattcgaaaatatttttaatttttttggtccttggaaatttgggttaaaatttgaaaattcataactcaatggaggactggtcaatttaagtgaattaaagctttaaaaatagcaaaaaatcgggagaattttatgagatttatttggttttataatgttcaaaagaaaaaaagttattccagaatttctggaaattttcgatttttcagaaaaaaattcataactcggttctgaaaagtcatactgtaaaagtaaaatactaggaaaatccccaattttttnctctattatataaattttaaatggcatttctatcacatttaaaaaaa

SEQ ID NO: 24891 - DNA, 1745 bp, Heterodera glycines
taactttttttatacttaagtaaaaattatttcgaaaaatcatattctaatagagtacaattaaggctattgaatgataccatgaaatattaatttggttgaatttgagccaagctattaatttaattattttacccattttttgttttcaaacccattggcagttttaagaaacgtgctggcggttttaagaaacgcgcatgggtggcagtttttaagaaacgcgccagcacggctgaacgcgcttattgaatttgcgcgcatttttgttttaaattttaaatttcttttggtatgtagcttcgatttacttttcttacgatgattttgggctcagagctccaatttttcaaattttcatttgaattttaatttttaaaccattctaaaaattcccatttgtgaggaaaaaatacagtattctcaaaatgtggaattactggaatcaattctaaaatgaaaataaaattgagaattatgaaaataatttatgttatattatcctttttcttcccttttacccgcctcattcacagttaattaagataataatttgaattgttaaatttcttctgagtgcaattttttacataaaatgacatcgttggaaaattctatacaacagatgaaacctttgttggtggggacgaacatgaaaaagaggcgagttaaatctgcgatccgtggcctaatgcactaaattttatataaattttttttcgaaaattgggttattttttcaaaaattctttcaaaattctaatttttcccgccggcactgatcaataaactaagatttttctctacggcgcctatcggcaccgccggacagggacgtatccaggaggggggtgcgcggggtacgcaaccaccaagtcctcgctcacttaaatttctttaaaaaactggctatttaaaaaaaatccgcaaaaactggtcattttttagtgaagatatgacaaatcatacccaattcctaagcccatggacgaatttttaattggaacatagtcaagggcaaccgaaggggttcttttattatgcgttggaaattgaaaaatgtcaaaatttgcgggagagactgtcgggagtttgtcctggttttcttttattatgtcctttgaattgtatcttcccagcaaaatgatcactttcgtcactttgtcctgggtttcttttattatgtcctttaaattgtatcttcccagcaaaatgatcactttcgtcactttgtcctggatttcttttattatatcttttgaattgtatcttcccagcaaaatgatcactttcgtcactttgtcctggtcttcttttattatatcttttgaattgtatcttcccagcaaaatgatcactttcgtcactttgtcctggtcttcttttattatatcttttgaattgtatcttcccagcaaaatgatcactttcgtcactttgtcctggtcttcttttattatatcttttgaattgtatcttcccagcaaaatgatcactttcgtcactttgtcctggtcttcttttattatgtcctttaaattgtatcttcccagcaaaatgatcactttcgtcactttgtcctggttttcttttattatgtcctttgaattgtatcttcccagcaaaatgatcactttcgtcactttgtcctgggtttcttttatatgtcctttaaattgtatcttcccagcaaaatgatcactttcgtcactttgtcctgagcttcttttattatgtcctttgaa

SEQ ID NO: 24892 - DNA, 1743 bp, Heterodera glycines
cagcagcggtttttgcattacaactaaaaacgacgagagaaaaggataaaacgaaagatacgaagctattgactttggttggccctttcgacgaccatcgattggtgcatttcggtcgccgttcctttggcgttttcagcggggcctttgatcaaagcattgacagaatttctcgaactgatcggaggaacaacggcattttgcagcgcattggccgaagggttggcaattgcgctaaatttggagggtttcgccggcagagacggcggttgagcatttgtggaagcctaaatttgaaaaacatgaaatacattcggccaccgcattcgacctgcatttgtccttggtcgagaaatcggacgaaattgtcggggaaaaggccccgccgtccgtcatgctcggcaatgaaccaatcctcctcctcacagtgccggctgaccacagtgacgacggtcccttcggagagagaaagttcgtccgagtttgccgcctcgtaattgtacaaaactttggcgaactctgtcaaaaagatctgatagcttaaatttgaaaaagaattcaaacaccttcataaaaccaataacagccaatccataccatactttgaaacaggattcctattttgcagaaaaacctggcatttttaggcttttggggggtctgtgtggttttgatggatcacggaatttcaaaaattaacccaagatgaatatttatgtctaattaatcgcatttgaagacttaaaaagttgctgggtttttcatgcaaatcctgctttgaaatgctctcgaatgccttacaattcgcttttctctctattcattcgcttaccctttgctttttgggaattcggcacttcagcaccctccaaaaccattgtcgtcgttgtgggagtgatcatcgtggacatggcacgacgaacaccggcggaaacggtcggtgccgcgtcccttttgagaagggaggacggaaggacattggcggattggacaattccggcgccattggtcagactcagtgccgacgtttttgcggggggcgccgaattcggaacggaaacaccgacggaaggaacatgttctgctggctgctgtttatctgcaaatattcctcgctgaccataatatcatctcttttttgttaaatattaattttttggaattttatggaggaagaaattttggttctaatgcagtttacgcgtccaatcaatgactatcctcggtttcttaagtcataactttttttctttcttgctcaaaacttatattatttgtatcaatcgagagctaaagtccacagatttttttatatagaaaaattctgggataaaggcaacagataaaaagttattgttgaatatacgcgaaaaatgatgaatttcaggtttttttcattgaaatttttcgtaatgcaaatatttgctcttttcttgtatttataaattcccgagactttaagctttcaattgataccaaggatgtatggattgaccaagtaagaaaaaagttttggcttaagaaactgaggatggtcattgattggacgcgtaaaagtcgattggacgcgtaaactgcattatattcagtaatttttcgaattgcctgtgtatgaattgtcatgatactttatgtttaacaacgaaattttattaaaaaagattactgcatagcggacaaaaaaataggtttcctcttagttatttggacggctaaaataccacggaccagggatggcacgga

SEQ ID NO: 24893 - DNA, 865 bp, Heterodera glycines
aatttttcctacttttttaaaaaatttttgagatcggtgacgctggattggatttgcaaccagcggcggaaatcataatcccgcagcgcactcagcatttggtcctttctgatcaattgcacaatggagaacgaatgctcattttctgttcccctgctggaattgagaggctaagaacttacaatgctgaagtggcgattgatgggacttttgaagtaattaagcaataaaaaaagaaaaatgaaaaaatatgtgctaaaatttaagactagcttgtgcgataatatgcgataaataaacatgaaaattaaatggaattcggttaaaagaaaactaaatcaatgataaaatgttttgtaaaattaataataaaaattcttaattttatatggttaaaatttgtccatgggttgaattttgccttatctggggaaaacaatcaccggcgagttcaattactggcgaaatcaaatacagacggcgagaaaaagagaaatagttcactggcgaaatcactcactggcgaaatcacacactggcgaaatcccactggcgaaatcactcactggcgaaatcaatcactggcgaaatcacctggcgcgaaaaaaaaatccccaaatatgtaagaaatatgtataaaaactagagttgctcggtaccggtaccggtactggccggtaattaccggtttttttggtaccggtaccggtaccggttttttcaaaaatgaaagtaccgttaccggtttgtctagtaccggtaccgccggtaaaaatttgcactggtaagaatgggggtctggtcgacaaaaaataagaaattggtgaagaaggagaaatttttgagaaaaaaataaatttatttc

SEQ ID NO: 24894 - DNA, 1398 bp, Heterodera glycines
tttttatacataatttctctaattttaatttgtttatctatcgttcaattctttgtgatttggaaattccaacattttctgggttcagatgaatgtcagtgacgaagaaatccatttctctcggactgttcgtcatcttaatcagcggctgttcttcggtttgttatcgcaattttcgggaaacattgccattgtttgggacggtaaagcgatgaccacacaatttgacatggtaagcaaaataggcgaagttgaacatcatcttccagcattttactatataatttacagatagttactccgaaattgctacaagagcacaatgtgaccaaaaattacaaattggaactcgtggcacaacccgacacacaacacgtgattcttttttatttttgttacggaatccaagttcttaggttgtctatttgatttatgcgacccgtcaatctgtgttattgcttatgcgaaattggcttcaccaattgcccgacgatgtgagttttaactgttgaggaattatttaatttttacaagttgtatataacatacagcgaatgatttttttaggacttacgcctccatcacgttgtgttcatccccgacgcttcattaactctcagacaacagttgcgtgaagatcaacgcgtttgggatcgtctccaatcggtcgactctttgcctttgcattggttcccgacggaacagcacaaactgctcacgatggagttgcctcagctggtggcgcagctggtgctgaacggagactggaacttcctgttcagatgtgccactgcgatcagacaattggagcaactgatcacaggcagtgacggggcgctcacaatgcgctgtaagggcgaatggtccgcacgcattgtggacatgtgccgcaaaatcagagacgatgttggtgggaccagaccaagcgggaggagtgctttcatccctttgaagcatttcgattgtttaagcccaatgagaagaaactgccgctggagaccgacttttttcccagcatccacgggttgcgggcggtgaacgaaattgtggtcgtggaccgatgggtggacccgttgagtccgatgtttcaacaattgactttcggaggagcatgcgacgagttgttggccattgattctaaaggcatttggatttttaagactacatgcaacaaatccaattaaggcagactgagggtgccattggcggactttgaggagagagacgaccaaacggagacggcacaacaatcggacagtgaagagatgaaggaattgaacttgcacgacaaagtctatgaacagctgcaggatttacacgttaaccagttcagtgggttttggctatttttaaccaaaatgatgtgaatgattttagagttgccaacaaaatacgagt

SEQ ID NO: 24895 - DNA, 1754 bp, Heterodera glycines
cttacaaagcacagtcggcaaaacagtgagccatcattccggcattcttcggcaaatttttgatggcacgaaacagtgccgaagaattgttcagcttggatatgttcaggcgacacacaaattgtgtcaacatcggaatccatcgtaaaagcacccaaaatcattgacccacccaacaacagatcactttggccatttgactaaatccatttttttaattgaataaattaaaataaaatttacccattcccgaacaattgttcgaattttgttaaaatgaactttaatttcgtgtgctttgctcattgtgtgatggccatttgtattcaaaatattttccaactataatttaatcaaattacttttaattgctgaggatttatattaattttctataaattaattttaaatcagataagaaatgagttttttttaaattatttttgtaagtatttgctactcaatttctatgaattttttaaaatttaattcgaatgattaaatttaaataaaaatatattttacggcttcagggaaattggacataatatcacaattaatttcttgaatatattcaatgtgtgctcgccaatacgctggcatttgtccaatcaaatatttcttttcaacaaaatcatcaaaaatgcttttatctaaaatcaatttaaaacaattaaagaactgttttatttaaatttcttgcttttttcgaatttaaatttaaatttttaccaagcttcagttgctccagcgtttttctccatttttccatgtatttaagcatatttttgcgttttccatctttgcttttccggttttcatttactgcagcgaaaattaccgtaattgctttggtctgagaatctttgttcaatttattccattcctctgacagtcgagcattggacaacagagtcctggccaaccaatttctgtataatatttcgccaaaaattttccaaccaaaattttcaaaatttcgcttataatctgtggaaaaattgctcaacatttcgtgcagttccatcttcaattgttcgtctttttcatttattatttgcttattttcaatttctgtccatttctcaacaagaaaattcgtttttgaatgccaaaattggatggcaatattggcaaaatgtctctgtgccaaaaagcggtgccaaatttcgttcgaataaatgctcagttcaaacaaatatcgttgcttctcattgctgaactcatttggattggtcagaagcatttgataatgatcaagaagaaaagcatcctctttaacatcttaattatggaaaaaagaaaatatgcattagttctctgttttctgtattcatttttaatcactattttggcgaaatgtctgaaaaaagtaggaaacactctaaaaataaatttaaatgcttttttggacaaaatctgttaagaaactatcaaaaacttcaaaattttccggcggcgcccataggcaccgcccgacccctcttctgttcctaagtatccccataaaatagtgatgagaaaaacaacataaaagtcttcgagttttgtggattgatccaattagcaaatttaaccacaggtaaaagtaaattatttctgttcggttttccttacaattattaatctaatttttatttatatttaaaattggcaataccggcaattttgtatattttcacactttttgatgcgtcattttttgcctcaataacgcctgttttattgcttgaatttttactctttgtccttcg

SEQ ID NO: 24896 - DNA, 1137 bp, Heterodera glycines
  unsure (1)..(1137): unsure at all n locations
caaaaaaatcgattttttcaagtgtcgttgggggtactcaacaattatgggagcaaaatccaacgcagaattaagtacaggctatagaaagctactccgaaggattcggtctccccataatctgggcgcatcggtcggggggactgcccgaaaacaaaaaaatcgatttttcaagtgtccgttggggtactcaaacaattatggggagcaaaatccaacgcagaattaaagtacaggctatagggaagctactcccgaaggattcggtctccccataaatctgggcgcatcggttcggggggactgccccgaaaacaaaaaaatcgattttttcaagtgtccgtttggggtactcaaacaattatggggagcaaaaatccaacgcagaattaaagtacaggctatagggaagctattcccgaaggattcggtctccccataaatctgggcgcatcggttcggggggactgccccgaaaacaaaaaaatcgattttttcaagtgtccgtttggggtactcaaacaattatggggagcaaaaatccaacgcagaattaaagtacaggctatagggaagctattccggaaggattcggtctccccataaatctgggcgcatcggttcagggggactgccccgaaaacccaaaaaaaaattttttggataaaaattatttaaatgaactgactagataatatttaaaataggttatttctcttcctttcagtatccctgcaaagtttggtgcgcttctgatcagtttctgaaaaaaaagttaagcctaaactttttggcctgtttaaaaaggaattaaaaatttttaaaaattttattcatctccctttttgatagaaaaagcatcagagtgcctaaactaacatgtaaataaaatttggtgcgtttcagaaccctttctgaaaaaatatttaagaattaattttgcaaaaaataaataaaaacgaaagactcagattttcgaaaatttttttgagccagctagctcggcgctcatttcagtgtaagttagtcctttaccggggagtatccctgcaaagtttggtacgcttctgctcaattagcaaaaaatatgcgttaaaagggttcatctnnngnatgtcggtagggaatggcaaacat

SEQ ID NO: 24897 - DNA, 1203 bp, Heterodera glycines
attttgcgattatttttctgcggaatgcctccatatgaaattactttcttctttcgtccattgactaaggtttttctcttaataatttttcaaatttattataactttcagccatctttggtcgaagcaataaaaaggcaggcgactcttttgatggataaaggcgcagtgattacgaaattggaaagcctcggctaccgcgacttgccctattcgcgattggacagattcgcgaagaaaaacgtccattatgcaaagttagtcgattgattgtgatatttgctgaacattttggatgctttcgtctttgaaacttaaaaataacaaattctcaaaaatgcaattgtattcaagatttgatggctaaatttcactttttgtttctcattttttacactgtttttagctccattctgatgaattcgtcgatgtcagtgaaaacaatgaatgatgcgagaacattgttttcgaatgacaaagaattggtcggtttattgtgaataaatgaaaattagaaaatgttgggaaaatgatttgatcgaaatgcattctgaaattaccggcttttcgtcttgccaaattttcgtttattttacccgaagtgccatcgatttgccaatcttcggactatttatattctccccaacttcagctttggtttggcatcgtcaacacaaatagtttgcctgatacgcccgacaaatgcgacttggagcagtttctgcaaccgcccgcatatcggcagtcagtggaggaattgcgcaagaatcagaaattgccattctttacgagtttcaaaatttacaagaggacagaaactgaataccacaatatacccaagtcgtacttcgtggcaccacacaaacgttgaacggacgactgaacgcggaaaacgcctcgtttttggagaatcgctttgttcgatttgtttttgatcatttcaagatgactgtattttatttaaaaatattctttgggaatgcttgtttttgaacttttccatctttttgcacctcaattacttacaattagaaataatgaattttaaaggtttattttatcaaatcacagctatattcgctaacaattggattataacttgaattatattgaaattggaagtgaaaaatacataaaaattgataccattaatggttaatcgcagtttttggtaaagcgttaattaacatgacaaaaccaaaa

SEQ ID NO: 24898 - DNA, 2300 bp, Heterodera glycines
tgttctttggtcagattgttttgttgttttcttactcctttgtgcctttcccactctaccgtattccctgcttgatgtgtcatcttttggttccttcgtccatttgtccgtctcgaccaacaaattacgccattcaaacatcgttagcctctttccctatgaaaaaggcgtcaattgttgttgcgacttttgcttttccccctcccccgtcgttcttcaatctttctttccattgtaacttttgtgccctcctgcgaaagaggcgataaaagcattctgcctcgggcaataaaatttggcaattccacagggacacgacggcattttccttttttggccattgtttcccccgccccggccgttcattagcctttctttttttattcccgcaacacacaatgggcttcatttcctgttccaagacaggaattgcttcacccccccccccttcgtccttttgctaatgcttttcctttctttacgcttttcctcccccccccctttttcggcgtcttttcttgccaaatttgctgtcaatttgtccgcggggtttcccctcccctcccccttattccctcaaatctcccttaccccccccctcccctaaagcgaggccgaaagggaacaccggcacggccgtgccgtgccgttccccgactttgcccacccaccgctgtcacccctccaacagagggcagcagattgccaattttgagattgcatttacatgccccgtgggcacaaagacgaatggcagacgatggcatgacggggtgagaactgacaattcagtctctctccagttgagtcccggtcgattttcatcaaaactactcaaaaagggattgttaagcataggtaaacttcaaagatcttaggataagttcaatgaattcttaggcaattaattagggatttctccccgatcgtcggagacagaaaggtgggggggggaattaattacacatggagactggatgaagacatgccattttccaaatctttggcacttttgtaacatttgaactcagtcgtatgggactcattttagcggtgccaaatggaggggggagggcgaggggcgggacccacgcgtttcggcgctggcgtttcggcgctggtgtttcggcgccagctcgtttttccacttaagcttttttctttggcatccaaatccaacaatcttggtatcattcgaaagctcttatcatgctctattagccttacaaaaagcggatagattttcaagcctgtaaaaaactattaaaaaaaaacttcaaaaatttcgacttttcgaaattttcatgtataacttttttagtaattgtctaatcgcgaagcaatcgcttagaaaaatcttctaaacatgttaagctttcgaatgatatcaataatgttggatttggattagatagaaaaaagttatagccaaaaacatgctggcgccgaaacgcagtggacccttccaccgctggtattcttaccaaggaataatttttagagaattttaaaccatttaatactttcatagataattttattgaaattagccaatatttttaaaaattatgtctcagtgacgaactgaacggtgacgaaacgatcagtgacgaaatgatagggaaccattataattaggcaaaataaaagaaatacagtaacgtgaaaaattaaataaagttaaagattgctgtggacaaatggttcaggaacacaagataaaatttttaagagagaaattgcattcactttgatatgagttaagaggataattaatatttaaatataagagaagcaaagaatttcaaacaattaattgtcgtgtacaagaatgtcagaattaacaaataaaaaatttgaaataatctcatttgtatgcagaaattaactgaaaacaaattcattcctatatatgaacagagaaaatacgtaagaccgtttttagcaaaattaaaaaagaaagaaaaagacattaaacaacaacatatatttaaaaatataaataaaaaatagaaaaaataaatgcaaaaataaaattttttttaataaactaaatatttatgctaatttatgaataataaacaagattatttaaatgccatatggagggaaagtacaagatattttttgctatataatatttttaaatttatacatgtatgaaaaataaaatgtaaaacaataacatgtattttaaaattcttaaattattaaaatatccaaaatgcaataattttctattatttttgcaataaaaaaatattatatatttttaaattgatactaagaaattgcagcat

SEQ ID NO: 24899 - DNA, 2590 bp, Heterodera glycines
tctcttttgcttggactttttttggaaggtccaaaaatggcatttgacttagtttcgtttttgatgtttccgaaatgcaaggctctaaatttgaaaatttgaattttctacaaataaaattggacttgtgtatgttttttataatttcttttctcatgggactctcaaatgaagaggtacaatcggtttttttttcatagactggtcaattctcacaattttcacagttttatctatgctttaaaaaattatttaaaatttgttcaagagtaaccaaatttttaattcttggtgacctctgttagcctgtaaactttcaaaaaatttcatcaactttaaaaagttattgccaaagtaactcaacaaaccaaattttttttggataactttttgggaacataacgatatttttgaaatttgacaggataatagagaacatttagggctatcgaatgatttcaagaattaatttggctgcttttagcaaagttataatttataagtaaaattttatttggatgattttttgagtatttactccaatttcgctgggtttttgatttattttaaattttatcgtatttcaaaccagggttggcatttctccaagctcgatttattttatttctaaagataatttgtcaaaattcttacaatttattctgaaataaaatttcaatttttcttcatttttttgggcgccaaagcggcaatgccgctaaaacggcattctcaaaagacattaccaccattctgcgtgctattgctatgtcaaatgacagattcctgtgcaacaatttgaatattttataatttttttcttcgtatattctcccaggctcgctcattgcttaatccaatttttccaattaatcctccgcccatttatcccctcttttcatcttcacaatggcacacatctatatccccaacccgcgactgactcgttggcatcttcctgtgccattcccttccttgcctatttatttattttccaatccgccacaactcgagctttttccggcaatgcccccactccaacccctctcctgggggatttccaccaccaacaacccacccaatccactcaatatattttcctcatccgtcagcgcaaaacaatgccacaagaatgactttagccaaagttaggcggcgctggccgattggtttttgggcccattatatttttgctcgttggtcacaaagaccaaaggtatggcacagttttttttggccattttactgaatttatatacatagatagatagatatatgtgtgagttttgattattttagttgttcatttattttattatttactttttcgtaatattaaacattatattttgattttaattcctaaattaaaaaattaaatcacatttatacttattttgatttaaatgtttttttttatttcaaatcattggtgagtgctcatttgcgcctccacatttgcgcctccacatttgcgcctactacatttgcgcctccacagttgcgcctccatatttatataaaataatttaaatactcaaaaatatttgctataatacatttagttggacaaaccacaatacatttatttttttatattttctttgtttttgtattattttcttgttttttttattttcttgttttttattatttcttgtttttttaaaaagatgctcaatcgagccaatgatcaattccttttgtggtaagtcgaaatgacagtgcgtgtaaatgtgtaatccatctttgatcatcacgctgatcaggaccaaactgatcaaattgttcaatcagatttttgatggctcgatcattttccaaatattttttggtgcggggtatttcagctgctggacgtgtctggtcaatttcatgtggtctcattttatttctttggtattcctcttcatctttgatttttaatatgaaacttaaatttgaattttaaaaattgtcaagtaattattaatttacgttgataaggggggtttaggtgctgaaaagcgtttgttgaagcttgaatgaaagccttccattccattattggttcttccaagatctgcagttaccgaatcatgcatgttccaagtttcaggaataaaataagctggtcttcggtttccgtcgtcatcaaggcgaaaaagataggttcttaaaaatttcaaagcattatggtcgaaaaaccaatgaaatttgcattaatagtaagtttattttaaaataaaaaagatcatatttaatcaaaaagcaaaaacgatggcgacacgaaaagtgaaaaattcgaaggcggatcttggccttctgatgctttatgccgtcaaaggagacggaaaacaagagttatttggatgtgcataatgattttttgataaaatcactcccgttagcccttgggcaaggcaatttttacacatttacacgctctgtcattttgacataccacaaaaggaattgatcattggctcgattgagcatctttttaaaaaaacaagaaataataaaaaacaagaaaataaaaaaaacaagaaaataatacaaaaacaaagaaaatataaaaaaataaatgtattgtggttgtccaactaaa

SEQ ID NO: 24900 - DNA, 1169 bp, Heterodera glycines
gcctttccgttaccttggtcgtgctctccctcggcttcttccgctttttcttagtctccctgggattcttccgctttttgttggtctccctcggacttcttccgctttttgttggtctccctcggtttcttccgctttttgttcgtctccctcggattcttccgctttttattagtctccctcggcttcttccgctttttcttcgtctccctcggattattcagctttttcttagtctccctgggcttattacgctttttgttagtctccctaggcttcttccgctttttcttagtctccctcggcttcttccgctttttcttcgtctccctcggcttcttccgctttttcttcgtctccctcggcttcgttccgctttttcatcgtcttcctcggctttttccgctttttcttcgtctccctcggctttttctgccttttattcgtctccctcggcttcttccgctttttcttcgtccccatccgcttcatctgatctcgactgcttttcctcgccatttttgggccaaattcgctgtcactgggcacattgttcccgcctcttcgcctcgcccggtccccttcttgaccacatccattccgaccaccttgtcaatttgcaccttagcaaagctcaacggcaattcgtctgtctgtggaagggctgcgaaagggacggacggcccttccccgctatttatatgcttgttcaacaccttcgggtacacaccggcgagaagccatacaaatgcgaggcaaatttaaaagtttgaaatgtttcctaaaaatcgtgggacgaacaattaaaagaatagaggggaatagttggattggtcgaacattctttctgatcattctaatgtccgatcattcccttattgatcactctattttcttccgatcattcctttctctgatcattctaatgtccaatcattcccttattgatcactctattttcttccgatcattcctttctctgatcactctaatgtccgatcattcccttctctgatcactctaatgtccgatcattcccttatttgatcactctaatgtccgatcattcccttctctgatcactctaatgtccgatcattcccttatttgatcactctaatgtccgatcattcctttctctgatcactctaatgtccgatcattccctt

SEQ ID NO: 24901 - DNA, 1070 bp, Heterodera glycines
tatctcacttgacagacttagttgcacccccccccccccccattggctgtagcatgctaaactcacgaggtacagtaacttgatgaccaggtacagcatgctaacataggagcccagggtacggccaaaacgcatgcaaaaaacttaagagaaaaaaaaaagcatatcaatgttttattaacatatttatttgagtaaattatggtgttttaacatcctacagtaaacatacagtaacggggcgtacggcgcacctcgtgcaactcgagcgtctcgttcaggtactgcaccagtttgcccatctcttgcgaccgcttgtcagagtgcatgctgcgcagtgctcgcgcgtccgaaattgccgtctccaagtcgacgccttaaaaaaattaaatttaatttaaaaaaatatataccgtaattagaggaaatacagaataaataaatacataattttatttattaccgctctgctggtgaagcgttttccaaatccaattcggcagataaaacatcactgcctgcagtgccaaaacaattggcacccactaaactttaatacatttaaaaagggaaaataaattcaaaaattattttttttacaaattttggttttcattaaaaaaattcttttttttacgaaagaaattacaaaaaaaaataatggtgattagcctaaataaaatttttgtcgtatattttaaaagccctcttaataaaaaataattagtttaattattcaattaatgaactatttaattaattaattaagtatttatttaaattaattcatttattatttaatttttatttttattaattagctaaataattttaattaattcatccatgactcatttttaattactcaattaattaactaattgtacctggtagtaaccaaattggcgctcatcacgttcattaatttcggcaggaatttcttcttctggcgccacataataagtgttttggatgaaacaataatcttcagcatattgttcccaaccgcctttgaattccatgggcatctgaaaatttactaaatattttattttcaaaaaataaatttt

SEQ ID NO: 24902 - DNA, 1654 bp, Heterodera glycines
atatatatctttttatattagttgttttttcccaaacaaaaaaaaattctaaaaatctaaagcaaattttctgaataatttttaattaaataatatattttttattgttaatagttttgttcggcaaaatacttttcttaatgttaatttaattattaaaaataatatctaattaattacaaattttaaaatgaactttctaaatattattttttaaatttatatatatatatatttttttttaacaattaaccaatttggaatgaagttttttcaaccaaacaggttcacattgacctagtgggcacaaatccgatgaaattggacccaaacattggcatcaattttgagctggacgaacaacagcagcagcagcagcattctgtgaacgatcatcggaaacgaggaggaggaggaggagacaaaaacggaccagcaacacaacaacagcaacaacatttttatgcaagagaaatgcgctttctgaacggtgattcgacctctgatctgctctgatctgattttttcatgaaaaattgtgttaaattttttcttgttaaaagaatatatacacaaatttcttaaatatattttcggttaaagtttgaaattttgcaattttttaagacaaatgaatgtcctttttcaaggacgccaagaaagttagtgcatgcatgggctttcatgcgacagaaaatggaagttccttttaagggcaaagatttatttccaaattttatgtacaattttaaggtaggtacttgaacttgaaaatgaattctccaattttgaaatgtacttaaattttttttttgttttatttagaatttttaataaatttctgtctctcatcaccttctgctgtgctcttttcatccatctttggagttgcagcatcaatcacaatgtccggcaatgaaatgtgccgttttgcatgggcactcttttcatttttgtgatcacaagtgatcaggatgatgtcatacgccgtgtttattcttgatctcggctttgctccgtgttcgttgaaatcctataaaaatttatttaatattatagtatttgaaaagatgcctttttgtagatactgtattgattacagcactaattagccaaatacaggcgtttaaaattaattattgtatttattacagcactaattagccaattactctgtacctgttgtagcacaacactttggtagttgcttattcggctcattgccccacttgcactgttccgtccatccaacagtgccgtttccgtgtcaatgcgtggcctcagccggtgccgttgtcgtcctgctgacgtttttcggcgtatgcttgtccgaacactgcgcatcagacgacggattgagcgtcgggtacgtccgccacgccaaaagccccaaaattcgcctaaaaaattttaaaaaacccctatgttcatctgcctcgggtataaatctcagaaacaatgctttttataccgctctaaaatttaaataataaataaaattcattcatccaatttattatttttgacagatttttggcaccaaattaatcccagtgttataaagctaatcaccccttttgcccttcttgtattccgcttgcacattcagcaggcacacaaacgttacaacaatggcaatgatcagataacagtg

SEQ ID NO: 24903 - DNA, 1974 bp, Heterodera glycines
  unsure (1)..(1974): unsure at all n locations
atagcttaaantagattaaaaaaattacagaaacaaataaattttatagctaataagtaatttttaaaagttagttgtgcattaaaaataacaataataaaaaaaatatctttctaaaatacaattgaacattttaaaaccccattaatttattttaaataagattaaaacataaacctttagtccaattttataacatcaaatttaaaaaaaagaaaccaaaaaatctaggagattacaaaaataatttaaaacctaaaaaaatatttttaatttatcgaaataaaaataaaaattaaatttgtatgtcaaaattattgcacagaaataagttacctgacagattataacctaaaatatatactttaaaatttaattcaagaaggacacgtaaagaattactataagtattataaaagatgaatgaacatttagaaaaacaatacattatttttaaattaataattttattaaaacgaaaggaaaaatatttataagaaattactacggcgaccgtcagactgaacaaaaatctgaaatggtagacatgattataaataaaaatatataactttaaaaccattaatccaataaatatacgtgcaaacaaataaaaattggataattaaaatacaatcaacataagttaaaggaaatttgaatttaaaaaatagaaaaataattgcgagaggaaataataaatttattaaataatttattataaaacagaattaaaatattttgaaaaggatctttttcttaagataatagttaattatgactcatggacaatggataaaatatttgtacaaatttagtctaattatttttacatttcatcaggttcgaaaccaggagatttaaaagatcaaagtaaaataataaatataaaatgtttagtaaactaaaaaagtagttttgaaatttcattttaatttttaaaaattaaaaaaatatttttatttatcataaagtgaataaatataaaaatcattagtaatagtaataaaaactagaaaataaataactttactaaaaatattgactacggcttgtattcaacttattatcgatccccacttattagccacttttgaataccgttaaaaatggcattataagagagaaagcaataaattactttaatttataattaaaatttaattttttgttgttagtaaattttcggtgaaaataatttgagattttataaaattgaacaaaaaatcacaaaattcggccaataatgaaagaacaattattcatatcaaaggagaataatttgttaaaaattgaaaatacttatttaattcaaatgcccgattatgagaatttaaaatagaaaataataaaatgattaaaatatctatttgaaaatgattgtatatattcacaaagattatacggcgaaagaatagttccatttgaaattaaaaataaaatttttcctaaaaatgaatggaatttggccttgtcagtacattttccaatttcaataaacatttcaaactcgttcgttgagcaaataaaagtgtgtcaaaattattgtaaccaacaactataaaacataaaaaaaataaagatttatttggaaaaaatattaatttaaataaattgtataatgcatttgaaataatatattagtaaaatattattaatacaaaaaataaaaattttattaaaaaaattacctaaaaattgcaaaatatatacaattccagcataatagaatcataaataaggaacattaattttacaaatgaaattctaaaaaaatgaattacttaattatatatgctctgatcagttatctaaattagtcaattatagaaacaaataagtataattttattaaaaaatcgtttaatatttttaattttataaaataattcataagcatctattaattaatttgtccaattcatttgaacattattaaacttaaaaaataatttaatattcacantatattaa

SEQ ID NO: 24904 - DNA, 904 bp, Heterodera glycines
ggaagaaggatgagaggaagagaaaaaggaagaaagagaagaggaagagaaaaaggaagaaagagaagaggaagagaaataggaagaaagagaagaggaagagaaaaaggaagaaagagaagaggaagagaaaaaggaagaaagagaagaggaagagaaataggaagaaggaggagaggaagagaaaaaggaagaaagagaagaggaagagaaaaaggaagaaagagaagaggaagagaaaaaggaagaaagagaagaggaagagaaaaaggaagaaagagaagaggaagagaaataggaagaaggatgagaggaagagaaaaaggaagaaggaggagaggaagagaaaaaggaagaaagagaagaggaagagaaaaaggaaagtggttgattaattagtgacaaagggtgaggattattttttcaaaaagacaattttaataattttgcataagaaacataatgcttattaaataaaaaaaatttaaatttctacggctgtgtcgaaaaaattaaataaatcgctaatataaataacaaaataaaaaaatcagctgtgcaaattaaattttaactctccaattttcttttcccctgagtttgaaacctgaaaaaaactctctaaattaattttatttattaattttttctcaaaatttgctttaggtatattatttccccgccttccctctcccctccttctccccgcccttcctctctctctcccgctcccccctcactctctctccctcccctgcccctcttcctctcccctccttctccccgcccttcctctctctctcccgctcccccctcactctctcaagctcccctgcccctcttcctctcccctccttcgccctcacggtcccaaagaggaagtcattaatgtgattaaatgata

SEQ ID NO: 24905 - DNA, 1222 bp, Heterodera glycines
cacgacaaatatttcaacaaaaatttttaaaaattgactagagcaatcgaacgctaacggacgacctaatggaaaaaaatccccgaaggagagaatttaattaaatccattccttcgggggaccgtgccgggtgccgcggggtaagcagtgctggttcgtttcatcacggcaccgaaccttttggctagtcagcaatcgttgcttaacttgccagatcggacgggtgcgcatgattccactgttccaagcaccccaccaaaagcaaaacgatataaccaaaatataaggaaaaattttttctccatcttcctttttgatactaaagcatcagaatgctaaaattaagttgtaaataaaattttggtgcactttagagcactttctgaaaaaaatatttatgaaacaaaaaaatcgattttttcaagtgtccgtttggggtactcaaacatttatggggagcaaaaatccaacgcagaattaaagtacaggctatagggaagctattcccgagggattcggtctccccataaatctgggcgcatcggttcggggggactgccccgaaaacaaaaaaatcgattttttcaagtgtccgtttggggtactcaaacaattatggggagcaaaaatccaacgcagaattaaagtacaggctatagggaagctattcccgaaggattcggtctccccataaatctgggcgcatcggttcggggggactgccccgaaaacaaaaataaatcgattttttcaagtgtccgtttggggtactcaaacaattatggggagcaaaaatccaacgcagaattaaagtacaggctatagtgaagctattccggaaggattcggtctccccataaatctgggcgcatcggttcagggggactgccccgaaaacccaaaaaaaaattttttggataaaaattatttaaatgaactgactagataatatttaaaataggttatttctcttcctttcagtatccctgcaaagtttggtgcgcttctgatcagtttctgaaaaaaaagttaagcctaaactttttggcctgtttaaaaaggaattaaaaatttttaaaaattttattcatctccctttttgatagaaaaagcatcagagtgcctaaactaacatgtaaataaaatttggtgcgtttcagaaccctttctgaaaaaatatttaagaattaattttgcaaaaaataaataaaaacgaaagac

SEQ ID NO: 24906 - DNA, 2024 bp, Heterodera glycines
tcaaaaaaatggtttgaaaaaattaattatttgcttagaagcatctaaaaatatctaataaataataataatgtgtttttaaatttatttaatctgtttttgaaaacttgaaaaaacatcggtcacttgaaaaaataacttctaaaattttgtccaggaaaatccaggtttttcgtgttttgcctggacctggacctggattttttttcacatttgacctggacctggatttcctggacaaaaatccaggaaaatccaggtccaggaaaaatccaggttgtcaaaaaatgacctggacctggacctggatccaggaaaaatccaggcctggatccaggtccaggtcgaactctaatatttatccatcaacatcttaaaagaaaagtcaaaataaaaagtaaagggaattaattcacttctcttgggaaaatgcgcaacagctgccaaccaatgtcgaagtgagtcgaacaccgtccgattctcataattccctaaagtcgaactccttggataactaaatgcattttaaagagttggttgaccttgtgaaatgaaattcttttcaaatttcgtgcaaatcatccgacgacagtgcctcctctccaaccaccgctttcattgcctgcacgtctgcccctttgtgtcagatttccaaaaaaatgaatttttttttatttaccaaaagcgctgctaaaaaattgttttttggaatttaaaaaaaaaaattttcgtccgggtccggttgcgccgactcttcatgaacgccttctcggccctaccaatggcaaacgtatttctgtgacttactctcttttccatttttcgttatttcagcatttatcgtctgaacttacgcacttgtcggggcttcagtttttggcattggaatgttgtgctactacggacttaccacgactgtcgacagcgctgctgttcgttctaagtacgtttttcttggcttatgcgaggatttgttctttaattcacttaaatttcgccgacacattcaaatcgctcctaacaatcctttttatcctgttttttagtttatggcctgattatgttcgtcagagacttcagtcgacctacgcttatttggctggtagccttgccttgactgcggctgttggagtggctgctgcccgtagtcctggaattttggctcttaccagcgctccatcacttctggttagtcatcggagacgaccctgggatttggcgcggcggtaccgttcccagacgacacttttttgcctttccgccagccaaaaaaattttccgttcaaacaaattttacgataaacgggtgttgtcattgccagaaggcgccgctggattaaaatgaaatttgcttatattctaattgctttttaggtttggtttggttctctcgctgctattattggttctggcttggttggctcattgtggcatttttggtgcggttttggctcccctttgttttgttagtggacccgctcttatgcgagccgcttggtatacggctggacttgttggaggtgcagcttttatattttctgaattatttgttaaatataacaggcctatccgccactgcgatctttgctccatctgacaaatttttgaacatggctggccctttggcgatgggtttgggcgttgtcttcgttgcgagtcttggcacattcgcttttccaccaaacactgcgcttggcgtaagtaaaactaactaaattcaaatccaaatcatcgtttttgtttcttaaggtctcgcttcgatttttgtctatggtggacttattctttcttcggtgtttcttctccgtggcactcagcatgtggtcaaaatggccgaaggacagcatttttatagccgatttaggggttatcagatggaattggcttcagttcgtcactatgacccgatcaatgcgtaagtaaaaacagacatcactcatattctaatgtttaatctttccttaaagtcaactctcgatttacatggacattttaacatttacattcggatggcaatgattctc

SEQ ID NO: 24907 - DNA, 1169 bp, Heterodera glycines
tgtcgacgaaaccgtccttgtcaatgtcttcgacggtttcctgtacagaaatttttaagtattattaatgaatgggctccaatagcaattaaagatttattaataataaatcattttaaataattaggcaacaatactgggtaaatatgagaattagggtgaggtgaatttttcccgttccaagttaagacaagtgaaaaatatataaagtgaaaatcattgaaaaagggactttaataagcaataatctaatttgatttttttttaataaataaatttgctaatccacctgcaccacaatgtctctcatatggtcacagtcctccgggtgcatgaaacagccgtattccgtgcggtccattttaccgtccgaattgtagtcagccacctgtaaatcaatttttgagtttactgtatggaaagcatttaaaaatattaaaatttggccgttagcctctcgatttaatataaattagcaggtctttttggcctgcttctgaccttccatcgacgttcgtctcgctcaatcattttgacgtattccggtgaaatctcctggccctcctgcggttttccgtaaatcaaatttcttaatttttttagaattttccatccttctcgccctctgttagattttcttcacctgtagtcttgccaatcgagcaagccattcttcagctgctcctccttgtaatttttccatgtccgctcaacatcattgttctgtaaaaaaaactttattttatttttaaggattagtcagatataagaaaattaattgaaaaaatttaaaaataaaaaacgaaatttataagtgaaccgaagcatagaaaatcgatcaaatcacagcggaattcaaaatatttgtgagaatagccctaatctatatcaacaaattcaaaatttaatgacaaattttttggtcgaattattgagccaaaattataattttgccaaattttatattttcgcatatgaatttaaaatggtaaaccaacattgtattcctgtttttgggaattcttctccgaaattaaaattttcggtttttaatggtcgggtgagagaaatgccaattttggcgatttttacattgaagccgaaaagttttaaaattgtaagtatctgttaattaatgtggcagaattgcagatcgtgttggcaatatt

SEQ ID NO: 24908 - DNA, 1365 bp, Heterodera glycines
gaaaaatgaacaaatttagacgtttcatgacaaaaaaaaatttttttttggtgctttttcacccaccacgccgtccgtgtagaggcagtttctggcagcgacgtcgcaatggatgatgcccttcgagtggatgtggtccagtccgccagctgcgccgaggcacatgtagagtttgacccgcgcgctccgccgctgctgcttcaagtagttggtgaggctgccgtccgtcgccagctccatgacgatcatcaggggctcctggccaaccgcgacgccgtagaactggatgacattggggtgtcggagctgccgcatgactcgcgcctcattcatgaactccttgatctgaaaattaataatatgcggacgcagtcttccaacccaccccccttcctcacttgctctttggtgctcgtctgagacacctctttgatggccaccgccgctcgagtcccctgctgatccacgtagacgccactcttgacgatcccgaacgtgccgcggccaagttcattgcccaggatgattgaagtgtgcgacagctcccagtgcgcgcggggcacggccctgatgagagcgacgtattgttgctgaaaaaaagggaaaatgaaaaaaaaagattccaagctgtttgacttacggtggtgacggaaactccggtacgcagataattgtcgacgaatcgttcgattgttcggaagcccttgtcggagttgaggtccacggtgaacattcctttgtgtcggcggaagatgacgtggttcagcaagccgccgacgttcaccgacagtgcatacacacgctccgtgcccgaaatttcttctgtcatgcgcaccaggaagtccccatcgttcggcagcagctccactacgtcctcgcgcggcaactaaacaaagttgaaaagacattaaaatgtggaaagtggggggggggggggggtgggacggtgacggctcctcaccagtccgtggtagtagggcagtttccacatgtcaacgtccattgtgcttggagccggtgcgcacgcgtcggtggtgtaataaaattgaaatacgagaaataatgggagagggaagtgacaaaagagtgaaatcgcatcccttttatgtaaccacaaaacatctcaaaccaagcaattcgaaaaagtgattgtaaatgaaaaatttttttatataaaagcattctttttcctgaacgtccttcatttgggctcggtcggttattaaatgcctacattcttcgtatcgtcaaaatgcatctctctcattttggcctactatttcttttgactgttaatagacaaaaattgaatttaattcgtgacgtttatacctaactcgatatgtaaattagaatagagccaaa

SEQ ID NO: 24909 - DNA, 1874 bp, Heterodera glycines
tcgtccctgtccgcgtgcgccgaatatccgtcgctgttcaccgcctgtgtgctgctcgccgcctggctgtaccctgtggaacgacgaatgtatccggcgactgtgcaggtgtgtgaaaagcgattttttgcgacatccttttcaaaaaaagatttggttttaaaaaatttgatcaaattcaaaatttgtcttcttttgccctttcatcggctgggtgaaaatgcacgaccacacacacccaagggattcgaacacacgccaataaattttcgcaacaaaatattttttggcattttggggtcaacttttcaaaatggataagatgtaggtcccgccgccgggaaaaattttttggaaattttaatgcaatttgtttataaatttttttagatttttcaaaaaagatttgcacatttcttgaaattttttcatttccctccaccccatgggagccaaagcataacaatttgattttgccatttctttgtttgtgtttttaatttccttttttgccccacttttgttagcccgtgctgatgctcaacgccagcaaatggcaatgggcgcgcaatgtgcgacgaatgcagcgtattattaaaacattattaactagaattctgaagaaatttgtagaattacatttttatttgctttcaaatttgtcacttcttttgtttataaaattattattttaaatttttttttggaattttatatttttaaaatgtttattatttttattttttaaataattttattcgacagagtaaaatcaaatttataaaaaaatataaataaatctaaaaaaataaaataataattatttatatttttaaataaagttttaatttttttttaataatattgaaacagatatagaaaaaatggaaataaatttaaactgatgaaataattatacataaaaatttaaaaaagataattttttcatgggatttcaaatacactatttaatctatttatctttaattaatatgcagttaattaggtacaataattcataattttagttaattttaatgaatattcaattatattacttattttaataatataattaaatataaagggcgattaattttcgtttataaattgtgaattaatatttttagaataaattaaatttgttttaagtgaatcttttttaatgtcatattctcatgatccatgggctcgctggcggcgcgcggcgcttatccataaatgcattttttatttcttaaattcttgataattaaatgcaaattcataaaattgctttgtttaatgcgttctaaaagtttgaaaattcgtattttaatttttatgttttttattctttagcgaaaatgataaattaaatttttattctatatttttatgtattcgtgtaaaaattgctataaaaataaggtttttgaattcttttttcttaattaatttcgaaatataaaattttattaggtattaatatgttattttaaacaaaattattttatttttattatttctatgtttgttataattgtcaacgaatttctattttcttgttacaataaattaatagtatgtatggtcggtgatattttcatatgtattaataggtaaagtaattgaaatgtaaattatttttatttttaaaaattacaattataaagtgcagtcattattttttattaatatgatatgagtttcattttagcttattaaattttattttaaaagaatatataattggaattgagtatttatgaattaaattgtatttttttcatgctatcagacaattattttattgtatatctatcggtgtccttttgttaattaaaatattaaaagctttcattcattattattattattatatttcttatcaa

SEQ ID NO: 24910 - DNA, 72 bp, Heterodera glycines
ccgtattccaatttcaggctatcaatctcatgtgcctgagcgcgcacccctttcgccaccgcatgtttgacg

SEQ ID NO: 24911 - DNA, 1323 bp, Heterodera glycines
  unsure (1)..(1323): unsure at all n locations
agccgagtcncacgtcgggcacagcaatgccaatgtgacctttgaattggcaaaaacgtccaattttgagcggattggcactttctctcaccgaatccacgcggttccgagtttccgttgtgatagcccttgaagtccgtaccatgttcccaattgctgaaatgggtgagtaagtcaatcaaatatagctagtaagactgagtgagttcgatggtcgaatgggttgagagggcgaatttcttttgggccgcatcgtccgaagggatttcgtccaaatctttgtagcccatgaaaaagagcgagaattttccctcagggaagtccaattgcttgagcagcctaaaattcaaagaaaaaaataataataatcagacaatggatttgtatggtaataaaagtgaccgaccgcattccgagcacgttacagtagaagggaatggacacgcgtgggtctctgatacggtacatcgtttgttggaagtaaaagccatccgtggcttcgtccttctccttgaccagctttttgatctgtaaattgccaaacggcggacgttggtttcggttatttgtttgaacccacccagaaaacaaagttttcaaattaattttatgcagtccaacctcttcagccgggacggctccttcgttttgtgatgtcattgtcaaattgaaacaatctttctgaagcttaggtgaaggggaaatcatttagacaaaattatgaggacaattttcacacacttttttgatatgaaagccaaaaataaaatgccatcattttgagtacggaatccttttgagtttatacaaaataaaattcaaaaaatctgacatcaaaaaggtaatggacttcgtcgtcgtgttggccctgcgcttcacttttgcatcatcttcacgtactccgtgtacttcttgttcagtgcttcattcagctcctccctcctctgctgttcccacaattcctccgcttcctttctcatttgttcctccgttttcgtctccatttgcacttcttccgtcggtcttcgcatggccctttctgtttcaatgaattccctgaaaaacgaaaatgtttgttttttttctgtccataaaatttatcgttcccccgcttaattttctttttttttgcccccaattttctcacttataattcgtcagtgcattgttcttcaatgaaattatcggattcggacttttggtcgattgtgacgggaatagaatgtcagtgactttgccgatttggactaaaagaaaagggaattcgttttttaaattttaaaatgagactcaaatgggattacttgcaacccaagactcggg

SEQ ID NO: 24912 - DNA, 1962 bp, Heterodera glycines
  unsure (1)..(1962): unsure at all n locations
tttgtcatntcgtttagccctcccctctttctctccccttccttattccncaatttcttactcaaaatgcgatgcccccgaaaaaactatttcattgagtgggaaaaaatcgaccgactaaagtgtacagacaaacaaaaaaacatacttttggagtcaataccactttagcaaatatttctaatgcttaccgtccccgtccccgtcatccgactcctgctgcaggtcgtcgttgttttttccacgtccttctttcagtttttctgaaaattaaaatgattattattcaaaacaagaaggaaatttgtttaagcgaaagagtaattgggcaatatgtacctgatccaatttatccttactcgcttccaaatttgcagacataataaaatgattatatctaaagaggaatgaaagagatatatgtacaattggcgcttgctgcctattcaaatagagagatgcaagggtgaactgtagtgaacgccccgtgaaaaaaagagtcaaatgatataccgatcgattcgtctcaaggagctaagcatggaaaaatatgtcgcgagttgtggaaattcaaaaaaaccggtttttgaaccggttcaaagctcgaaaaattgagagatttcgcactataactttttttcaaacgatcgaatcctgacaaatttggtaccatttgaaagctcttgacgagcttaatctaaaaatcagggaatgaagtcgaaccgcgccatctaaaaaccgacaagtataaatcggtttttgaaccgattcaaatcttatagtgccaattcagtaccaaacgtaatttataattgttttaattggcgccgtagggaaactggtgcaaataggtcattttggttattgcgctaaaaaaccgccgcacactcgactacggcggccagtattcctccgccctccgtctcgccccactacttgcttgaaattttatttagaaaaattttttttaaattacagctcgagattcccaatcgctttttttatttctcgtttacggaatttttacacggactttatttgtaaggtaaaatttgcaaacgttaatcaaataattgacaaaaacggatgatactgtggattgtgtgggtttgtttattcattggccaattttcgttttgtccctttttctttctccacagtaaaatcaatggccaaagtcactttgtcctcattttggtcgtaaaatcctttgctcgagtccattaatttcttaattttgacaatttcatttggtgtttggtaaaatagaacaagttttttggcatcgttaggaatgggtctcaccaattatcgctttcctttattacatatattttggttttttatttttaattaaaattataataaaggaaaatatggattggatgactcattcttagcgatggacattttttttaaattgccactcaccgcaaaagtgatgaaatatgggaatccccagctgttcgatttgttgttaaaagaatggtggtcaatttgtccagtcaaatcctccgttccgctcttttgcggaacaattcgaagggttgccgaacatttgcaactccaattttttccttattaattgaataaaaagtttttaaattaattaacattttaaatcactttcttttggggcggtgcacaaaatgacaaagtccaaacatttttcggtgcttccctttttcgtatttatttgtgcccaaattttcaattggactccttttatttgcacatcatcactgaatcggccacttcccacttcccctcgagcaaattccgataatttctcaatttccaacgcgagtgttcctccgttttcccgaggaatgttccagtcggaaatgcgtccatttgaggcaaatttcagcggtttgagcccgggcactccacggagattgggatgacaatagaactgataaatgccgaacatttcttcggtggtcaaaacaccgcaaggaa

SEQ ID NO: 24913 - DNA, 1556 bp, Heterodera glycines
ctcctaccaggaccacaaaccaaaacaaattgataaaaatactggggcccaaaagatttaaaaagtttaatatttactcgaaaatttaaaattgataatttctaaaacagaaacatatggaaatttggttttaaatctatgtattaatataatcatttaaatcattttagtcttaggtaactttaaacagaatggtggcagaatgcccgaatggtgagacgttaaattattttacagtgaattattactagggcatgtatttttgttaaaaacatgaaaaagatgcttaaatagttgctaaaaactgccaaaatatttgctaaaaattatcaaaatagctgctaaaaactgcaaatagttgcaaaaaaactgttgccaaaatagttaaaaattgccaaaaaaatttaaaacattccaaattaaaaatgcatgattttagtctttcaaaagaatttaaattttatgattattcataaagaatcctaaattgtttaagaaaccactttaaaaatttaaattaatttctacctaaaatttaactgaagaagccaatataaaaaaggcattcgtccagtatcttattattcgacacacacattttctccgttgaatgaatatgaattaatgagcaaaaataaaagcaaataactgaccactccttctcagcgccctgtctcccccggaggtcagaccaaaccaacgccaagtggagaccacccccacctcctcgccccgcgggcaaccgaaaaaaaatgctgatgttcgatgtactttagtaccccagagtagttagtccccagctatcgtcgtcatgattgattgctttttggtgacagctgccctttgaggcgtgccgccgcgcgcgggtttaccgcgcgaacccgtgcctgtggcacgggttcggggggtgggagggggtgcgagtgaggcggcgcgcggttttaacagcatcatcttttgctaatggagaaggggggcgctgaccaatgccattgacatattgattcgatactccaaataaattgggctcattttagcataattataccattaaatttataatggaattgttttatttatttattatttatttattttttgttagatagtacagtattactttcatggcaccacgacgcaaaagaaaggcggctcaattggtcgggcaggacgaagcggtggtgaacggaccgagcgcacaggtgaattgtgttcaccatcaaattttcacatttaaatttcatatgctttttattttcacagttgccaacgaatgacggacaacaattggcgtcagcagcaccagtgacaaacaatggcaccgtccaacaagcggagaacgacggaactgatgcggtggcggcagcagcagcaattgatggcaccggcggacaagtacaatttttgtattttcgttagctaagggcgggcgcttttggtttaaaaattcaccggatggtatatgaatattttatgacatctaaattgaaaaaaaacttgttaatttggaaaaaatttgggccaagtgttgtttaataaattctctattatattta

SEQ ID NO: 24914 - DNA, 1119 bp, Heterodera glycines
tcagattttcgaaaaatttttttgagccagctagctcggcgctcatttcagtgtaagttagtcctttaccggggagtatccctgcaaagtttggtacgcttctgctcaattagcaaaaaatatgagtgatcgaattttcactaaaaaagttaagcctacattttttggcatatttaaaaagcaattaaaaaattttaaaatttaataattttcctgcaccgaaggtactcactcggcctcttcgcggcctcgtggtgggccttcgcccccccccccctcccacgcccttcagagcacgacaaatatttcaacaaaaattttgaaaaattgactagagcaatcgaacgctaacggacgacctaatggaaaaaaatccccgaaggagagaatttaattaaatccattccttcgggggaccgtgccgggtgccgcggggtaagcagtgctggttcgtttcatcacggcaccgaaccttttggctagtcagcaatcgttgcttaacttgccagatcggacgggtgcgcatgactttctgaaaaaaatatttatgaaacaaaaaaatcgattttttcaagtgtccgtttggggtactcaaacatttatggggagcaaaaatccaacgcagaattaaagtacaggctatagggaagctattcccgaaggattcggtctccccataaatctgggcgcatcggttcagggggactgccccgaaaacccaaaaaaaaattttttggataaaaattatttaaatgaactgactagataatatttaaaataggttatttctcttcctttcagtatccctgcaaagtttggtgcgcttctgatcagtttctgaaaaaaaagttaagcctaaactttttggcctgtttaaaaaggaattaaaaatttttaaaaattttattcatctccctttttgatagaaaaagcatcagagtgcctaaactaacatgtaaataaaatttggtgcgtttcagaaccctttctgaaaaaatatttaagaattaattttgcaaaaaataaataaaaacgaaagactcagattttcgaaaatttttttgagccagctagctcgacgctcatttcagtgtaagttagtcctttaccggggagtat

SEQ ID NO: 24915 - DNA, 1777 bp, Heterodera glycines
  unsure (1)..(1777): unsure at all n locations
gtttataatatcatttgaaattttcattttcatttctttttattataaataattgtaaaattgaagaaagaaaaaattacagatcacatattttattattgaagaaaaaatggatggatctggtaagaaatatttcattaataattttatttattatattttaaaataaaaataacaatgtttagacacttaatagagaccgtcacgattggtattttaaacgatctttctttcttttttgatcgctttttcggagctttgcttttatccaacaaaaagattgaattacttgtctgatctttaaaatgtttggtgctttgctttttgagaataaatgaatttttcgcctttttgggttttgagagaatatttttaccatatttggaaattttataataaaaatacaataaaacatcataagaataaaaaaaaatcgagaagtttgtttcgtggaggatttcttggaaaatttttcaaacttttttgtatttggaattgggcactattaatataattttaattataattaattaattattttattttaagaatacaaaatggatctttttatattattttttttatttttagatttcattcgctccgttttcaccgtttccgcttcagtttcatttgtgcttggcattctgttcaacacatttatggcatggatgatcatcaaaaagaccccggcaccaatgcttatctactcaaaaatactgatggcaccgtgtataattgtaaatgtttagctttatcactcatttacatttatattaaaaaaacaatttttaatttaaattatcaaatttaatttaatacattttcaggacattttcttgtccctttgcgcatttattgtccaaccaattccagtaaaatttgtaaaataaaattacaattttattaaaaactaggtatttgattcgctaaacttattataatatccatcccaaggttgtctcgcatggttattttgctgtcgtgcagaatggctttttccgcaacgcttccggcttttacaattatacggtaatttataattaattaaaaaaaacagtataaaaaacaattattaaacttttaaggcaaatgtgctgtggttccaaatgcttattctgtttgtgtgttgtacaacaattcaattcgtgtttcgctactatttgctgatttggtcctaataattttaaattaataaaatatttaaaaatgattaagtaatttttattggggatcatttttcggtaaccattaggctgtatgccatttgggattgacaaatgtgatccatgaccagtgatttctttttccgattccatttccgggtacaaagcacgttgaaattattttttccaatattattttggtattaatttttcattttatataaataaatttcaaatatttttttaaatttaattccttcattattcttcagcgatggccaagtgccggcccggctcaaatacttgaccagtttgatcatcgtctttctgctgattgcccatgtgctgctccattatctgtccgactttccgtatgccaaatataacgatgaaatgcgcaatttgtcctcgttgatcaccgccgaaattgggcttaccgaaattcggttttcctcctttacacctgcggtacaaaaatattaaataattttaaaaataatttgttataatttaaaaataaatttgaaaaaaattttattannattgatttataattaaaaatttttaatttattgttgataaaaaatgataattttgtttctttaaaaata

SEQ ID NO: 24916 - DNA, 1039 bp, Heterodera glycines
tgtccggggttcggaattcatcgaaatggaagtcataatcggttttcctgacccttaaaacccctaaaaagcgttttttggaacaaaagatgaactttagttaaaaatgaattttcgatttattgttagaaatcgtgtccggggttcggaattcatcgaaatggaagtcataatcggttttcctgacccttaaaacccctaaaaagcgttttttggaacaaaagatgaactttagttaaaaatgaattttcgatttattgttagaaatcgtgtccggggttcggatcgaaatcgaagtcataatcggttttcctgacccttaaaacccctaaaaagcgttttttggaacaaaagatgaactttagttaaaaatgaattttcgatttattgttagaaatcgtgtccggggttcggaattgatcgaaatcgaagtcataatcggttttcctgacccttaaaacccctaaaaagcgttttttggaacaaaagatgaactttagttaaaaatgaattttcgatttattgttagaaatcgtgtccggggttcggaattcatcgaaatggaagtcataatcggttttcctgacccttaaaacccctaaaaagcgttttttggaacaaaagatgaactttagttaaaaatgaattttcgatttattgttagaaatcgtgtccggggttcggaattgatcgaaatcgaagtcataatcgggttttcctgaccattaaaacccctaaaaagcgttttttggaacaaaagatgaactttagttaaaaatgaattttcgatttattgttagaaatcgtgtccggggttcggaattgatcgaaatcgaagtcataatcggttttcctgacccttaaaacccctaaaaagcgttttttggaacaaaagatgaactttagttaaaaatgaattttcgatttattgttagaaatcgtgtccggggttcggaattcatcgaaatggaagtcataatcggctttcctgacccttaaacccctaaaaaagcgttttttggaacaaaagatgaacttt

SEQ ID NO: 24917 - DNA, 994 bp, Heterodera glycines
  unsure (1)..(994): unsure at all n locations
gaacacacccaatcnntttttggtaccanttcgaaagcacaaagtctaaagaagctaaaatatataaaatctcaacgtttagacaattaagaaaaaagatctgattaatcaagtaattgttgattattttcggttgtaacttctttaaatgtttatcattattcagactttgtgctttcgaatgataccaaaaagatagggtttgttcgaacatgaacaaagttattgtataaaaacccgggattgtcaattggactcataaaactcaattggactcataaagtgcactagagccatattttgtttttgtttgttgtttatgaaaggttttagcaaaaggcactagaatacttaaccaaataacttaattttggtcatttgaatgattattaaatattttacaataaggaaaatttttaaacataaattttttatcaagaaaaaaatttgtgtccatcaatttttttagaaaatattaagtattaacagcacaattatggtgaataaaatgtatattcacgatttttatccaaaaaaaatttacaaaagaaaagggtcccccctatggtttttgataaaattcaaaatctatcactttataactagcgccaaatttgcttaataggccaaataattgtcatattcgtgatcagcgacctttaaaacccccgggtatttggtttcaggactttttaaacaaaaaaaaaattttgaccaaaaaaaagttgaaaaaaatttcaaaattgaccacttttacagtagcgccaaagattttatcgagtcatttttctgtgtttttatagattttcttggtaagggatcagggtaggggggcgggaattaagctgggcgctatgtactatttcaaatttaataagtacgaaatctaacaaaaaaaactttttttcaatttttagggtgtgactcttccgggccatcgtttggaatttcgcgaaaaattgttgtgctcattgtcaggccaatttgtgacggt

SEQ ID NO: 24918 - DNA, 1609 bp, Heterodera glycines
tttcttctcattatccaatttttatttgtattttttaatttaccattatcatgtcattaagtcattgtcttcgtttattaatttttcaaaattccccttattaatgcaacaatttggcagtaattggtactaaaaagccgatccattttccctatggcaaatgcgtgaagccaaacaatggcattttaaaagttcatttcctttaaataatttctatgtgtttaaaaggaagaaagtttgttgaattctacgcaaaaagccaagaaatgtgaagccaataaaatttatttattttttaaaatgccatcattaaaaatcttttggccaattttgcccggggcttcttcacgtgaatgaagccaatcactgaagcggtgttgaatgatgtcttactatattataatctttctatcgccggtggattatatgttatttaacaacatcgcccaccagaaaaattgaaaattgaaattttaaatttttcaatttggaaacatttccctcccccccccccccccaaattcccggaccccaaaatttgaaggtaaatttggaaaatgaaattgcaaaaagccaaaaaaagaattgtgcaaaagcaaataatgagtgaattgggcggcagctttggcccccgtttttgcagctgtgttcccctttaataaataataaaaattcattttttaattcctctcaaatccgcttcaccaaacttaaaatggaacaaaaagcatttttggagaggggcggaaaatggcgccgcgcccggcggggagacggggacaaaagcggttgaaaaaaggcaaaaaccggcgaaaattcacccactttttggccaccaagcctgaacaaattaattccttctgctactggtgctgataaaatggaaataaataggtaatgtaatttaatgggtcttccccttgggattctatgggcattgttaaaaagggattcggattctttcgacttcaatgcaataatcccttggttcgtattgttctaacctacctgtagggagagagaaatttcgaattttcaatttccggataagaaggtcagcccttgtttcgggggttgggtttcgattccatggggactcaattaccgtcctcaatagtcttgtcgatttcagattttttcatcccccccccccccaaagggtcccttcgttcacattgcctccgttatggccaatttgctcagtcaatgcgttctctccaaacggtcgccgttcggaaacgaatcgcgctcatatgaaatgcttagtgctgcgtgtgctgttggagtcagctccactttttcggcaccagttggtggttggttttctcttcttcaaatgttttccgtttgctatcggccgatcattcacaaaacgaccgatcactttcccatctgatcattcagtctctccttgttagtctcctcctcactgatcatcctccattttgcttggcaatttcgcccattctctctcattccatttttgatcgcccatttatttgacatattattccgatcactttcctcttgatcacgagcgacgaccctcccccttccatttgatcggcatccatttctctctctctcctctctctctctcttcctcttt

SEQ ID NO: 24919 - DNA, 1332 bp, Heterodera glycines
  unsure (1)..(1332): unsure at all n locations
cttttgttgtttgccatcgttttggcacactcagcagagaataaataattttattgtatgtggcagaattatttatttgttaatttgtgaaaataaatttaaaaacacaccaatccttttatgtctaaattgattaatgtttaaaaaaatcattcattcaataagtaagttttgtttttttgcgtcaaatttatcgacttttaaagagcaacagaattaaacgactcttttttggatttttacttttaatttgccaatattttttagtttttctttttcatttatttttccactcatccaaattgtttcttccatttatcaattgatctttgaccaactccatttttcttattaatttcggcataaattttcttccattcttttcttgaatatttatattcatttgtcattgctataaattgttgaacaatttcaacttttttgttcatccgtttttgatttgttaaatttataaagtcctaatgctttgatctattcataaatatatttgcgatttgtctcgaatttgttcgcaattttcccatcaatttttctccattcttttgctgtatattttctttcgttttgctttattttctctttaattttatggaatttctcaataatttctcagtttttctgatcattttcattttctttttttcccatttttctctaaatatttcgcccaaatgttttttctttcaattttttattttctgctctaatttcaattttacctaattaataaaaatgcaattaaagcggacaaaaatatatataaattcattttttgaataaataataaaaatgaattaaatcatctgaaacaatttgttgtaaataatgtgaatctaaagacaattgattttatttaataaaaaattaactcattttctaatattgatttgtatttaaaaaatttccgcaattttttcatgattcatttttgggttttctctttttatttataaataattttttctttttttattttaaaataaaaatgcaattaaaatgaaaaattcatcggaatcttctttttcgcgacatgctttttcaaaaaatatttttttggaaaagaagagtgccggcgttgcctaaaggagccgctgggaaaatttttgaaacatgcaaaaaaacggacttttataattttaagcctatttttaagaagagctaaaaaatattcgtccgtctgtggctcaaacaaaaattaattttaatttaaaaattaattaaaattgaacattataacaaactcttttaattntatttaaaaaggctacaaaggaaaatatgaataatttttgacaaaattatgaataaaat

SEQ ID NO: 24920 - DNA, 1296 bp, Heterodera glycines
gaattctccaatgaaagtcctctttcgaacatcgaggtaaatgcaaaagcagcggtcatcttcttcccttccttcctgtctctgtttgggcattaggcatcaatggtcgctcggacaactgccatcggggaacatggcgaatttttaggaggcagaaaaacggcagtggaacattaaatgccttagcaggtgtcttcaacatcattcagaattttggtaataaaaagcaattatatcagcggcataaaacacccataacagtttaaacgtcctgtgatggatcatcataatcctattctgttattcaagcataattcagatctctttgataacattttaattccaatcgcggcttatatgcctcctaaataatcgttgcgtgccaaaactggcgctttttgctctctttttaaaaatttgggggggggggtgggttggcggcttcataggggtggtgtatttttcgttttattgcatttttattaaggatttctttgaaaaccctgaaaataaacgtaattaatagggatggtaaaaatatggatataaaatcgcgaaatatggccataaaatatggaccaaaaatcgcaaaatatggacataaaatggcaaaaatcgcgaaatatggacataaatggcaaaaatgtcaaaatatggacataaatttttcaaaattgagtgcaaaatttcttcaaatttattggttgaaattgcatatgagatacatttccaaattttttgactcggtaaggcgctttgacaaagacggctttcgttttgcaattagtcggtcaacattcggaaattggtctcgaattttttcggcaattacgtgcaatcattttaaaagaaaaaaaaacataaaagccaaaatttattaatttttttagcgcaaaatcaacaacaaaagcgaaattttcgcttttttgcttatttttgacataatttattaatttttaagaaaatttaaatttattcaatattctcgagaaattttggcgaaaaaatgattttttgaaaaatttttcgggttttgggctcaaaaaggctaatttagctgctggggccgttctaatagaggtttttttgaaaaatgccaaaatatggacataaaatatggaccaaaatgccaaaatatggaaaaatatggaaatatggacataaatcgcgaaatatggaaaaatatggaaaatatggatatagaaatccttcctagaagcttcaaaccaagctaaaaacatgtttttcgtgcgtttcaggcctcccacattccaggaaaaaaatatggatttccat

SEQ ID NO: 24921 - DNA, 1682 bp, Heterodera glycines
  unsure (1)..(1682): unsure at all n locations
acgaatatgatgtttattttcgtttcanaattttggaaattttttaaaaattctntattttttggcaattttttggcccttggaaatttgggctaatattggaaaattcatatctagcctaagggttgaccaattttgagcaaataaagctttaaaaatagagaaaaatcaggagaattttatgggttttatatggattttctagcataaatatgaaaaaagttattccagaaattctggaaaaattcgaattttcagaaaaaaattcagaaatccgttctgaaaagtcattcttgaaaagtaaaatacttcaaaaatccgcaatttttttctctataatataaattttattttacatttttatcacatttttaaaaaaagatataaaaataaaagtgattttgggattcgggaccaaaggggtgagcacatgatttttgagtggaaaaatttttctcacaaaaatcttccaaaaatatgtctttaggggttatttgggccgctgatcacgaatacgtgatcagattttacttttgacatcgtcaagacctcagaatccccgtgtgattggggattctgaggcatcattttgaggggggggggcaggttcgaatccggacggtgtaacattatttttttgtgcatttttacgttattttcaatgattttaattaatttaaaatattttgttgagttaataaataaaaaattatatttaatttaattttttttgataaataaattttataagtttaaattaattatttttttaattgatagaatttcatgtatttttttaattaaatttgttaaaaatattttcattttaatttaatgaatttactaatcactgttgtatcaatttatatttaaagatttgttgtaaattaataataaaagaatttatgtaaaaaataataattatcttttaataaagaatttcatatttttttaattgaatttataaaaattaatttcatattaatttaaatattcaattattgtacatctcaaaattctctttttaattaataaaaggaataattaatttattttttaaaatttataataaattgcattcaatttttgtacctcttctgatcattgttgcacctcttctgatcactgttgcacctcttctaatcacttttgtacctcttttatcacttttgtacctcttttatcacttttgtacctcttcatcaaatttgtacctcttctaatctctgttgtacctcttctgatcactgttgtacctcttatcaaatttgtacctcttcaatctctgttgtacctcttctgatcactgttgcacctcttctaatcacttttgtacctcttttatcacttttgtacctcttcatcaaatttgtacctcttctaatctctgttgtacctcttctgatcacttttgtacctcttcatcaaatttgtacctcttctaatctctgttgtacctcttctgatcacttttgtacctcttatcaaatttgtacctcttcaatctctgttgtacctcttctaatcactgttgcacctcttctaatcacttttgtacctcttctgatcactgttgtacctcttatcaaatttgcacctcttcaatctctgtaaggccaacaaaatttngaataacgggcacgaagcgcccgtccaaggccaacaaatttaaaaacgggcgc

SEQ ID NO: 24922 - DNA, 1571 bp, Heterodera glycines
ttgaataaatcgtcaagagtgaattttttaagcttttccattaatctaaaagcaattctgacaataaaagagagaaaaaaaattgaccaaaaaccgggacccaaaccacattagtaccgaatattggatacctattaatttataattcaaaatcaaaatttagcctttttttgaacaaaatgaaaatatgcgataaaaaattgagtttcatgctcactgctatgaattgtttcatttatttcgaagttaaggtgaccgaagcagcatttgatgagagagagagataagtcaaaattaattttgccttaagcattagccaaaagaaaatcagaaaaattccatcgaacaattgtgactgtaataagagcttggttttctaaaatcgtcctcttctgtcggctttcgttcctttcgccgttttccgtccctttctttgccttcgctttctccgcttcttctgctgaccattcattcattcgcctccaccgacgactgatcagcttttgatcattcggctgagctttgtttgtcctcggcctccgcttcgatttgttcgtccgtcctcagccaatgaatgaatttgcctcattatcctcacaatcagcagcaaagcaagtctctcctacaacaatttcttctcctaattaattcgctaaattatggcccttttctcgcctcattttgggcattgtttttgccaactttttccgcttttcctgccttttttctgctattttatcgctttgtctttcgccgtgcctttccccccatcgaatgggccttgtccctccgaactgatgctgaaatgtgctgaaccgctacaacagttgggaatatcgccgggcaaaaatttggtgctgctactgctccaactccaatctcccaaccaacttcggaacagctgccagtaattttgaactctgatcagaaatttgtttaaagatgaaaattgttaatgaaacgaaatgatcattttagagttgattgtgagatcttttaaacggtttcaaacaattaacaatgaaacaactaattgaagcagaatttgtcggactaattaaatttgaatctttccctgctgacgttcattgtcccccggcagagcttacgccactgctttgccctgcttccgtcggttggtccctcgctgcggaatgccctcacaggcggaaattcttcgccaaatggaaaatgcgcatcagtttctctgttctccgttctcgggcgacgaacaaagccaactgttggcccatagggtttgtattgggcgaattctcggccaaatgggcagcggcggaaaaggctgtgaagcgacgggtggaaacggaggagcagtggggacagcaaattcgaattcatctacggccattgtgctgttccgatgcaggtaaatttgagacggaaaatcgtggaaagggtaaaaagagagagagagggggagagagagaggcagagagagagagagatcttagctcaaattgtggcatttatgcctccgaaataatttgtggcgcgtaggttttacgattctacccgcccgctgttgattttttatttattcttattttgga

SEQ ID NO: 24923 - DNA, 1419 bp, Heterodera glycines
tcaaaaattttctcatgaaaaaaaaatttgggggaagaatttttgagaaaatttccaattcttagtggtgtgtttttaaaaattttcggtcgattcttaggggtgtatttttcagaagtttttagggccgattcttaggggtgtattttccgtttttattgcatttttgttaacaaattttccaaaaaatggcgaaatatgcataaatatgtacaaaaagccaaaatatgcaaatatgcacaaaaatctcgaaatatgcaaaaatatgcaaataaaagtccgatttttatacgcaaacacaaaaaagaaagggtttttcctactatttagagcatgtagaagccaggaaaaaaatatgcatttgcataaaattcccatccctagtgattagtaataaattaaataacatttgtaggtggagaattcccccacttatatgtatgtacgtgtataaatctcatattttccaatcaaaaagaatacgctggacttcttttattcatgatgtagggcttgtaattttatatggatataattcgtaatatgaccataaaatatggatcgaaaatcgcgaaatatggacataaacgttttcaaatttagggattttttatttgttcaatttagtaaaatttttttatttatttattatgagtagggcttcattttttaggcacaaaaaatcgcgaaataggcacctaaataggcataaaaaatcgcaaaataggcattaaatgggcacaaaaatcctcaaataggcattaaaataggcaaacaaaattttattaacgcttttaggtagcaaaacacaaaaacttcaattttataaactttttttgaataaagataaaattttaaaccaaaaaattttattaagaaaataaattttggtgtcaatttttgaaaaattttttcaattcttaggggtgtattttctgaaaattttttgggtcatttcttagtggtgtattttccgtttttattgcatttttgttaacaaattttccaaaaaatggcgaaatatgcataaatatgtacaaaaagccaaaatatgcaaatatgcacaaaaatctcgaaatatgcaaaaatatgcaaataaaagtccgatttttatacgcaaacacaaaaaagaaagggtttttcctactatttagagcatgtagaagccaggaaaaaaatatgcatttgcataaaattcccatccctagtgattagtaataaattaaataacatttgtaggtggagaattcccccacttatatgtatgtacgtgtataaatctcatattttccaatcaaaaagaatatgctagacttcttttattcatgatgtagggcttgtaattttatatggatataattcgtaatatgaccataaaatatggatcgaaaatcgcgaaatatggacataaacgttttc

SEQ ID NO: 24924 - DNA, 1171 bp, Heterodera glycines
  unsure (1)..(1171): unsure at all n locations
agaaagtgtctctctattccgcaaatgaattaggtttcattaaatcaccttcctctaaaaaattattnntctgtcggacactatagtaaagttcttaaaccgtttgctatgncaagacagaaagtgtctctctattcctcaaatgaattaggtttcatttaaatcaccttcctctaaaaaataatttttctgtcggacactatactaaagttcttaaaccgtttgctattgcaagacagaaagtgtctctctattcagcaaatgaattaggtttcaattaaatcaccttcctctaaaaaatatttttctgtcggactctatactaaagttcttaaaccgcgtgctattgcaagacagaaagtgtctctctattccgcaaatgaattaggtttcaattaaatcaccttcctctaaaaaataatttttctgtcggacactatactaaagttcttaaaccgtttgctattgcaagacagaaagtgtctctctattccgcaaatgaattaggtttcaattaaatcaccttcctctaaaaaataatttttctgtcggacactatactaaagttcttaaaccgcgtgctattgcaagatagaaagtgtctctctattccgcaaatgaattaggtttcaattaaatcaccttcctctaaaaaattatttttctgtcggacactatactaaagttcttaaaccgcgtgctattgcaagacagaaagtgtctctctattcctcaaatgaattaggtttcatttaaatcaccttcctctaaaaaataatttttctgtcggacactatactaaagttcttaaaccgtttgctattgcaagacagaaagtgtctctctattccgcaaatgaattaggtttcatttaaatcaccttcctctaaaaaataatttttctgtcggacactatactaaagttcttaaaccgcgtgctattgcaagatagaaagtgtctctctattccgcaaatgaattaggtttcaattaaatcaccttcctctaaaaaatatttttctgtcggacactatactaaagttcttaaaccgcgtgctattgcaagactgaaagtgtctctctattccgcaaatgaattaggtttcaattaaatcaccttcctctaaaaaataatttttctgtcggacactatactanagttcttaaaccg

SEQ ID NO: 24925 - DNA, 1502 bp, Heterodera glycines
  unsure (1)..(1502): unsure at all n locations
aatcagtcanccgcctgcggatcacgcgcggactgcttccgtagcccgtagtctcgccccacctactggccgccgtagtcgagtgtgcggcggttttttagcgcaatactcgatattcaaggctaaacgcttttcgtgcattatataagaagaaattttatttttattttttggtactgaagtgtccattttcactgggactcagttgtcccagtgtttagatggcgtcggtttgatttttaccacttttttctttaatctttcgacttaactcgtcaagagctttcgaatgatactaaatttgtgtgggtttgacccttttaaaaggctaaaattgcccaattttgtccatttttttcgacaaaaaaaattgcatttcgccatgaaatcgtcggttttacgccaaaaaatgatgatttctattattatacgccattttagcgtgctgggtcgtttcttaaaaactgccacctgggcgagaattaaactacaaattaaaacaactatatagaaatattttatctaaattttatgatataaagtttgtaaattaatatatatattccagtatttcttttttaaattttcttattctttaaaatgttcaccaaaaacatgaactgacaagcataacaaattctaaaaaataaactatttaaaatactaataaatacagacttttgttaatgaacattcagcactttcatacaaacatttgcaaaagcttttgtcgcaatcgtagcgttttctagatttgtatatagcataaatcatagtaataacagcaatcatcgactatatcatttaaaaatttataataaatttaaattttttttaaaccttttttaaagttgcaaaaccatattactggtgctataaagcatgagtcaaaacatgaagtgccacaataagtgctacaatatttctttgcaactttcaaagggaaattttaattataataagcttatcagtaaaaaatttaaataattaatttatcaagaaaaaatattaaatatatcgttgagctcatttgtaaattttattaactacaatcatcagaagcaataaatttattaatattttaattttactgagctccttctttcttgttttcatttcaacatttattaaattataattttttaactgttttataaatttgaatttttaaaatttcctaaaatcaaacatttaaaattctctaatttacagttttttttaattctataaatttattatatcaagtgcaaaaattacgtatatgtaataatacggtctttctttcatttttctccttaattacccccccccccccaaaaaaaaattcgatttattttcattgagcaacagcaacaaacacagatcagcagcttagaaggcagagaacacgagcagctataaacaccacatacacaattggcagagtcaatttcatgataataaaaaaaattgttatcattttaccgccaccaccacaacgactgtttcaatcaaatcactaa

SEQ ID NO: 24926 - DNA, 1032 bp, Heterodera glycines
catttcaacactgagactcaatcctccagcattccaatcactgggactcaacccaacagcatttcaatcactgagactcaatcctccagcattccagtcactgggactcaattctcctgcatttcaatcactgagactcaatcctccagcattccagtcactgggactcaattctcatgcatttcaatcactgagactcaatcctccagcattccagtcactgggactcaattctcatgcatttcaatcactgagactcaatcctccagcattccaatcactgggactcaattctcctgcatttcaatcactgagactcaatcctccagcattccaatcactgggactcaattctcctgcatttcaatcactgggactcaatccaccagcattccagtcactgggactcaattctcatgcatttcaatcactgggactcaatcctccagcattccagtcactgggactcaattctcatgcatttcaatcactgggactcaatccaccagcattccagtcactgggactcaattctcatgcatttcaatcactgggactcaatcctccagcattccagtcactgggactcaattctcctgcatttcaatcactgagactcaatcctccagcattccagtcactgggactcaattctcctgcatttcaatcactgagactcaatcctccagcattccagtcactgggactcaattctcatgcatttcaatcactgagactcaatcctccagcattccagtcactgggactcaattctcctgcatttcaatcactgagactcaatcctccagcattccagtcactgggactcaattctcatgcatttcaatcactgagactcaatcctccagcattccagtcactggaactcaattctcatgcatttcaatcactgagactcaatcctccagcattccagtcactgggactcaattctcctgcatttcaatcactgagactcaatctccagcattccagtcactgggactcaattctcatgcatttcaatcactg

SEQ ID NO: 24927 - DNA, 1781 bp, Heterodera glycines
tatttaacagggtggcaaaaaagacaacatcaaatcggtatcaatttatttttaaaattccattactcggatagaaagtcaattaaaaaagctctatcacagtcaattgcattggaataaataaaaaagggaattattgctttaagacgctttttgcgaatatttaggaaaaatcgtaagtattcgaaaataaaaagtcggaagatttcatcgcaacggaagaacactgattcctcagaagggaaggacaagttcgacaagtctttcggcaatttcgttcactttttcagtggtttcggcttcggcataaatccgtacaattggctcagttcccgagggtctgaaaaaagtcaaaaacatttcaaaaaatagcaaaaaagaatccaatgacctgatgaaggcacgtgctttgtcgaattcactgataattgcgtcaattttcgcctgcattccctcggggcgaattaacaccgtttcgcggtcggctgcggtctcaaaaatggaccgatctttcacctaattgtggtccaaattaaaaccataaagtagggggggggggtgactgaacctcaactttcttttggacattcggaatgtcggcgtaagtctcggccaaccaatcctggacggaccagtcaaagtgccggagaagacattccaccgctaacatatcagcgatgccatccccgacaacataaaagcacaaaaaatgcaatttaggagaaaagaaaagaactcacctcattaacaagttgagagaacattgacagcaattggatgtgacgaggaattatttcattcctcaaaaaaagagagattaattggcattaaaaaaggctaaaaccctgaaatttcttccaaatacgcgtaaaagcggtcgctgaagcacaccgtgccgtgcccattcgcttcaaaatagagaccaatgtcaaagttcaacgccgcctcctccaaatgcttaacgcccgtcttcgtaatcaccggttcaatgcccttaaacaaaatggaatttaaaccatggtaaatttaaaatcaccaatttttctgtgaagaatctggtcgaattcccgttggcataagctgtttgcacaacgccaaaagagaggggaattttgtggcccaatttttcagcgacagaaaattgctaaaaataaaattattaacgaatataggcaaaagaaaagaaagggcagagacttgagcaatgaaagtggcaaagagagcagcgatatggtcaccgtcgagcagaacgacgcccccaccgccgttggaattggttgccgaagggtaaaagtaaatgagacggtccgcgtccccatccaaagacgcacagcgcgaatttaaggggacagagtcaaaattggcggggattttggagttgattttgacaaagtcggcaccgcactgaaacgacggaaggaaatgcgaaggaatggaaaaggaattaaacgaattaaagggcacctcgtggttgagcagaagagactcagtgtccgtgttgagtgcatgcaattggacagagtcagtcgaagcggccacagacaatcccttggcgggggcggaaaacggagtgccgtcagtgatagcatcgaaatatttgttcacccaaagggcgccgacgccattggcacaatcgacgaaaagttgtttggagtagcgggaacaattggacaaagggactaactgaagaaggaagtaattaaacagtttctgaagtgaacatttgggtaggattttggtcactttgtgctttatccccctccccaaaaaacaacttcaag

SEQ ID NO: 24928 - DNA, 2238 bp, Heterodera glycines
  unsure (1)..(2238): unsure at all n locations
tacctcttctaattacccttctacctcttctaatcaccttctaggtcttntaatnantattttannantgtgtatatcttttgtaagtnttataatngntataaggtnaagaaattttgaaaaangggngngaagngnnngantgaggnngtgaagnggnngaatggngngtnaatatttaaaaangggngngaagnggnngtttgaggtaaanaaagtttaaataangggngataagntnnngtataagggnaanaaaaattgaaaaangggngngaagngnnngantaagggtgngaggnagnntaanaagntaaaaaangggngngaagngnnngtttgaggtaaanaaagtttaaataangggngntaagngnnngtanaagggnaanaaaaattgaaaaanaggggtgaagngnntgattgagggngngaagnggnntaanaagntaaaaaangggngngaagnnnngtatgagttnaangaatttaaaaaangggngngaagnnnngtatgagttnaangaatttaaaaaangggngngaagngnnngtnnaagggnaataaaaattgaaaaannggngngaagngnntgaatgaggtngngaagttgtttaanaagttaaaaaangggngngaagngnnngtttggnnntaanaaaatttaaatgggngngaaangnnngttttggnnntanaaagtntaaaaangggagngaagngnnngttntgagggngngaagnggnngaatgattactacaaaattaaaaatcgggcgcgaagcgcccgtttggccccaacaaaatttaaatgggcgcgaaacgcccgtttggccccacaaagtctaaaaacggtcgcgaagcgcccgttctgaggccgcgaagcggccgaatgttccccacaaagtttaaaaaccggcgcggagcaccctttgaggccgcgaagcggccgaaagtcctccacaaaattatgaatgcgtcctcgcgatgcctgtagaccaaaatcccttatcacatccataaattcatttcaaaaccgcgcatgcactagcaacgaagtcctttgcgcgaagcgctcatgtcagcgcccgcccatatataccaaaagcatactgtctacaccgagcaactactgcgccacccgctagtttatactactatagagaaacgttgcagttcgtcttcaaaaacaaaatctcccggccgaaggccgggagcgccctgaaagtagtggaagggtcttacaactttttgaggcgcatctgggaaaaataagggttttccggtccggtggccaactgagtcccggcggctaatttctcacttttgcttgcgtttgaaggcccgtaactttttttctaaaactctgatcaaaaaatgcttgctggtaggaaactaagttgaagtgttttctaattttcaaaaaaaattccaggcctctacctatacttggaagggctgcagaaattggcaacttttcagtaccaactttgtccagttcagtccccgttgaataactcattaggctttgacctgagcgcagggtggccagcagacttattgtagagctcggtgagctcgatttttccagattttaaaatttcgaaaattttcaaaatttttcgagctaggcctaaaaaacggttttttggtttttgaattttaagaatttttaacgaattttcccagaaaaacggagaccacttccaaaacatagtttttcgagctctatcgactggtattttttttggaaaaatttcgattttttcccggaaatagaaaaaatttttggcctgagcgggacatttgagtcccgggcccataactcgtcaggggtcggttttagacaaaaaatgccttagagcaaaattgtagagctttttaagatctatcgaacggtgtgctatatgccctgaaaatttcaaaatttttcgagctaggccccctagaaattttcaaaatttttttttcggacgaaaatgggggtgaaaaatatttttctggggtaaaataaggtgctgagtacgaatatgatgtctattttaagtttcataatttttggaattttttaaaaatcctttattttttggcaattttttggccctcgggattttggcctaatatttgaaaattcataacaaatcgaagggttgatcaattttacaggaataaagccttaaaaatagagaaaaataaggagaattttatgggatttatttgagtttttgactctagag

SEQ ID NO: 24929 - DNA, 1679 bp, Heterodera glycines
  unsure (1)..(1679): unsure at all n locations
gtacatcgatcactccgtcatcgcttttcttcgttccattcaaagattttcgacaaaagaggnaccgatttacatttccctattccatcatcacactctacgaatggccagcggatttgggatgtttttgttcgtgaaatttggccaattttttctgaaaacattcgctgtttgggctttaccggtcgtgatcatttggacaatttgcgtcgtcgcacttcgccgacaattctcactgatctcaaccaattggtttcaatccattcatttggtctgtcgcccgctgcgtttggtgatggttttgatgtgccaaattcaacaatttctgctggccaagcattgtccaaatggttgcactctccgagaaaagatggccaacccaagcgatttcgttgtggcagaaatttgaacgcacaagcggacttcgattgggtcaacagtttcaaggaggtgtggtgcggagggaggggggagcagggcaaaatgtcgccgcaaatttttcttttaattttaaaaaattattaaaaatttagttatctagcctaaatcaaaaaaaaatcataaataaattctaattttttttttattaaattcaaggaaatgtaaaaaagtttcaagtttttttttctgggaattctgcaattagttttattaacacttagtttctaaaatgagttgaaattttcatgaaaaagcggaaattttttatattgttttccatacattttttagggggggggtcgaccccccccccccccccccccccccatcgctcgcaaagggggccagcgaggggggggggcggtgtaaaagaggtggggggaggtggttcgcggcgagttgggggtcgcaaattttcgaaattttcttaacaaattcattaaaaacccccaaattttccccggcggcgcctatcggcactgccggaccccaaaaatcccaaacccccccttcgcaaaaattttttccgacccaccccccttttttatgtatgttgttttcccggcgacgttttggggcgtacccggtctgggatggggcattccgaggtattttctgaaatcagaatcccgatcccaaaaaatgtcgtaagtcggaagtttttgaaaagttccgacttttatcaaaattcggaaatccgaattctgtgccatccgtgctggtgtggtcccacatttttggcaaatgactgattgttgttttccaatcaaattgtttagcattttcttcgtgccaatgccatttcttccgtcagttacgaaattcatttttctgttcgtgcgccgtcaatgcaaatggtgccatttgaattggtgaacgaatggacaaaggaaaagctgacattggccaaagcaaatgaatttgacaaaagttggataatgaaacgatgcaaaattggggagaccacggcggttaagcaacagcagaagaaagatgaaaattgggacaacaattgtaacaatgtgtacttttggctttttagtgccaataattgcatcgggtgagcaattaaaaaaaacatttgatttttatccaatttgaattttgcgcttaattaaggcctttgtctccgccaccggcagaagaaacgggacaaagcatcacaaaagggcgaaatgagtgagggacaaacgaacaaaaacagtgatcagctgaagaagaagaagaaatgaattaat

SEQ ID NO: 24930 - DNA, 1688 bp, Heterodera glycines
tttaaagaatttttttcgaattttccaatccgtaaatctctcattctgcccctccatttgtgttaaggtgattagcgtacaaaaaaacagcggagaccaaactttcttctgctggtgcgtcattattggcactgtaagttttcaaaaaaaaaatgttaatgccgaatactgaccaactctgaaatttgtttgtatacatattatttatatcatcgagatttgtgtctcgatctgtttatgaaagaatccgaaagaattttcggtcggcaacaaacactgtcaagagttttaggcctgggactgaaatggcaaaaatgaccttttggactgaactattcgtcaaaaaagacttgaaaaactttaatggaccatacatagcctcgtttagaagcatccaaataaacaatcttggtatcattcgatagccccaagagtcctctattagtctgcgaaattgaaaaatatttcatttagttgcacagaagatatggccagagaatttcaaaagccttttttggccataatttttgaatgaaacgaatttttttgaaattttgccagttattatagaactcttagagctatcgaatgataccaagatagttgataatttgaatgcttctagaataaaatgtatacaaattgccgagagcacgtgtcagtatcgaaatttgtatcaaaaattgcactccccctccccccccccccacaattttaggtgttgcccgtgtcatttttcgtgtggctcttctcgaaagcctttggtaaggatggttcagcttcgttgcagttgtttttaattggtgcggcaatcagcatcttcgtggtggtcatggttctatgctgtatttgtccaggtccaataaacatgcgccatataattttacataatttttttttcattttctcaaatggaaaacgcaacgattttgcatggggcggtcggtcactgatcagtgatcaatctgaattttcgaaaattctttataacccaacggatctgggatttggcattggtcgaaatgctgtcagaaaatcagtttttccgaccctaaaaacatctaaaaagcgcttttgtgcaataaacgtgaattttggtgaaaaatgagttttcgacttttggttcgaaatcgggtccggggttcggaatttggcaaaaacccttttttttgttggtttttttaatctaagtatttttggcacaattttgaaatttcgttacagacaaagacggtcacagttcgctggaagtgctgtacaaatgttcggcgtgtggcaaaaatgtgcacagaacttatgagtgcattagtacgtacagtacagcaatttttaccgtatcccctctcaaataaatacaataaatcaaattgtcccgccgctttagttgacgtcacttacaactggtccggcggacgacaccgcgacacctttcgctaccgtaatcaaacgtacagtgtgtggggaaagtacacggcaaatgtcataaaaacggtattgcggacgcggatgaccatgaacaactttgaggcggtggagcgcgtgatgagcgttgttcagacggacaattattacaagacaagcgatgaatggaccgacgatttgataaggcgtcttgaataattgaggcagaaagccaaatggcaacaacaatttttgtgtattatatttgtgtatttctcgtatatact

SEQ ID NO: 24931 - DNA, 1598 bp, Heterodera glycines
  unsure (1)..(1598): unsure at all n locations
cttgcatnngcctgcannggtcattagaaanatttagtcaaaaaatatatttatattttaaattaattttaatctaagaatcttgaaacattaaagatgtatttaaaattatatttttactctctttactgaattatttaatttttgttttaattttttaattttaaaatttgttttatttaattatttaaaaataatttttaattatttcaccttttcgttgtgccgtatttgttcagctccgaccccggcaaacatgagaacgaatttgtgctgatctgtgagtaccgaaatggccacagtctgagagagaattttatgccaaaattaaaattcaatttttgtcccatgacaaaacaataggctcgtaccatatgagaacaaagccgctggttggtctcatccaatggattgtcacaagcggaggccttgagggaaagggcgaaaaatacggtacaccaaactataagcggttactgtaaaggctgcaccaaaggctaaggagaaagaggaagatttttggaaagtatattattaacaaatttttttgaaaaaatgccattttttcacctccgtcgcctgtcagcaccgcggactcacaaaattacgataaaaaaactaatttgcttttaatgagtttttctatcggaattttttgataaaaaaataaaaaatgaaaattactgattaaaattatgggaattacggcatttttggaccccaataattacggatacggatttccgtaattgaaaatccagttatgcgcttgacccgccccctttttttcttatttaacagtaaaattgtcaagcggttattaccgtaacccggaagtagtctctgcgcgtcagctgcacaatttcgctagccttcttccgcacaaacattttgcctgttgttgtattgatgccgaaaaaggtggcatctgttgcactcatcgatggcaccggtgccgcggaaggaatttgttcatccaacgcataagtgaccaatccgttgccgctttccaccgtatccacatcacgggccttaacagtttttatacagtagcggtgagtgctttactgttgccagggatttaaataaagtgaattaaaattcatggtaatttaaattcaaataaatgttaaggggcactgtctttttatgctgccttaaattatataataccaaaaattgttaaccgtttattgttcaaattttaatttagcccggctaaatgggacattaagatgagctaaaaagcggctttttgtggggttttgcaattttttaaaatgaattaattttttcactctctgtgctatattaaaatgactaattctctgcttcccaggcacttcaacagttttgtttgagggataaaggaatacggcacaaagccaatagttgtaccaatgagagaccatggcttttgcaatttctcgtatttcccccatttaccgttagtgcaaagaacggttagttggcctccatctccgatggtatcaccgcaaaaggcacgtccaatgctcgccagcggatgacaatggcattgccgcaggttgtgccgttttcgccctcatccaccacaaattttggcttgtcgtcattgg

SEQ ID NO: 24932 - DNA, 905 bp, Heterodera glycines
  unsure (1)..(905): unsure at all n locations
ccccccccccactttctctgttttttcacgctaataaaatattgttttaagtcgattttcatgtttttattgcgtttccttcaccctactatcagttttagaaaaaatcttattttttgggtgcgaatcttagtttttgagtcattttgttttattttgaaaaaaaaaacttgggagccctgatttatattataaattaaaaattttttttgtaaataattcaatattaatttataataataattaaaaacgaatttgatgccgagtcttaaaagataatgtaaaatatgaaataaaacccaaaaaacaaaaacctttaacttatttantttataattacattatataaaacaaatatagaaacaaattattatnattttctatgtttaaaatttaaatatataatttagccaggaaattcggatcagctaattnctttttcaaggactgnttttaccgatttnctaaggacataaggnggaaaataccattaaattcaagaacatttaaattttatcttatngcgatcaaaaataattaatttcgantgccggtaggggccattnaggaaaaattataaaatttgaagaatttgttaaagtattataaccaaaattattcatttaacgcttttaggtgtgtttttgaacaattttttgaaaaatagaaaaagagtttccggcggnactgatagggccggcctggaaaaaatttgaaattttggtacagtttagtaacagatttttcaccaaatgtagagttgagcggtaatcggtaattgtaaaaaaaccggtaccggtactgaccggtaatgcaaaaaccggtaccggtacgataccaactttttcctccggtaccggtaccggtaaaacccgtaattttccaacgtaaaatttttggacaaa

SEQ ID NO: 24933 - DNA, 1927 bp, Heterodera glycines
cacaaattaaaaacaaaaaaagaagcatttttgtgacaaaaaatttttttaagaaaagaaataaatgcaagttaaaagcataggtatgcttaaaatccacgctctgtaaaaagcacaaaggagcctctggaatcaaaagaaatttgattttttatcttcttggattttcagatcccactataatatttattttcactaattgtggaactatggatgaagaacaaatttttcaaccttttgatgaagacaatatggaacaaagtcataatttcatggtataaacattcacccattattttataaatgttaattggcaatttcgaaggattatgaaagtggcacacatgacgacgcaataatggaacagcaaaatgatgactgtatagaacggaaaagctctatggtcttacaagaatattctgtgatcgaaagtgaggaatccatgctggacccacacgtaaagccaaaagcggtaagggaatcattaaaggcaaatttgtgggaatttggattttaggttcaccaatgtcccgtatgtaacaaaatcttcgtttccttcaaaggtaagtttatctttgcttttatggagctatcaattctttgaactcaggccttcaacaacacgccatcattcacacggatcagaaaccatttgaatgcgacatttgtcgaaaatcgttcagattcaaatccaatttatttgagcatcggtccgtgcatacgggcaccaccccgcaccgatggtctgtttgatatttctaaatcatgaaaaaatgtaatttttttgtactctcccattttcagtccgctctgtggcaaaacgtgtcgtctgaagggcaatttgaagaaacacttacgcacccattgcacaactaaagaggagttggaagtcgcttggcagcctttcgcttcgaacagacgcgccccagcggaaatcccacaagatgccataataatccgagcaaatgccgacccttccacgctcttcacgccatttgaacagcctaagaaacagcgcaagttggggctgggcacggacgtggcgtattgggtggacagaatcaaacgatgtgagctgttgccacctgtgccgatcagcagtaaggtgggcgagttttgaatttcaatgctcacaatcagcttttccatgcgacggagagcagagattttttgttacaattccgttgatatgatttaaatgcttgtttttcattgccatattttgattttaatcagatgtcaagattggctaatctcgtcaaaatggtcgaggaggggagtctggacatggacgggttgtatcaccatgctgggtctgttgatcaattcacaatttctttatttgttttttgcagtgctattccattcgagcgatacgaatgtccgttttgcaaatcagttttcttttcccccattgaatgtgcagaacatatggtgggttatctacgcgacgaatgggcgggggagggttaatgcggaaaactagccaaaattttcggaaaatttcctttccccactttgccgggttaatattttggatagtaaattattttcaaaaaaccttaatatttttactagtacactttaagaagttagaaaataaacaatgcatgagggggcgggggagcgtgatttcgccctcttttacacatgctcctcccactgtgaaggattcgactatgttggaccctttgctccctccccatttatttttgtaaatatccctgccgtatcccccccccccctctccccctgaatatatcctccccttcctatatacattttagattttattcttctaaatttggtttaaggaagcggatcatccgaatgcacggaaacaaagacctcacttctgcgatatttgtgtgcggtcattttccgaccgacaacaattggccacccatcaagagcatcacaaacgcat

SEQ ID NO: 24934 - DNA, 1275 bp, Heterodera glycines
tcgttgcttaacttgccagatcggacgggtgcgcatgattccactgttccaagcaccccaccaaaagcaaaacgatataaccaaaatataaggaaaaattttttaaaaaattttttctccatcttcctttttgatactaaagcatcagagtgctaaaattaagttgtaaataaaatttggtgcgctttagagcactttctgaaaaaaatatttatgaaacaaaaaaatcgattttttcaagtgtccgtttggggtactcaaacatttatggggagcaaaaatccaacgcagaattaaagtacaggctatagggaagctactcccgaaggattcggtctccccataaatctgggcgcatcggttcggggggactgccccgaaaacaaaaaaatcgattttttcaagtgtccgtttggggtactcaaacatttatggggagcaaaaatccaacgcagaattaaagtacagactatagggaagctattcccgaaggattcggtctccccataaatctgggcgcatcggttcggggggactgccccgaaaacaaaaaaatcgattttttcaagtgtccgtttggggtactcaaacatttatggggagcaaaaatccaacgcagaattaaagtacagactatagggaagctattcccgaaggattcggtctccccataaatctgggcgcatcggttcagggggactgccccgaaaacccaaaaaaaaattttttggataaaaattatttaaatgaactgactagataatatttaaaataggttatttctcttcctttcagtatccctgcaaagtttggtgcgcttctgatcagtttctgaaaaaaaagttaagcctaaactttttggcctgtttaaaaaggaattaaaaatttttaaaaattttattcatctccctttttgatagaaaaagcatcagagtgcctaaactaacatgtaaataaaatttggtgcgtttcagaaccctttctgaaaaaatatttaagaattaattttgcaaaaaataaataaaaacgaaagactcagattttcgaaaatttttttgagccagctagctcggcgctcatttcagtgtaagttagtcctttaccggggagtatccctgcaaagtttggtacgcttctgctcaattagcaaaaaatatgagtgatcgaattttcactaaaaaagttaagcctacattttttggcatatttaaaaagcaattaaaaaatttttaaaatttaataatttttcctgcaccgaaggtactcactcggcct

SEQ ID NO: 24935 - DNA, 1012 bp, Heterodera glycines
aaaaattcgatgattttgtcaaagatttttcggaaaaagccaaagaatgtctttcttttctaatttttgaaaaacacatgaagcagccccatcgcagtacaaaatttgttggccgctataactattgatggagaggcatcgtagaatcctgaaacaactaccattcgtttcctctccactacaggaatcgattgatatacgataagaatcgttaattcttttttttttaaaaaaaatcattgacaaaatcactggatgaaaatcattgattaaaaatcatagatttttgcagttttgacgtcagattcttgatcagcgcccaaaactgcccctagaatttagcttctttaggcgcttttggctaaatttcttaacggaaatgcactggcatttttgatttgtctgaaaagtatacctcataaaaattgacactttaaagaaaaattaaaattttaaaaaagaatattattatttaaaaaattttctaaaatttattattaaaatttttcaataaaattaatattcttctaaaaattaacatatgaaatgaaatatattgtagtaaaaatgaagccgcaaaaaagcaaggcatactgtaacagtttttttcaataaatggcttctgtatcacaaaatttccatttttaaatgcctcacaatttaaaaatgatgccatttttaaatgttgatttttgatcgtttgaattttaaattaaatttgggggtgttccgtttcgctgcactcatttcccccgagggcacacgcttttcaatttccaaaattggcatggcactccaattaggcacctaatttctattcttggccatcttcattcacttcgtgtgctgtgccccattcattttcaaatttgcacaaaattagcggcgtcccataaaaggggggataaagccggataaagccgctgggggtgcaaaaagggggtcacgcctatctcattagcactgattattagccccccacgacggagggcaccttttcttttattcattt

SEQ ID NO: 24936 - DNA, 1327 bp, Heterodera glycines
caatcatttgggcaaattttctattatttttttttttttgaaatttttacttttgtgtaatatgtaaaaaacaaataaaatgatacaaatttcacaaatgtcgtcaaattacactcaacgctgctgactaattagtgagtgaaaaacttgaacgaactttggccagcttttggggttccacgggcttctaattacccataaaatcccccagcggcaaattttttaaaaattgtaatttaatgttcggaaaatttgcaaaatttccgctcacaaattatgatgattaatcatcatttaaccagtcacccaccaacactcactcacacactccgtcaaaattccatcaaaaaattaaggacaaacacacacccaaatcagtcatttaaatcagagtcagtcattagtcgtccaccgctcgcgaccgacggattgtgtgggcggtggttggttgctaatgggctcatttaagtcgtccgtctgtgtacacacacacttaattcatccataatacatatctaatcatcatcattagtgcatgtggaagataataatttatttttttgggcggtgctcatttgtgagtcagcgtccgtccgtcacaaaatcaatgtcagtggtagcaaaaattggggggagcgctaatgatgatgatgatgatgatgttgcgtatttgcgtgcacatacgtaccttattttgatcagcgacgcaacaattgctgctgctggcggcggatggttgtttgatcatttacggaattccgatttatcgaaaaaaattttgctggagggggggggggagggctcgagtttccgaaccaagaaaatttttggggcctcggattttacgaattgccaaattgtttaagtccgccgccgaaatttttgtactcttcggaattgcgctttgccgggaattttttattcatccctggcaattccgattccaattcccgaattttgatctcgagttttaactctttttttaaatccatgaaataatttttcattttattttcattttcccattaaaaacaaaaatcattttttatctttccacatcgatctctaataataacaataatatgcaatatgtatgcaatgatgataaaaagctctttttgtaaacatctaagcctcttaagtacccggacgaatgatggaaacatttcccgtaaataatggtggccaaatgtatttatgggatgatggcaaacaatctttgcaaaatttttttttttcatatttgacaaatatttttttgcaatttttatagtgttttgacatttcaaaaaaaatttggccatttttttaaatttttagattaaaa

SEQ ID NO: 24937 - DNA, 2176 bp, Heterodera glycines
  unsure (1)..(2176): unsure at all n locations
ctttttagtgcctattttacgggttttttgagcctaaagcctacctattttggcagttttagagccaaaaaatattatccctactctattattgctacttataagaatgatttaaccaggtacaatataatcgtcaataaataattactaattaccttgcgaattaattgtccaccattattcattgagcatttcgcaaaacaatgttcagccaatcaagacgtattgttttattggttttgatcaacatatgcttttctggtgaagacaatgtgaatgcaatgcaatattggaataataacaattataatcataattataccaattttaattatgctaatgattctaatgagttgagcaacaatactgaatcaatatcatcacaaattttcatgggaaacattcaaatacgaaaaataaactctaaaaatatatggaaatacgaaccagctaaaaaagtggtaaatgaaattactgaattaaaataacttttaatttaatactttaaatcttgattttttttcattatcaattttagtgtattgaacttttttgtggataaaatcatataaacaatggaatttttactgatcaagaaggtaaatttgaaaaaatttggtctgatgaacaaattgaaaaacttgaaaagtgcaaatttaatattcacattggattctacaaacaaagagtaagaataatgcaacaaatttaaaataataattattattagttatttagttaaatgttttcaatctttcaaataatgaaaaaacaacaaaaaattttaaggaaacgagtttacaaatgttttaccaagagcagcaaattatgaaagtttttgcgaagcttgagagcttcagttgccttatgtttttcaaaaaaggagatagtgtagaaaccaacaattttanagtaaataatcaactaattaattagcataagtcatttanattattaaaaataatttgttataataattngttttgtttgttcaattcttttaatagattgactttaattcaaagaacaaatatgctaatattaatgatgccgacgcaaaacaaatcattgatgacaatctaaacttagattttggcgctcaacaaagtcgcatttttagaaatatctttcaaagttagtgaaaaaaattgtattaaaaataaaataattttcaaatttttaaattaaaattatgtataattattttaagaattagaaggcccaagcgacggagcaagctcatcaccagcatcagacgagaacaaaaataagcaaaaaggcaagataatcagttcattattatcgttgggcggcaagaacaaagagaaaaagaatagacagccgaatgttattgattttatataaaaaggacagtaagggatgagagaagatacagtaagaatcagggtaactattggtgtggagatattgccgagtatggaccacttcagtcccaaaaatgattaaaacacaaattttggcgtttgtactatttttccttatttcaacatttttttggaaaatttattaactgaaatgaataagaaaaaccaaaaatacacccgccccctaagaatcgaccaaaaaaatacacttctaaaaactggaaaattttctcaaaagtcctttttttcttgacaaaatttttgatttaaaaaatgttaatatttgctaagaaaatattagaaatagttcattaaaaaaatcaggaggaccgaacttaacattttggattcttttacatgtgtattcatacaacaataaaccctaaaataaaatatgttttttttataagtagagagcgcagggaaaaaaacatctctcattttggcgtattatttctttatccctattaataaagaaaaattggttaacttcgtgacgtttagttttttgcttaaagttaaatccgcttcaaattttgccttagataaagcttctcatttccaatcgctttcaaatgaggtgctatgtctattcctaaaaagtgcaaaaatcaaaaatctaatttttcctataatttttttatcaaatttttacattttaaataaaaattataattaaataataaaatttacttaatattaaagaaaatccattaaccagattacttagtattttaaagtcaattacttatggactaaaattaaaaaattaaagaaaaaaaatgaaatat

SEQ ID NO: 24938 - DNA, 925 bp, Heterodera glycines
caaaattccaaaatgtccacctttcaatttttcaatggtcacttttgtttctctctttgctcatgtttatgggttcccaattttgttgatttattcggcaccgccggccccgcaaataacccttccaaattgctaattttatgtgaaaatctgttaaaaatgtctaaaatttctaatttcccaccggcaggggcctatcggcaccacgggagcccaaaaatttactttttttcattaaaacaattggctttaaatcgcaaaaattagtcacttttttggctgctgattctgaaacttttcaattgggagccctgtcgccgtacgaaggaaggaggcaccttcaacatggacgtcgctttgtgattttgaagcagccgtcattgaccatttcgaaaggtaaaaggtggacaaaaggccgacaaaataacggcaagacaaaacgacacaagtaaagtgaccatcaaaaaccttcattttatgaaaaaaaaatggaaattttttcatttcatagtgtcaaaatctttaaacaaaaatgttttgtcgtgtggcatgggtattgtgtcgggtttaatatcggtcagacactgagtcagtaatcgattgaaaaaactgagaaaattagaaaatgtgactttactcaactttactcaaccaaatattttcgttagcgacgtttattcattcattaaccatccctcccctttcagtgctgctcttcaccgcttcgcttctcttctctgtgaccccaatccgaacagttcgattctgggtgggcggaacacggcgggggctggggaatacacagtataattttttatggttaccccccccccccccccccagttaaaagagccaccatcgctcccactcgacgactccgttcgccgctggtgaactgttgcaggacaaccatgtgaccgacgct

SEQ ID NO: 24939 - DNA, 2233 bp, Heterodera glycines
atgtgcgttcccgactttttgcattttgttgcgtttgcattcggctgaaagggctgaaaggggcggcgagtaattaaattgaatttaattgtttattgtttgtttctttgtccactcacttcgttttggttcgtttgaaatgcgttcgaattggccaccatttgctgctgaatgttttggtccgccgcatttgtggacatcttaaaatgtcaattcaatttcaatatttaatttgccgttaattttcgtttaaaatttccttttcattattaattttccattttaattttcattttccttcgcttttgtcctccttttccccacctgttgctgaaaatggggttgactcatctctaccagtttcagctcctcttcgtttatttgccatgtgccggggaaaaacatttggtggtgggggtggtggtaaagctgttcaacggcacaattttggtggagggcggcggacggattcaaactgaaaaaacgaaatgaaaaagggttttggcatttgggattttcatttttcaaaattatacccgttttctccgaacagtccgctgccataaaatgccatcgccgcccggggacaccgccgccaaatcgtccgttttctcgcatttcagcacatctatacctcaaatacacctatagtaattcatttttgaatttcccgggttatcccccaccctttttttccactttccccctcgtttctcccgtttttcctccttttccggggatttgtttcgtccttttgcccacctctgttgctgatgctggcgttggtgtccgacagcacggacatggaggacaacagcccctcgggggacaccagcgaagacgaatcggacaaattcagaacggaagcattgcccgaggcattgtccgggacggtggcggcattcattcacacaaaagacggaaagagagaaggaaaaagtgggaaaactgaacaaattgaaaaatgaactaaattaataagtgtttaatttctttggcaccttaaaatgcaccgcaaaaggcaaaaaaggcggagacgacggaataatttgggaataatttgggggaatgagggcaatcggaggaaaaaggcacaaattaacgaaacggggagtttcagctggacactttctacagtaagctgggatatgactaatgaggaggacaaagggaaatgaattaaaatgagacaattgaaaaaacaatgggacaattaaaaatgcaattgaaaatgcgcgaatttgcaaaaaacagcgaacagtaaagaacaatcactgcacaaggtttgttttgctgttgagagtttctctttcggatgcattgatctcggggaattcgctgcgccaaatttgaattaatttgactgtgtgggcggagggggggggcaagcgaccgacgcgcgagtcgccaaatggcgaacgggtcgagagtctcgaggcgggcgcggggattgtccccgcacgcatccccgaacaactttttgaccaatttgacccccggtgcaattccatgttctcagcgtgcgccatgggttggcattggcttaaggcccatccccgccgtttgtccgtccgtcccccgccctttcggggtcaccttcccttccccgtttcccttcccttccccgcttcgtttttcctgaaattccctcccaaagtgtcttcttctttcttcgcttctcgccgagacgaaagtgcgcccgaattcaccgcactttctgggttatctgctcgtccgtcgatgatgttgtgttactcaattcgggaggggaggagtgtatagtaaagctctgcctgtgaatattttttatgatttttaagattggccaaatttattaagaattgctccgaatttaggaaattttaccactttaagtccccccaaatttcccaaactttaataattatttcgtcctctccttttggcactcgaactctttttcaaaaattttgttacaaaacgaggaccaggcgagtttgattttttcaaatttctttaaaaatttggatttcgtctaacacaccccttaaccaattagttatctcaatcaaatccgttttttaattaaaaacaaaatttataccatttttctttttgcaaggaaagagtttcaaagagcggccggtcgcgcaatgcgttgaatgagcaagaattttctcccggtagcacagcgtgttcaccgaatctgccggaatcacctgagagcttagcgcctggccaacggacagggcaa

SEQ ID NO: 24940 - DNA, 1134 bp, Heterodera glycines
tggaattgatgagccggctcaatatgccaagatgaacttccgtggtgcaacggaagcatatgccattgttcattcaatgccatttgcccgtctttcgcatcatgttgtcaaattggcaattcatttgccaaaccaacagcccattgtatatagggcattccagctggtgagcaaagctcaacaaatccagcaaggcgaactgccagaaacgcagtgttcagcctattggaaacaatggcaaaatgagtggaagaatgatccaaagtttaaggacattcttttcgaaaaagtcccagagcggttccgatgggcaaaggacaaatgggtcctgtacaaaaggcagcaaattaaaaggccacctatcggccgaattgttcctgtacccccatcggacccggaaaggttcgcgctctattcacttatgcgtcactttcctggagacccagaccatcttaagatggttaatgggttgctttgtacctcattcactgaggctgcaataatgcatggtcttcttgaagacgacaaaatttgggacaaaactctggcggaggcagctctgtcgcgctggccagatcagatgagatggctttttgtgagcatcctggtctatggccagccgagtaatgccatagaattgtggaacaagtacaatgaccaaatgtacaatccgcaaggcattattactctggcacagcataaagtagcagagcttgaagccctagccgacattgattggcggctgcacagctgctttaacttaagctgtgtgcattttagcctgccagacccgccaacttcaattgccaaaaatactgacgcggcaattgaagagtttttctttggcgatgatgatttgaatttgcctccagggcaaccaaatcctcgtccacagccaaatacccctccgccacttaacagcgaccaacagaaggtctttgatgctgttttgttggcaatacagtcgaaccctagggattcgactgtcccccgccgtttcttcatatacggcgatggaggcacaggaaagacattcctgtttggccaaattattaggcgcttgcgaaaggccccatacacctacaaagtgcttgctacggcatccactgggtgtgcagccattttgctgccata

SEQ ID NO: 24941 - DNA, 971 bp, Heterodera glycines
aaaaatagataaaaaaaccgatggaaatggatgatttaaaaaaaaataaaaataatatttttagagtttcgaccacctaagcaaggccttgctcgaggctatgacctccaaacagaatcccagtcagaaatcacagacggatttgttcatctaccgcgtgttccgttctctcccggccaaagacattcccaagggtttgctgaaggatttggtggccattctgagcaaagtcacaattttgtctactttcccccctactttttaaccttttagcatggctctgatgccgactctgaagtgagggactcctcttttgctgcgttgggtgccattatgaaatgcattggggaaaaggccttgggctgtttcatttcacccgaattggccaaagatgcgaacaaaatggccaaggtcgtttcataatttttgttttttaataatttctttcctatttttagattgctgaataccaagacaaggcaatggcagaagctgctgttataacacaggtaatttgtcttcgtgtggtgtggaaaattggaattttccgctttttgttcgattccgggtttggtgtttggaatgaatggcgagcataaatatttacgaaatttactaaactaaattgtaagcatcaagttcaccaaactataaggtgtctagtgttttttaaatatacttttagaaccaagccagtgcccatgccaatgatttgtctggcacttcgtcctccaatcagcagagcgatgagtgcggcacccaacaaaatgcttgtgaaaatgaagttgatccatgggatttgatggagccagtcgacatctcatcgaagctgaacatcaatttcgaaagcccaaaatggcaggaaaggaaagaggcattggacgcactgcaacaattgttgttgcaatctccgcgactttctgattcgccaaattaccgggaggtcatcgaacgcttagcaaaggtatata

SEQ ID NO: 24942 - DNA, 2412 bp, Heterodera glycines
  unsure (1)..(2412): unsure at all n locations
tagaaacactcaggctgtctttaaaatttttgacagccattcaaaaattttntataatttgtgtttctataatgaaactcattgaaaatttagactgctttgcctctaaaaaggctcttgagagatntattntagaatgtgaaaattttattttcattattattttggcatttctttagcatgaattggtagatttattagtgctgacaattatattaagtagaaatcactcacaaaggaggggtcggcaagtgaccgtgggatttccaaatgaaatttggtgggtggatagatgacgcccaggttctattgtgaaattttgactatttttgccaaatgagcatgagtgccgagatatgacgtgccaaacttttttaatgaacaaacaaattaaataattatttgcaaccattcgcattgtcaaatggtgtagaggtaatgcgttagtaacagtcgcaccaggttcgaatccgctatatgcaattttttttttttaattttttttttgctttttatgaaaagtcaattctcaaaagattagttttataaaaagactttatttttaattttactttttattttggtacatatgataataaaaaatatttttaattttactttcattttgatatgtacataagataataaaatatttaaaaaatacgacaggatatttattgcacctttatgtttaatgtagtaattttttgatttctaatggaaaaaaatttaaaataaaaaatatgtttttactaaaaatttttagatagttaactttgcatgaaaatcaaaaataaaaattataaaataatatatacatgcatgggattcgaacctgtgacataaaaaagatttgactaacctactacctctacaccaatggcttctttcttggccaaaaagaattatatcttttctaattaaaaaagcgtaaaaactttggcacgtcatatctcggcactcatgctcatttggcaaaaatggttaaaatttcacaatagaaactaggggtgatttacccacccaccaaatttcatttggaaatcccatggtcacttgccgacccctcctttgttagcggagaattgcctagagcattcatcctaagtattgtacaggaccgggacctggtactggaaaacacgtacaactaagtaccgaagacccatttttgaccgggaccgggaaaagtcacggctttttctcgggtttcccaggccccggttttgcccaaaattcccggtcccgtacaacttaccgtattttctctaattatatgcccgtctccattaatctgcccgtctccaattatctacccctttcgaagtaggttgaaaaataatctccctgtctctatttatctgccccgggagataaatagaatttttattttttcgaaaaaataatttctttttctattttataaaaattaatttgcttcaattttgtagcttaaaataccccccataaagaccaacctattttagaagattttggtgaaaaaaaattccactcgaaaatatgtgcacctccatttgttcccgaatcccaatgagtagggcgagaatttaagtcaaatgactttttttgctgactctaaaggccttatgtttggcatttttcgaatttttcatgtaaaattcagaaactttttaacaaaaatgcaataaaaatgctttttttttgacacgatgacattttttggagacatattcaaaataaatttcaaaaattttccactaaataaatctgtcgaaaaataatctccctgtctccattaatatgcccgtctctaattatctccccctttctgagggggttgaaaaataatatacccgggcatataattagagaaaatacggtaaatgctaaggtaaattgtagagattttctgctctttcagacaagcctaattgttttaacggaaaatttttaactccctagaaatttttctgaactaaatgtggtaaattttacacgtcaattcacacttaaaattaacgtttattcgtgatcatatgcttcaaaaactcgtgtaaacaagattcaggattaggtgtttccctttgatttttaataaaatttgaatattattagtgggcacaacagtaaaagtaccaaaaattttaatttgacactctgctgcggctgctctcagatttttggcgcttgcaaaggcccagcgcgttgaagaatcaacttacataatgggaaaagaaaatgcatgcaggaaacagactttcttttttgtgtttgcgcattaaaatcggtacttgtatttgcatatttttgcatgtttgccggagatttcatcagcgagtgatttcttcattaattgatgtcgttagagaaaatgatcgcaaatcctaccataccataccatatcgtactaacacaacctaacataacttc

SEQ ID NO: 24943 - DNA, 1146 bp, Heterodera glycines
cccccccccccccccccccctctcgccttaacggggagggcatcggtacccatccattccatcaatgctcaaaaggttcttctgttcgttcgtcccctcctcttccatcatccgcacttcttcttccgacagtttcttcattcattcatctcttctccttttccccgtcgtccatcgcttttactttccgaaaaatgtccataaatgaaaagtgcagatgattttgtctccgctttatccttttggcactttgtccatttgtttcattttgtcacaatgttttgccaaattcttaatccccattaattttccgtttcttaggcttttcctccgattgttttgtgctttcttctccctgccaatgcgtcttcttccgttttgcttcttcctcctcctccccctccttttgtgcttcttccttttcacttttggctcttcttctccgatcgtcgattccgaaatgtttctgcccccgcgcttttacagaacaatttggcccattaatgcgaaaagaagccgtgagtaattaggcgaagcatcattaaactaaacctctttatgctttagcaagcatcggactgtccctggccgaatatatggccgcaggaaaccaaggccaggagcaatttcatttcatccccggaagcggaaggaggaagtgaatgccaaaaacggacggaagatgaagcggaagagcggaaatgaagaagaagaaaagcgaatggatgaaaagaaacgccggggtggaatttgtgaaggatgaacaagaaataactgctgttgatcgattgacccttcagtgatctgatctcattgaatatttcatgcatttttcacataactttatcctttccaaccgatggtgagcaaaagtgagcgaataaatgatggttggccgcttcttcccctccccgagcccattcatccccttcacccatctttatcacatttccatctttgcattcattttgcattcgtttttttttgtatcacttccttctataattgctttttcccttcttttcggcgctctttttttgtgaccgtcgcatggccattttgcgctaattgagcctaatgaacctgcgacgttccctatgggccccaggcgacgttttccccaaaatgaaccaaaaaatgaatttt

SEQ ID NO: 24944 - DNA, 1291 bp, Heterodera glycines
  unsure (1)..(1291): unsure at all n locations
atgatggcattantgggtgaaaattatataggtacataccttctgatggatttgacgggggatcaatttcattatagaatttttgttcgaattcaggtccgggattcgaaattggtcaaaatgtttgcagcaattttttttaatgtgaaaatttccgagtctcatggcaaaatttgccacattttattctttttaatttaacttagcaccgaacttattaattttctagtcaacatttgctgggtgagccttccttccccaaaaagtttttgataaaaatgcgccgtaaaaaagtaccgcaaaaagaaaaatgtaaaagattccttaattaaaaaaatctaaattttggggtcaaaacagaatccaaagccgttgtggcgaattaaaaaaatggcgactttgtttgtgtcggtgtcattggcgttgccgccgcttttcaccgcggcgcgccaccgggcgatgccaatgacgcgagggaggaggcgtacgacgatgacggcaccaccgctgcggcagccggcaagaaaatcaaatggtggccgatcagtgccaaagagcctctgcggtggccaagggccctcgcacagaaacacgcgtcaagccgacacaaaatgccaatttaaaaattcagtaaaatagattcgatttaaattttcatgacacggctgctaaacatttttgccagataaaatagaaaaataagttaaaactcggtgctatttgatcccaaaaagagcaaaaatgctcggttttgagcgattgtgccatgtgctcatgggttttcggcggtctaatcacgaatttgatattcaaaacgagttgggtttttaccatttcatgcttaatttaagggaaggaaggggcacttctaattcaaccaatacgatttatgacaataaaatatttataaacccaattgaaatccttggcttttttttaaatgaaccgtaaactgttgctctcgaaaatttcaatccaacccgactgttgaaaagctcgttcactacaatttaagactatttactaaaaaactttttaagtgagacatcaaaacgtttgatcattttaaatccatttcagggtccgagctcctccgaaatgattcgttgggcttcactttccgaaagaaatgggatgctgtatccgtcctcgcctccattcgcaatcgcatgttggcaatgtcaatgtcagcgttcaaaaagatcatgatgtttagcccaaaccttaattnatctatcagtgatgaggaaacaatggaaaagataaagagctacagagcatgattttttgg

SEQ ID NO: 24945 - DNA, 1956 bp, Heterodera glycines
  unsure (1)..(1956): unsure at all n locations
tcaattttacctcaaacacntttgaaatgtatttgatcttcgttgtatgggcgaaaaatgataaagaatgagatttttgggaatttttatgcaaaaagacacttgatttttccaatttttaacacatattttagcacatattttggcatttttggggtttttagcacatattcagcattttttagcacatattttattacatatttcaggatttttagcacataaaaatcccatcactaattattatttttatttaattacttttttgttttgtttttgtcccttgtcctttctcagacctttttgtttattttgtaatttgttttgtttgttcctttgttttgttgatatgttgtatttttttgttgtcaaatttggcgaccgacaaaattatttatccaaaaaaagaaatggtgttgaatctcattatttcgggaatgtgttttcgacagtaaaaataataaatcttctgttccgcatttaaaatttgcgggatcccgcgcgggattgcgggattttggaaatttcgaaaaaatttagaattaaattttgaaaatctctaaaaaagctaaatatacctggccattttaaaaaagaaatttttagaggctggcggtatacgtgaaaaggggttaatgagttgatcaaaattttgtgttcggcggtgccgacaggcgccgctggggaattttttcaaattctagatgaaatttcagagaaaaatggctttaattgacaacagatcaatgccccctcccccatacatgaaaatcagcttattgacaacatttttcacatcacaagtaggcatgttctatgtcgtcgtattcctttgatgctctcgctgaataagccaatgccggtgcgcatggcggagttaaagatccgcatcggaagtgatgaagggcgacacggctgatccagcttctgcgagcgatgtccagcgggatgatgttgcgctcgtcgggctcattcaaacggcgccatttttgtcacaacactgtgcgtcggcccgtaaaatcccgacgaggactctgtcccctgatggctcactaaataaaattaatttttattcatggtatttacagttaatgtaaccaatttttggttatgtaaattcgtttctacgaaaacccactatttgcacacgacgcctgagccactatcaccggcacaagctgcatcggagtgacctctaaggcaagttgtgcccataggaaatatgtgatccggcggttttgactacagaaaaaatatctttattaaattaccaattggcttacggcatcattgcagcacgacagcggcgtcaaaacgcctgtcatgtaaagccagcgctttgtgttctcgcatctgtttccacttttggtgaaggactgtccgcttccttagaaaataaaataaatttagtagattcaaaatattttttatattttattggattttccaccttagaaaatagccaccaattacgtttatcttcaactggtataattcttagagggctgtgcaagaaatgatttttacgaaagtgataattaatgaaatttgttaatataccttaattaaaaaatgccaattttgcgattttgagccatttttaagagaaatagtgaattttaagaaatcctgtttatcgatgtaattatttattaaagttaaataccagcaatctgacagtcgacccattggcttgatgtgtaaaccggctcgaagcgtgggaaaccaatggttcctaacttccctaagaccaattcaaaggggagcacttcgacggcagccaagtcaaatgcggcgccatttagtaaacggaaagcggggtggagcacaaagcttatcacctttgaaaaactcgattaagattaacgtgctttcaaataattcttataattaaatttgcgcccctattgtcggatttagacggagtaattgctatttaaatttaaaaacaaaaaa

SEQ ID NO: 24946 - DNA, 1366 bp, Heterodera glycines
  unsure (1)..(1366): unsure at all n locations
aggtaaaaatgctatttttagagcttttcatgcgattccatttgggcaaaaaaatatgnaaaaacatataaatcgcgnnccttttcgaagaagattatggaaatggaaagatgtaaatgtcctttttcaatatgtataatcattttaatttccaatgctgtgcccattttttgcatcttgttgtaactgaagtagtgaaagccgaactttctcaaattgtcgacaaagtgcgagagcggacaagggaatgtcataaaagcaggataaaggaagtattccaacgtcaccaagaacagatgaacaccccaaaaaagcatcttataatggttggaaaaaacaataaattaaacacctatttatttctagccggtttcaaccagatagaattctgttttttccatgttaaaagcatttttggaacgaaaaagagcccttttgatttggttgttggtgagaattgttcactcagttccagcaaacgtcagtcagttcagagcgtctcttctcaaaagctgggcacatttatagcaatacgcttcgaaatcggtttcaaaattatatgactttacataagaactctgttttagcctatccggcgaactattcgaaaaaaattcattataaaagcgaatttggaccagctttagcttgcacctaatactcaattggaggaataggatcatgaagcgtggatgaagaagtgattgtcgatgaaaacatttttgaagatttttgagaataatcaactgcttagttatgaaggatgacctcaggagttgaattcacgcgagattagcggaatgctgagattttattataaataataaaaaaatgaacccgaaaatacattagtcggagggccggcgttcttactgcagtcgtttcagttcctcttcttcttctgtcttctggcacacacacttcttactacacgtctgatggtagtagcgcctacacttctcttggcattcctaaacaagcacatcatcgccaatgatggcggccggcaactccccaggcttcttggcacgctgcgccaacactttggccaaagttttcttaaccttcttagccttttgcttgaaccctaaaagtataaagatttattatgaaaagttgtataccatctccatggaaatggttaaggggatggataccatccccatagaaatgcttaaggggatggatacatccccatagaaatggttaaggggatgtataccaaccccatagttaatcactcaccggtctgtacgtctttgccagcttcttcctgcacgtcttcgtcgtcgtcctccgccatggtttcagactcttccgtcagacaactttctttcagatcttccgactccccctccccctctcc

SEQ ID NO: 24947 - DNA, 2243 bp, Heterodera glycines
tgagtaaaattggactatctctccaaaacaattattgattcctttctttcttttcctacactcttttcttttctcttcttttcctcctaacgctgcccacctctttccgtgttctctttctttatgcaaaagttaaagtgacaccgttaatgaacggatttttaggtttttacttattttttctgcggctttaactcgacgagaaatgcagaaaaacatatttttccgaaaatactttaacgctcctatccgtcctagaatttcctattttggatattctcccctaaaatcactattttgagtgttcgcccccctaaaataagttttccatattttggcgttcgcccctttttcgtccttatttcgagatggttgtaattatttcctttcttgacaaatttagatttttgaaattttttattttggaaaaatgcttattcaaaaaatttgaaataaataattatttgcaatactaaccttgaataaattattctttttaggttttaatttatttttatacaaaaaaaataataaatttcaccgctacatttgaaattttttcgacatcttttcttcactatttcacgaatttttcgcccctaaaaatcagtcccctaattatgaatttatacttcgaataatttttcaatcaattatatttttattgatcaaagtcatattagaagtgaatacaaaacaaatttatcatttataatacaaatgtttataaatttgaccaatttcaaattctttctctgttggcccgccactagtaccactattattttaagtaaaaaaaaatgttgcaatctttaagtattttaacatttagacattcgtgatctaagagaaaaaatgattattgtaaaaacataattccatttaccaaacaagaaataatttttgtctactaaagtaaaattaaaatttctaataataaaaaacattgtttaaactatgtatttccattaaaaaccaattaatagtgcaattattcctattttgcaaacataaatataaaataatattttcaaaattatgaactaacataaaaatttattaacattaattagaaattactgaaattatatagcaaaaccatgctaaatatattaaattatatcgctcaaaattataaaaaaaattcctcgtttttatcgataaaactcaaataatcttattgactcaaatatttttttatattaaaaacttataaaaatagtgcactcattcagaatgcttaaacataaaactaaaataacaaacccataaaaagtcataattaaaaatttaaaattattctaaattattaaaagcatgaagcaactaattaatgcacagaatcaaatgatgatttaaccaggaattaattaaataaaatattttctataataaacaaatacataataagattcatcactagggtagcaacttttagtgacgaaaaatcccgaaatagttaactaaaatagtgagtaaaaatgccaaaatagtgaagaaatagtgacaaaaagtccgaaatagtgacgaatagtgacataattttcagccaaaaataaagcaaaaataatttttattcactatttgcagttgcaaatgagtagggctgggatttttaagggcaaaaaaaacaaaataggtacataaaaaaataatttttaaaattaaaattcttgccacgaaaatacctttttgagaaaatttttttcatttcttaggagcgctttttgaaattttttttgtcgattcttaggggtgtattttttttgaatttttttaggtcgattcttaggggtgtattttttggttttattgcatttttgttaaagaattttccaaaaaatgtcgaaatagtggaaaaatagtgacaaaactccaaaatagtgaattttcactattttagtgacaaaatcccaaaatagtgatttctagtgaccgataatgacatcagaatcgaaaaatttttatgcggaaatgcgttttttgagctccttcaaatcaattgagcaaaaaatagttaaaacctaaaattcacgtccctacttataagaaacttttacctttgtcgcttcaaataattccaatttttcccgttttccgaagcagctaactaatccttttttagaaattctaaaataaattgcccaggcgcagcccgtcgacaacacgctgactgtgtacggcggccacgagaacgttgcgcaagtgcagctcggcaccactggtaaagaagcaggggcggg

SEQ ID NO: 24948 - DNA, 1569 bp, Heterodera glycines
atatacaattgtcacgtacacttaatgataccgaatccattgtgtaccgattggatgagaggtgaacaacttttaactggttatgtggaacgaggagaccttgtagaaattcgccgtggatcttacatggtttttgcagtttttattttttatctgaccatttttttcttagcattgggctgtctttatcggacatatcagtggacaaccgcttgtaattcatatttcgacagagtcatccgatatgggaattagcacaaagaaggaatttgtccggaagatggccaagggttgtgctgctattgtaatgcttctcacatccatctgttcaactttacaaagactcgtcctttctctccgtttttcatttctcaatttgttcaaggtccgcagcgacccttttctgaatgttatttcgactgacttctgtcgtgtcaataattgtttggatgcaaatcgacgaccttttccaccctcaattattgtcgaacgggcattgactaaggcgagttatgcctatttaattatgtttaatttactacagatcctttttagcttggaactggtgggtataatctcatcaaaaacaactgtgaacactttgctaaatggtgtcgttatgctcttcgagaaagcgagcaggtgaagagttttttgtcattaaaccaatttctttttttgactggctgtagagcattctgggccatgcggggatgatctgtgtgacggcgatggctgtaagcacttcaattcctgcgggcatcgctgccggtgcggtcagttttatcgcgttgaaggcgggtcaagcattgagacggaagcgaattgggtggtcaatcatttgaatgttgaccactgttaaatgcgcacgaaattttgtaaaattcattccaaaccattccttgcattgtcagtttatttcttatttgtatctatatatatggtcgttttggaaataaatgcatgtacaactttgtaactagtattaaatgtttccattgtccaaatgcatcgaaattgcatactgataagcctgtcaaccgttaaaaaaacattcttcatcgatgattctttttttgcttatacgttagttcaaaagctatcaaataaattttttccctcttgacgtattatttttatatctctaacataaaaattcctttatttgtggttatttttttagcttttctaaaaattaactgctgccaaagtcttcatcatgtcttcaaagcctctctacggaaaggatgttgtgagtttttctgtctaagcagtttaaatcttaaaaaattgcttatcacaataacttgataaatatgtacacgaataatggcgacgtcaattttaacttaaaaatttagcttacggaaggttcggagatctcgcgtgaattggaggtaaatattcattcatcggattgtcttttcatttagggttaccgttaagggcaaattttataataatcacttcgatttcaatatttttgtgacaagtttcgaatgataaagaaactggcccacatctttcgtttattaaataaattccatttagacttatttatcattttta

SEQ ID NO: 24949 - DNA, 1351 bp, Heterodera glycines
atgtccatatttcgagattttagcccatattttatggctatattttgcgattttatatccaaaattttccgagccctagtcattacggaacctatggagcgaattgggttacattgacgcatggctcaagcgaaacatgaacttttattttgtaactcaaattataaatacaaatgtaattttttacaaacggaaaggcagtcggaataaaagtgcaaattcgtttactaaataatgttttgttggccattttctttcattttctgccgggtattgctccgtaaatgagtacgacgattccgagcagaatgagaagggagaacagcgcgagatgaatggtcacactccaccaggcgaaccaatacaaagtgtgctcgcagaaatgcctctcgaacatataaagctaaagtcagagggaggcggtgaatgcgtggcattcttttctttccttcacctgactgtgcatgtaacgcgacgcgccgtacacccaaacggagcctaaagcgaaagtcgcccggatattcatcagccagcaattgctaattattacccaagatgaggacgacgaggatggcgaacagtccgatgccctcaacggcataagtcagcgcgggacgacggccgtgcgaatgacgcatttgacgggtgtcccttctctttgtcgagtcagtcggagaagcagaaaggcttaggaaaaggcgtgccgctccattgatgatcaaaaggatgccggaaaggatcaaataaatgggcacgttgggttggatgaggcaattgtacggattcgcattgagcgcacctgcgaatgggtcgggcgaatttggagagactcaaagcatttgggcacgaacgaacccacgaacagtgagacgacgccaaaaagcacttccaaaacggagaaaactgcgcacactgccggtggaattttgttttttggcgaggcattcgcccggtcaacgtcatcccctcgggggacggaggagtgccgaacgctgggaattgcggcgggactttgctggggtcgaatttggagaggttggaacggtggcgaggaggaggagggcacgaaaaggggttgtggatgtgcataggctgctgacaatgagtgcgagtggggcgaagactgaacgctgttttgggggtactgtcgttgttgttgttgttgggcatacggtacggaagatgaagcgaaggacggcacggcactgcccttctgttgagtataaacgggcggaactctgagcagtgcctgggccgatgcattgggaatttggagctgctcatgggaccgcctgctgtgcttgagcaataaaagggacaatccggcggatttccttctcattaagctgaa

SEQ ID NO: 24950 - DNA, 1093 bp, Heterodera glycines
gactcgctgtgcttgcccactgcatttcaaatagctggtaatttttatttctccggcctaatccagaaaaaatcactatctcttttttttggaatattttacgtgtcaaagggtgtgcatttaagcgactcgctgtgcttgcccactgcatttcaaatagctggtaatttttatttctccggcctaatccagaaaaaatcactatctctttttttggaatattttacgtgtcaaagggtgtgcatttaagcgactcgctgtgcttgcccactgcatttcaaatagctggtaatttttatttctccggcctaatccagaaaaaatcactatctctttttttggaatattttacgtgtcaaagggtgtgcatttaagcgactcgctgtgcttgcccactgcatttcaaatagctggtaatttttatttctccggcctaatccagaaaaaatcactatctctttttttggaatattttacgtgtcaaagggtgtgcatttaagcgactcgctgtgcttgcccactgcatttcaaatagctggtaatttttatttctccggcctaatccagaaaaaatcactatctctttttttggaatattttacgtgtcaaagggtgtgcatttaagcgactcgctgtgcttgcccactgcatttcaaatagctggtaatatttatttctccggcctaatccagaaaaaatcactatctctttttttggaatattttacgtgtcaaagggtgtgcatttaagcgactcgctgtgcttgcccactgcatttcaaatagctggtaatttttatttctccggcctaatccagaaaaaatcactatctctttttttggaatattttacgtgtcaaagggtgtgcatttaagcgactcgctgtgcttgcccactgcatttcaaatagctggtaatttttatttctccggcctaatccagaaaaaatcactatctctttttttggaatattttacgtgtcaaagggtgtgcatttaagcgactcgctgtgcttgcccactgcatttcaaatagctgggtaatttttatttctccggcctaatccagaaaaaatcactatctctttttttgg

SEQ ID NO: 24951 - DNA, 2119 bp, Heterodera glycines
caaaaaattttaacgcagaaatgctatttttgagcccctttcttcatagcatatgcgcagaaaaaaatatgttaatccatataatttgcaaccctagatatgacaccgaaaagaaggaaataagatttattatatatactatatgtttatacagaaaatggaaataaaatttatatgagacgaaattaaaattatttttaagaaatttaattaatgtgaatttacgcactaaaaatatgcctaaaaattgccaaaaattgtgtaaaaattcaaattgactttaaaaataccaaatggctaatgagcgtttttatcatttttgaaatttctctggccatccacgacaaattttgtctaagaatttcctgcccaaaaggaattgctcctcgatattttttaattttctccagccatccccgacaaaattccccgtcttttttgctccacgaagggcggggagtacaaaaattgtgaaataattaaactaaaatttaaaagaattaatttcagcctaattttaattaattaaatgcaatttcgctaccaattcggttaatttttgaagtgagctgctgttatcattacgcacattggcccaaattgaaagcttcgagctttcttcgtccacctccaaattgtccaaactaaattcacaattgtacccaatgccgccgttgggcacattctggcacgacaaatatttttgctcaattggcacaaatttgttgtcatattctttaaaatgagaaaatttaaaattttgtactttgctattttttatttgattttttttcttgaaaatatggagaaattttttctgtgccattgttgagtttggccaacattgtcccattttaggaaaataaataaatgaatttcgcccgttttgcctgggggcaatggcaaatgccatcgcaagagaatttttatacttttttaaataaatgaatttcgcccgttttgcctgggggcaatggcaaatgccatcgcaagagaatttttatactttttttaggtgtattcgaataaaaacttaaaaattggaaatttgatttttcaaaatttatgggttcgattcattggttaactgtcactttgcaaatagcgtcaattttttttttgtaatatttacatttttaaaaatatttaaagatattttacgaattttaacaaccattttcagattgttagcaagacagaatccaaaataaatttatgaattaattagtttaaatttgacaccattaattaatcattatcgaacacttacggatcatcacattgctcggcattttgtcagtatacgtgctcacactgagcagcaagaaagcaaagaaccttgatgaaaggcaatataaaaaaatgaacaaatgcttcacaaatttaattacatggaaatcaattaatttttaaaattagtaaatttcacactaattagagacatttaagaagcaatcattttttgggtttcttttttcttacattagttatgcttagtttgagcatataaaccttactttttttgaagacttttcttcctttttatttttctatgctttttttcaacataaaatttaaataaagtgcaaaaaaaaatttaaataatttgaaaaaataatttgttttactttttgttttaaaaaaatcatggctccaacgagaactgatcaaaatttctcctgatcagtgatcacccaccattgatcccccgcgccaacttacatgatcaattttttaactttgcttctcattcctcccatatctttgctactcttaattctgagttttcgcttttccttcagctttatccctttgtttgttgttttgtgtccattttgtgaaacatgtcttaattcagttttttcaatttaaaaatataattttaattgctgttgaaattgagccccctcaccaggggctttaaagacataatttaattgccgtttttcttgaaattgagcccccgccccaggggctttatatttcaacccctttcaaaaagtgggcttttcaggctaattcagcagggggggggggaggggggaaggtttttcaataaatgcaataacttacattttatgttgacctcccccttttccatgtcgattattttttcggt

SEQ ID NO: 24952 - DNA, 1882 bp, Heterodera glycines
  unsure (1)..(1882): unsure at all n locations
tttaaatgaattttgactcattattttgaagaattttttattttagatctgtttgtgactgcaaattcatcatgtgctccaaagagcgagtgagtggaaattatgtaatataatttaaaaaaagggttaaactattttaaaacaatcgaatcctgacaaatttggtatcgttctaaagctcttgagagctaggtctaaaaatcagggaatgaagtcgagccgatgcaaacccggactcgaacaaaaaactcaaatttaattttcgccaatatgaattatatgtcttgccttcagaatactattttctgtttatttcatgcagactaggcctaagcaagcctaagctgaatccaaggcctaagctgaagcctaaacctcagttgtcccagtgcactgatggcgtcggctgggttcatttcctgatttttagactaagctcgacaagagctttcggatgtaccaaaattgtcaggattctatcgttaaaaaaagttagagtgccaaatctcccaatttttcgagtgttggtcggttcaaaaaccggttttcacgggctgttcattacagtacacccaaaatttttaggagcgtattcagaaaaaagtaaaaaacactttttttaaattttaggaatgcactcgtaaacgggcaaacagtgatggatgttatttatttgaggtgatattcaaattaataattaatttgtaaaattaaaattctctaaaattttgtttatgcagtttttcgttaaaattataattcacggttttttttattctgaaatttatttttgatatataattagttagaatttttttcgggttttaaagcagtttttcgttaaaattaataattaaagttttatattctgaaattatttttaatatcgtatttgttagaatttaacgaatttaatatatttttttaatttcatcctcaatttttttgaatttatccaaatgggaattttaaaattttagtatgagaccggaattgccttcctgccctctcaaatccgaccgtcaacacatctgcgacgccgagagcaccagcagccacatgttcaattggaagattttaaaaaaaaggtaatctgaccaggggaaaaatcttttttttggtttcaaaatttgtgtcgcggtatttggtgatttgtaacttggggccccgacatttgggtaaccgacacttaggattcctttttttgagaccacataaactccgggattctgttaaaatcctttggccactatttcaaccctaaatgtcacattaaatactttattttaattttaatttgcgcgattaaattaatatgtgatatagtaattttaaaaaagagatacagtatgacaatgaattttgatattttttttactgtatttattactgacaactttaccgggtcgcaaatatttttatttatttcatttaaaaaatgttcaaagaactgtgagcagaacaatcctgaaaatataatttaaacaattttacaatttttaggaacaatttccttgcccgaaatgtgaccgagtcttgccctccaaacaaggactgtcaaatcacctgaggacagcacataaatcaggtgggcaatgacaatgtgtttattcaagaagaaaatgaaaaattttttatcaaaaattgggaatgtttgaaaaaaagttggttagaatttccaaaattttactcccaccgttgcgctctgaattaatcctctagaaatttttttataaaaaaacacnnaaaaacaaaaaatcnantnacaaaattaanaaaaaattaaatattacttcctaatttttaaagaaataaatttctttttatgttataaagatatccctagagggtttaatttttcaatttttttcagacaacccaa

SEQ ID NO: 24953 - DNA, 1453 bp, Heterodera glycines
  unsure (1)..(1453): unsure at all n locations
atatatanccaaagattttataccaagcttatttaccatttaaataatttgttttagcttacaaattagttctgttaaaaaagcattgcacaaactgtcatgacaattttttgtgcaggtaacaaaagacaaaacaaaaaattttgtcagaactaaatcaagaaaaaatcatgatttttaatcaaaaatagttattataataattacataaaactcacctgtacttcgttagttaaaatttccagtcgttaaggcatccataaattttaatttcaactgttgaccaattaattgttcgtaaacattgcatagatatcgcataacaatttaaaatccataaacataaactaatcaaaaaccaatctaattcttcgctcttttttatcataaacagtttctattacaattttacatagaccattactataaacaaaacaattcatttttattaaataaaaaacaataaagcattagaagagcaaaacattttaaagaaaaaaattttttttattagaaagaacaaatacctaaatcattttccatatcaaaaacttttgacaaaaaaaaagaaattcaaaaaagaattcaaatcatttttaacgcaaaaactaaacaaaacgccacactaattcaaaacatgaacacatccggacaaacaatcaactttattatataagattttcaattttccttcaattcgatcacttttcaatgacaaaatttcactttttctttcgaattaattttaaaaatttttctgaatatttaaaaatatattttaatatttaatagtttacatatttccgcttttcctccttttttcacaaatattccgccatctgtgctaattccccgcgcgttttattggccattaattctttcgaaagaacgcaaaaacaaaaaacaaatcgaatcattaattgccaattgacttttaaaatattttacgggaaatattctggcaaattttaatttagaagctgagcagcaaatgcagaagaaaaccttcactaattgggtcaatttccgtctcgaagaggtggttttccatttagactttgttttggattttgttaattgccttttttaggcatttagctcaacttaattaagtttactgatcaatcaattcactttctttgtcccctcctttgctttgttccattagctcttttcttcctttaagcattcctcttctggcagagtgaccgaccttttcatagacttgcgtgacggcgttttgttgtgccgtttgttggaagttttgactggccaagttttggtgagtgattgggcttaaaatagaagctaatcaggcattaacggttccgttcttacctttgattgcgttattaagctcgtaactgcggaaagtgccgttgtcgcagtgtcaaaaaacggacaatcgaacgggtgagtgattttttgtgccaaaactcagattttgcatttt

SEQ ID NO: 24954 - DNA, 1550 bp, Heterodera glycines
cccaaccatcatttgtcacagttcaaaataggtgtgaatttcacaccttaaaccgtccgtccctcctccctccctccctcaccaattcaccaccacttcatccaaaaccaggtgtgaatttcacacctcattgccctattgacccccattcacatttcaaaaaaatcccgacccaacacctcaacacccacgggacccctccccaaactacgcaataggtttaggcttaaacagttcacccctcccgcaccctcccccaaactacgcaataggtttaggcttaaacagttcacccctcccgcaccctcccccaaactacgcaataggtttaggcataaacccaacacccctcccgcgcacccctacccaccgatcactcactctcgaccccctcccccgccaccttttgattgacaggtggcggcaccttcaaagcccaaaaccgcccaataggctcgcgtttgtgcgggaaattttcccgcccaaactacgcaccggggcggttaactactggttcatgcaacggcacaacttttctttgcgcacaccgacgtgtccctttgaaacggagccgtcaaaagcaaacggtgggcaaatggacgcgggaagcgacccttcgattggcatttttgatgctcatttttaattactttattatttattttaaaatagttgcataaaacaggaggacggatgtatggacgtccttttttattatttagcgaaaaaaaacaataaaaatagagaaatgtcgcaattattcgaaatgccccgttttctcatttctcgttcgataattagggttggtcgtcgggaagcgccgctccgcaccacaatttttgcaaattcgaacaattgcccccgcgcgtgccttgacctttgaattggaatgggaatttcgaaattaattcaaatatttgtgtgtattggcacacgtcaatttgagttttgccgttgatggacagccaattctggaagcaccttaaccggaaaagagcacagttattaaactgtgatgcttttgactgtgccttttgcaattgctgcgtttaaagtccctgtgcattcgcaattggtcaacgaatgcgcactcgcgcaactcccgcaacaacagccgactcagcaagttcgacgtgccatgtccggcagtgtttggcacctccgtttgtccgccggttgtgctacaacttcttccgcttgaacttcttggcccctcgtcctcctcgttgttggccaacagtgtcgccgcctgttccaaaaatgacacgcgaagcattgcctcggtgggcctttgctgttgtatgttttgttgcggctgttgtttaaatgtgccgccacttttcttttgggtttcatttttttgaattttcttccattaaaacccttttcaattgaaccaatgatctaatgacctcaaatgagagcaattaaaagcattggcaaatttcaataaaaaaaccccaagcaaatacgaagcaattcatccacaatgctttaagcaattaatataattaaaaagtgaaaattatattaataataaagaatttaca

SEQ ID NO: 24955 - DNA, 2214 bp, Heterodera glycines
  unsure (1)..(2214): unsure at all n locations
tttgagcatgaaagtgctagacagactggattaagctgtttgtgtaattataaaaatttacttntgatttattgttctgaaatttggttaaatgaattaaattaatcaaatattttagcttaattaaattaaaaaagaatgatttgctgcacttttgccgcaaatgcacgattttcagcaggcaaccttgcaaaagataatggcggatggattttgggaaaaatttaaatattttaagcgtgattagttgtgctacccatccatcgatgggatgcatcaaaaaatgggcagttgaaaattgagggaaacattttttgtcgagcggaatttcttggaagggatttgttcataatgtttttcggcaaaaaagattaataaattctctttgttaagtaaacaaattagacctttttggtttggtagactaattgttttttaattattatatatttgtccgcaaaatttcattttacaaggctctttaaaattttttcaaggattttaggacgtaaaaacaaaagctaagtaaaaaggaagaactaattacaaaaaaaaaacattggattcgaattacgaccaaaaaagatgataaaatgtaaaaagggttagcaccatgtcgaaattgttcatggacgatgcaggtcggccacctgagcagcaccaactccatccatcgcaagcattccatcattccgccgtagctgttcaaaatgggcgacgaaagggtcagtcatgtccgaggtggacatttgccagagtcgccgctcaatagctctgcccactgccttaaaaaagccgaaggagtaatcaatgttatttgtctttttttgaccattgcgacagttaagaatttggattttaaactagagtagcacggggctggaaattttgggcaaaaccccttaattacatatttatcaaatgaaaatgaaaacattaaaattagttttatttgatgtgggcccatcgctgccgaaaggcaacaatggggatttagcatgatttggtaacagatcttgcactaaaaataggtaatcattttagtttttttatttaaattaaaaattttcaatactgattttaaaaaaagttttctttactaattttcattcttgccagtgcttgtgtttctcggttgacctatcaggaagtaccgtcccgatcccgtgctaccctttttaaactttaaacttttggacatcccaatttttaaattgttgacttggaaaatggtcttccctatatcataataaaaatctcctcaaactgctattgtgaatagtttaactatccaaagatcttatggcaaggaaatttgctgctcattggcatttgcccttgttaaataatccggcatttagcgcttggccagttcgaaaggcccaaaattcaaattaatgcccgcccgttcagcttctccgggtctcaaacttgagttaaatactttgcttacaattagcgaccagttggtggcgctgctaattgtaagcctagtaatgctaattacaaatttgggaattcccattagtttggcaaaatgtgtgccatctgtcgcttttgtttgttggcatttcaattcaccgctgacaaatgagctatgcaatcacacattcttcgcacattgaaaaattggaatttgacttccaaaaattcaaattaaaccattttaaattactatacctacgcagtgggcaaatagttaactaattcttgtgaattattttgccttttttgtgagcgatgccaacctttgggatttttgttgcagtacgggcaaattgtcggggcgtctggcagcgcttggcccatgtccaacagcgggctgcccgaggaatggatgcttcatgagacggagaacaatggcattggcaccgtttcgtcatcaccaatcaccactaacttgccatgatggctcattgtcatgactatgagtcaaaacttggacaagcgaaagttcgctggggtatttagtttagtaaaaagtgccaaatgggaagggaaagggggcaatatgcaatgggattccgtgagaaaggcaattgtatatttaaaaggtgaaaaatgaaaaagtgacgacgccttatactttgaaaggtcaaaaatgcttttcttgattatttgtgctttttctcccaaattcctttaattttctttttcaagtttcttccaaatttcccgtgtggaaaaattttttaaattaaacaaaaattttta

SEQ ID NO: 24956 - DNA, 1542 bp, Heterodera glycines
aaaattattatagcaaaccatttatttcccaatgctttccgccaatttatttgtatcttgggaaagatagacgcaaaataattgtttagtcagcaaagggcaagatatattttctaaatcaaaatttagatttgaaaatttttcttcttggaaaaaattatcaaatatttatttaataatcatttcaatgaccacatctaagtttttagattaagttttacgtgtttggatccgtaaaactccttaataaatagggatgggatttttatgtgctaaaaatcctgaaatatgtaataaaatatgtgctaaaaaatgctgaaatatgtgctaaaaaccccaaaaattccaaaatatgtgctaaaatatgtgttaaaatatgttttaaaatttggaaaaatcaagtgtctttaggcatatatattgcccggcatgtcatgggatatcgcgcgggattcatcgggatcccagtccgcaatcccgcattttttggaaaatgcgggatttgcgggattaatcccgcgggatcccgtcccgcaaagaattttgagttccaatcccgcagcgggatccgcaaatttgattttttgtgcgggattatgcgggattttattgatttttttgaacatttttctaagacagaatgccaaatatttttaaataaattaaataataaatttaattaaagttaactcatttttcatcgcaaatttcattcaaaatttgtgaaattttcccggcggcgcctatcggcaccgccggataggcttttacttaataatcctgtagaaattgagtcaaaaacgcgtcatttggtcaattttagacaaaatctgttaacaaatcgcattaaatttcataaaatttctcgcagatgtcgataggcaccaggtatggcacggaaagacttccgatttccgacatttttggggtcggaattccgacttccgaaatttttgatgaaaagtcgtaaattttttaatttttttttaaaaccagtaagttttgtacaatttctaataataaattgaactgaaatttttaaaaatttcccggcggcgcctatcggcaccgccgtactctcctccaagttcccaaaaagtttttgaaaaaatcgcgctgtaaaaaacgtgtaaaaatagtcactccttccaaaaatgttctaaaataatgaaaaatgacaaaaaagattttgataaaataattgaataattttttcaagcgaatatactaaaaacatttgtgaaataccttttacttggttaagaattaaaaaatttagcctattaaaatatttagaaatttttttattatattgtatatttttttgaaaaatttccgatttcttgcaccgcaaaaaagtggttttgaagaaaaaaatagtcaaatttatgaaccgttaataatttgatttccgatcaactttttaccgtcggatccaatcgaaaaatcttagtcgacccatcagccccttttaatgcatcccgccagcccctaaaaatttattttttcagctttttttgatttttggaaattttttgaatt

SEQ ID NO: 24957 - DNA, 2255 bp, Heterodera glycines
agctattgtcgctggccggtgacagcggattgaaatatctgtgaatttacgaatgacgtgttctacacttgggtgaaccgcaagcatatccattacgtgcgaaaaaaccagacaaaaaggtggccgttgtggaaaatcacgaatgttgccgtaagttagcaacaaattttacaaataaaaataattgaaaattaaaaataataaaaatgaatgtcgaaattttgcaagactcggccaaaatagaatatttgtaaataataatgatcccaaaattttggtcaattaattaattaatgactgacaattttgcaatttaattatattaaaaactacaaatttttaggtgtccggtgatgccaatctgttcgaagaaccaaactttagccataccggactctatgatattggagtaagaaatttcgtttactcaaataatatttaattattattttaataaaatattttataatagatttaaatcaaagagaattcgatttgaaaaatgacatcaaaattaattttaaattgttttttagacatattaaaaattaaataaatttagtttactcgcatggaacgaaatagcaaaaacaactttctaaaacgattggacaagaaactgctcccaggctacatcatcgagatcaacggcaaactgacaaaatcccttgatgaaaatctgccgattacgatcagtttactaagtcagactgatgatcccaaatttgccgagattgagcatataatcaaatgcaaagaagaaacgggagtgaaatgtccaggtgaaaatatgaatgatgagatggtttgtttaagcaaattttacggtgccaaaaaacacaaactttggtttcgaaaattttgataatttttttaattagctttcatatatatagtggagaaccagattaaattctttgtataatttgacaaggaaatttaaattttcataaaccaaagacaaagaaaatcattaggggttcatttttaggctttgtggccacggaaagactgctttttgtaactatgtgtcgaacttcgaaccattttactaaaaataataagacattctgaaaacagtgaacacatttacagaaatcaattaaaaattcttccgttcgttttttgtcaaccacaatcataaaaaagttacagcaaaaaatattttaattttatatattctttttagctttttgtccattgcaacttgtctttttttggaattcttcgtcagcagctgtacaattaaatgtgtttgcgctaaacggcattgaaaacatcaacatttcaacgaacaaagatcttcctcaattccctcatactgctggaaaagagatcaaattgaggatccacattgcgcatactagtaagattaaaggtttactttaattattaagatttttgatttttaaaatatttattttagggaggttagggatccagaattgaccaaaaagtgatcagattcgtgagcagtgaccccgaaacccccggggaagcgttttctcgctttttatgacaaacattttccatataaaaaggtcctccctccttttggtttttttaaagttttctccaattggaccttcacagatagcacaaacacaaatattatgtattaaaatttttctgcctaacaaattttttttaattttgaattttcaaaatgtgattattatttttttttaataattttgtttcaaatgcttatttttaagaatacttattaactgagcatggactatcagaagaaattccctttggagatgaagaaaagagagcattgcccccttggcttgttgaattcatccacgtaatttataaaattattggtacttttctgttttgaaggcgcaccccatttctgatcaataatatgacatacatttcgaccaatttcgaaccccggacccgaacaaaatccaaaattctttatcaccaaaatccacctttattgtccaaaaccgattcaaatgcattgaatggaaatagcaaataggatttacgggcattccatgcatttgaatcggttttgaacaataatggtgtatgttggtgaaaatgaattttcgacttttgtcagaattcgggtccgaggtcgaaatggatatcatatccgtgatcagtggaccgaataaaattgttgctttatgcctccaaaataagtctgttaatattggacgctctttgttgctttaaaaatgaggtgcggcgccttcataacagaaaagtaccaaatttttaattaatatgca

SEQ ID NO: 24958 - DNA, 1007 bp, Heterodera glycines
tcaccagtgtattttttaacaccaaattcattactattcttttttaaaataatttaaaaaaaaatcaagtagttgatgaaaagtcatggacaaaaatcaatgatttttaaaatctgagttcagattcttgatcagcgcattttttagcctagaaaaaatacatgaaaaatttttaacatttttttgtcgggacaccaattcttgaccattgcccacttcccgacattttgctcctcaaggggtaggggagcaaccttgtaatggttgaattgtgtagaaagatgtcaaaaccaaaattcgtctttatttgtaaaacataacttttcttgatcatgtaaatggaatttgtagaaaacaattatgaaggcagtctcgtccgaaagtctcacttttaattccctttcaacaggtggaggaaattgtaaaggccgcagaaaattccaatgataattgtcgtgagtgcgacagtcaatccgccaagtgcatacacaaaagataaattcactccatatagatccgccttgactttgttttccaaagcaatttcctgagcaaagaaaagaaatttttattgttaagttttaaaaagtgagcagctcattccacccccccccccccccgcatcgtttccccttgagaattttttaaaatttactaacatagaatttaaaaaaaaaataaaaaaataatttttttataagaaatattagaagaaattgccaataaatttctgcgaatatgcgaggggaaatggaaatgaaatacacccgtttaaaactccctacatactcgaaagtcgaaatcggcagaagagacagtagtaacacaacaaaacaggatgaaaaaaagagcaacttaaaaggaaaaacaaacttgttcataacttttggtacattgtaaatcattgtgcacaaactttgtcaacacgcaaagtacaagttgaagcggaaaagcgatgaataggagatgaagcgggtggaaaaactgagtcgggcgcaagcgcggaa

SEQ ID NO: 24959 - DNA, 1839 bp, Heterodera glycines
aaaaatggcaatgatcagtgatttattattttaaaatagcgcgcaaattaaaccctggtgttttgaatttgtcttcggcaagaactagaattgctcatacagtttagttctttagttagcgtatcggaattcgtttaaaatccacaaaagatttgcaatagtatgacctaatctgattgttgtattttttgaagctctggtttaggattcttcttcagtacaacatttgtgatgtcgaaccaacaaaatggtgatgtcgctgttccggcagcagttgctccgaatgaacaacctaatcaagtccgttttacactttattttcccggagtatctttttctccctcttagaacaaccaatttcaactttggccctttctcaagtccattttgacccgtcttgtcatgttctggctgatctcgtcacttattcgaaactttttcggccctaaacaggaacgtgacgccgaccaaaatacatcattgaccggcggtggaaaaacgtacccgccctcttttaatatgttcatggcaaatgagcattttgacttatttgtttacctttctgcaaaggtagtgcaaatttctgttttttatgttgtacagtataatatctttttgcaattttagtccgaacgcttccatgatttcgacaatgttgaatctcttttttggcatgaacatgatctcgtttacggggattggacctccggtgccattggtgacggctctcgacaaaaggcggtgacgatgatgccaactccggaagtgctccagcggaacggctcactgtatttgcacgttttcctggtcaaacagggacagtctcatcatccgcgtgccaaaaattatggcgggagggaagtgagtgaaagaaaaagaaattataatttacccaattaaaatcaaagattgtgtactccagccatcaactgaacaaattcaaaaagaagtactaccaaaaaacagccaatttgctgacaggcaaaactggacaaagtgaattggaccgtcaaaaggcggaggagggagtgaagttcgacattttgaactattggcatccgaacattaccgtcagtttggttactgatttttcagcctggacaaggggttcgcttttcacaccgatttgatcttaagattgttttcggtttttaggtcagttgccggcacctttcgatgaggccgtcaaattcgacccagccagcaatcgctattacccaatcgttttcttcaatagttactggaacttggccaccgaataccaacctgttaacgacaccgttcccgcgctcaatttgaccgtcactttcgcgcccctttcgctgttcaaatggcaactttacgcgtctcaacaagttttgtataataccagttaattgtaagtattgttgctttttgagatgcgtggaaaatgggcccaaatgttcggcggggaaatcttcgaggagagcgacgccgaccaagacgcaatcaaacaggcactgatcgagacgagtcccgtgctgttgggcataacagtcgtcgtgtccattctccacaccgttctcgagtgaatttcacattttttttttcttgttcctttagctgcttatattctttctattttcaggttgttggccttcaaaaatgacatccaattttggcgcacccgcaaaagtttggaaggcctttctgtccgttcggtgctcttcaacatttttcaatcactggtcagaaatttttgaagttttctcccaccctgaatttttgacagattgttttcctgtacatttgcgacaatgacagcagttggctgatcaaaatgtccatcggttttgggctgttgatcgaatttggaaa

SEQ ID NO: 24960 - DNA, 2370 bp, Heterodera glycines
  unsure (1)..(2370): unsure at all n locations
ttttgttaggggggggggggggggggggggaaaggaatgggggcgcgtgaccatgatgatgatgaacggattttcaaaaattctgagcgaattttaaccctaacgacgaggagacggaagcatccctttgcttccaatctcttcccatcatcctcgttatttgcccaaaaatcctcnccttctctacccnacttcgtttagtctacagcagtgaaatttaaggtagaaaatattgtttaagtagaaaatagaatttcaatgtttgactcttttttctctctctcgngcgtgcgtaaataataatacgtgcaaatggacgagggggggggggaaagagcaatggaagtgaatgaagtgtaattaaagaatttaatgattttaaccttaataaatgaacagcctgctgctggactgatttggatgctatgcaaccaaaggagtgtcaattttctaaccaaaaaataatttttattaaacaaaaaataggaaattttagtattaagaagttatttcgtccagagtgccgcactcaaaagaaattgagcggagagaaattggaattggaaaagcggctaattccaaaacaaatttgtacctcattaaggcgacatgggactgaatttcccgtggtgaccagtccattcaaaaagaatgtattattgtacagcaggacagaaaaatgtatcttgagatctgcacggaggcggctaagtttaaaaaagtccttacaacaaaattaattttggcaaaactgcaaaaatgccccccggcgaatggatgtaatttttccccttcgtactgcgccatcaaatttacttttttaaatattttcgagattctcgacgcaaattgctcacataaataaagggtctccgccggagattaatgggagagagagaagatggcagggagggcccaaaaataattttcggccgtacaaataaatttgagagagaaagagatggaagatgaggagaagaagagtcattcactcgcatattaaacagtgaatttgtgatgagacagtttttgttaatgggccattatcattcattgactgaggcatcaccagttaattggataataatgccttttgacaccactttcgaatttgggagggacaaattaattaattaatttccttggacgagcaggaggatgaagacgaaggaacagttgtattcatccccaaaaatggagcggcataataaaaaacaacaagcaaacattggacaattgattaaagaaaattgtgattggctctgtgccttggccaggactaaatccgcaaaaaaatgcaataaaatgataaagaaagcgaacacagaacaattgctttcacttgtggaaatttgtctaaacctagtcgcttcgcgtttccgactgaccacccgccagaaaaagagattgctaccccatgtggataccgtacgccaaatgagcagagcgagaagtgagcggggcgcccgacgtgtgcttgtccagaaaggcgcaggatttggaggactgtttgctgccgtattaacccccgttctaattgaattggcaaagtctgttatgaccaaaaatgcataaataccccacactgctttgtttttatgtgcattcatcatcatcattcattcaataaaacatggctaataagtttttacttgtcccacaagaatttacaggggtttgacctcaatgtcggacacgagtgacattaatttggatgctgtacgacacgatttgaaccgagacaggggcgaacgaacaaatccctctgctaaaaatgtcaactacaaccaacagcttaggcggtatttgaaaatgaggagggatctaacaaacatgccgacaaaagttgagatgtcaaaaggaataagtgtactgttaaggagaggtggcgaagatgaagatggagaggttgtggatactccacctcgaccacccgctccaccaccaccaccacctccaccgtcaggtaaacgccctccgcgtggaccaaatcctcccgctcctccaccacctccaccgcctgggagacgtcctccacgtccacccagccctccttctccaccaggaagtccaccgcctcgtccacaacgtccccctagaccatgtagagctgctgcaccttctcggagaggtggtctcatagagcaatggcggaaaagacaatatgatatacaacaacggcggcccgtggtgcgggatcttttggcggaagcagctgctgctccattgcccgaaagtgacgatgaatatgactatatgctggagagtggattcgcgctgccagcaccatcacagtactatggagatttgcctgtactacccgacaacgcagacgaaattgaggagatggacactgttcagcgcgaggat

SEQ ID NO: 24961 - DNA, 976 bp, Heterodera glycines
aggggggagggacccttttgttttgcaaaatttttttttgtgataaaaaagcatcaaaatttgttatccggggttttagaggtcgctgatcacgaatctgacatctaattcgaggtcatggaccccaagaaccccagggaataaattttcatgactacatattaaaaaaaattttgcaaaccaaaagggtccccccttttgtgtttactttttgataaattcaaaagggccctctttgcaagtagcgccgatccaatgatcagtttctttggccataacttttttcttaattggttatttctggaccaggattccatgttagacctctggatttcctgtacaacaatccatgaaaatctaggtctaggaaaaacccaggttcctcgagacctggaaaatccaggcctgtatccaggtccgaatttttgaatatacttgacaatttattgttgtaattttttttttgttttttttgctcttttcttggatttattaattcccggggacctttaagctttcgttgataccaagaatgtgtgaattggccaagtaagaaatatgttatggccaaagaaactgaacatattggactcataaagtgcacaagagagtcttaattttttttctcctcccactatttgaaataatctcaaaacaacaacaatcccttaaggaatggcgtcagtcttggcaatcagattatccaaattcccggtcaactgataacggaggttctggttgtccgaatgcctttatcgccctcgcaaacaaaacaaatcaaaaacgatggtggtggtttggtttccgattgaattgtaaaaagtggcggcgaaaagggcggcgccgaatttgtcgcgcgaaaaaattgaaagaaacgacgttcgccggatcggagcggtccgaaaaaaatgaacgtgtctcgattttgcgaaaaatcgtcgaaaccggtactttgttttggtacgcgaggtcgttt

SEQ ID NO: 24962 - DNA, 1395 bp, Heterodera glycines
gcgatagcgctttaaaacagcacactaatgcaattaatgttttgtatgttttaaaataacaaatgagaaagtatactgtctacaccgagcaaatactgtgcaaagcatattgtctacaccgtgcaattactgcgcgacacgctagtttatactactatagagaaacgttgcagttcgtttcaaaaaacaaaatctcccggccgaaggccggaagcgccctgaaagtagtggatgggtcttacaactttttgaggcgcatctgggaaaaataagggttttccgctccggtggccaactgagtcccggcggctgatttctcacttttgcttgcgtttgatggcccataactttttttctaaaactctgatcaaaaaatgcttgctggtaggaaactaagttgaagtgttttctaattttcaaaaaaaattccaggcctctacctatacttggaagggctgcagaaattggcaacttttcagtaccaactttgcccagttcagtccccgttgaataactcattaggctttgacctgagcgcagggtggccagcggacttattgtagagctcggtgagctcgatttttccaaatttaaaaatttcgaaaattttcaaaatttttcgagctaggcctaaaaaacggttttcgggtttttgaattttaggattttttaacgaattttcccagaaaaacgaagaccacttccaaaacatagttttcgagctctatcgactggtatttttttcggaaaaatttcgattttttcccggaaatagaaaaaatttttggcctcagcgggacatttgagtcccgggcccataactcgtcaggggttggttttagccaaaaattgtcttagaacatttttgtagagaattttaaatgctatcgaatggtgtgcttcatgactggaaaatttcaaaaattttcgagctaggccccctagaaattttcgaaaatttttttggggtcctaaatttgggtgtaaaatttttttcttgggtattttggggtgctgagcacgaatatgatgtttgttttaagttacagtatttttggaattttttaaaaattctttattttttggtaattttttagcccttggaaatttgggttaatatttgaaaatttataactcggtgatggtttcatcgatttaactataataaagccttaaaaatagagaaaaataaggagaattttatgagatttaattggttttataatattcaaaagaaaaaaagttattccagaaattctggaaattttcgattttccagaaaaaaattcagaactcggttctgtaaaggtgtttttgaaattttaaataatgaaaaaatccgcaatttttttctctattatataaattttatttggcatttttatcactttttta

SEQ ID NO: 24963 - DNA, 1897 bp, Heterodera glycines
tttaattaaaaaaatacatgaaattctatcaattaaaaaaaaaattaatttaaacttataaaatttttttatcaaaaaaaaataaaattaaatataattttttatttattaactcaacaaaatattttaaattaattaaaatcattgaaaataacgtaaaaatgcacaaaaaaataatgttacaccgtccggattcgaacctgcccccccccccccctcaaaataatgcctcagaatccccaatcacacagggattctgaggtcttgacgatgtcaaaagtaaaatctgatcacgtattcgtgatcagcggcccaaataacccctaaagacatatttttggaagatttttgtgagaaaaatttttccactcaaaaatcatgtgctccccccccctttggacccgaatcacaaaatcacttttatttttatatctttttttaaagaagtgataaaaataccaaataaaatttatataatagagcaaaaaattgcggatttttgtagtattttacttttacagaatgacttttcagaagggagttctgaatttttttctgaaaaatctaaaatttccagaatttctggaataattcaaaaacccgaaaaccgttttttaggcctagctcgaaaaattttcaaaattttcgaaattttaaaatttggaaaaatcgagctttcgaagctctacaatagtgccgctggccaccctgcgctcaggtcaaagcctaatgagttattcaacggggactgaactggacaaagttggtactgaatttttgtagaagcacacagaccagggggttagagatagaggcctggaattttttttaacttttagccaacacttcaacttagggccctcacagcgagcattttttgatttgagttttaggaaaaaagttatgggccccaaactgcgagaaaaagtaagaaatccttccctgggactcagtcgtccgcgctgaatttttttctatagttttcccggatgcgccgtgaaaagttgtaagaccgatgcacaactttcagacccctaccgatagccgttctcgagattttggttttaaggatgagttgccttgtcaatataacatatatataactagcgggtgcgtgaaccgtcggctatttagctgggaaaaagcgcttcgcgctttgggagcttcgctacctagataagctatgggttatgaagatatttgaaattttaaaagattatctgggatttttaggccgcttcgcggcctcgaacgggcgctttgcccccgtttttcatattttgttttgctttgacgggctgtaaagtacataagtaccgccaaaactaccgcatagacgcgctttctcattttttttatacatatttgcagctcttcttgttggccgtctgtaaggacatgcgtgttcaaattgcgcgaatgcttcggaaaatgtttatgccatttcggaggcgtggaacgcaaacaatgacagttcaaactgtacacaccaattacagtagccgaatgcggcacaatgccaatgccaatgtctcgatccgtcccgcccgaggagggaattaactagtctcgacatcacactttcgaaattcatttatccattttttagcagcggctaaatttaaaaaaaaaacaatttttaaactgttttttcacaagaattatcaaaataagaaatcgagattcaacattcttcattatcttttcgtaactttgacaataagttttttagcataaagaaaaaaaaaattattttcataaaaaaccggatttaaaaacttatttttttaaaaatttttttgaatattttcctgtttttcacagttttttgaattcagccgtatttattacttaaaaatctctttttctttaatatttgcaattaaagtaatacata

SEQ ID NO: 24964 - DNA, 1610 bp, Heterodera glycines
  unsure (1)..(1610): unsure at all n locations
ttattcttccaattgcatacaaaaaacaattctttaccaattatgattaaattacttttttactcgatcaaaaagactaaaatcggaatccatgacaaattgaacctttggcatgccattaaaattttgcattaagctttgaataaaattatgcaaatcaaccaatcagtcagttgaaaatcacacactcgaatatgccaaaaagtttttgaatgccgaaaacgaaaattcgacttcgcatgactaaataggcgcgtatattaacattgcaatgacatctgtcgggtggcaaatgtgtttgaagatgttttaatttagatgttttaatttcctcgaatttattttttttttttttttttttttttttttttttaacaaaaacatccaatatttttctactgacgaatatttgcaaatttccattgattattgttattaatatatgtaaaataaaggtttttaccttttacatttatgaaaaattttactttgcgaaattcataattattatttttttgaattttaaacgatgaaaaactttcttggccttttatttatcattaatggcattgatggaattgatgaggatttttttgaagacttgtggaaaaatctaaaaccatcgacatcaaaaaacaccaaaaaagaaaaattcggaggaattaaggaagaaacatttcaaaatgtcaataaaatgataaagtccgaaaagtgcagtgaaaacgaaatggaaaacaacgccaaaattatcgcaaaaaatttaaaatgaacatttggaggaaaaaaatgttaatttaaaaacaaaaatcaaagagccaaaaattgaattggaccaattggaagaagtatcatttggaaatgagtttaatgagcaatctgatcagaatatttcgtctaatgatcaaagcaattcagcatatatggtaatgaatggtaaaactaacagaaaaataatttttaaataaaattcgaacgtacgattttaattatttataaaattttaaatatttatttaggagaaaaaaaacaagaaacgaaatagaaattgatcatttgaataaatttaatttgatgaagaaagaattacgaaaagaaaatgtttataaaaatttgacaactactcaattagaatccgaatttacaaagaaattcaatttgaaaacgaattggaaaattgatgaaaaatagaaaaaaaaatggtgttgcattgaaaacaatttatcgatggaagagaaaaaacgatttaatcactcgtaatattttttaatttgccaatttgagacgatggacgaggaaatttggcatcacataaattcgttagcttgtgtcaaacccaattttatccggtgacactttgctaatgcctaattaacagttctctatgggtgaattttcctattttcctattttccttgtttctttttttttctttttaatttctctcactttggcatcatactatctttccatttcactgatagaaaacaacatttttatttcgctctataatcattagggcttcgatttttaggcactanaattgccaaaataggcaaaaataggatctctcaaaattntttaggctttttaggcgctanaaataaaagcct

SEQ ID NO: 24965 - DNA, 1082 bp, Heterodera glycines
gcgccaccgggaaaaattggaaattttgaccattttaaaacagattttcactgaaaagtggcaatttataggtcaaattttgaaattttaggggaattttggaggccggcggatatcaatagtgccgctataaatttgaaaaattgggagtttttggtagcaattttacataaaaatggctatttttgctgattttttccaaaaatcagtaaatcatgatctcaaaaaataaatcatcattgagcagttgaatcaatttttccttgttttcgacaaatataattttaaaattatctccaaagtttttgttaccactttttatctccaatttttgggctacaaaaccttccattttaaaaatatggaaaaacaaatgtcaactctttattatttacttaaattgcttattatgaaaattttagcacattgtccgaccatcattcatcagttccagccttaaaattgatcgtcgaatggagttcgtcagttcgtcatgaatttcagcgagttccgatggaatctgtggctcatgattacactttttgtcggggccgcttccaaagtgtcaattatgacacatatggtcaagacgaaattccaattcctttggccactctcatcgatgactatgtaaagcgggaaaccatccaagactggaagtgtccgaagtgtggtcgttcacccggtcgaaaggaactgaaattccattcgttgcccgatgtgctcattttccacctgaaacgttttgaattggtatgatgttctggctaattgtaaacaatactctcagaactctagaaatcagaaacaaataaaattacaattgattttcagctcaatgatggaattgcgagcaaaattgaaagccgtgtccaagttccgctggagggtctcgacatgggtccgtatgtgttcaaccccgatgttcgagcaaatacactgccgaaagtaccttccaattgaatgcaaaaaacgttaaaaattacatttctttagcatcggcgtgaaagggcgactgactttttgcacaaacaccctgaaaatagcatttacgacttggttggcgttgtttctcattttgg

SEQ ID NO: 24966 - DNA, 1713 bp, Heterodera glycines
  unsure (1)..(1713): unsure at all n locations
agtgataatgcattttttaaattattttaatcattttatgataatttgtcaatagaaatgaaaatgataaattttaaagacattaattcaatttttagcgctgctgtaaaattactgttttctgtaattctattttacaaataaccgaaaatgttcgaaaaaatcataaatttttacaatatcatttttttaatggggggggggggagggacgagctgccgccgtattcggaatggctgaatttggaataataaaataaatataaatacaaatatttgtaaatgatagtgataggaaaagaagcgctatgtataattcccggcttggtgccgaaatgagcctggcgccgaaaggtcggcgctaaacgactatttcaatttttttcatctttatcctccatgaatgggtcgatcgattacaaatgttttatgataaaacagataggtacttgttctaataatacaaattaatttttgtcattcatcattttccttctgcaaattcattattcctctttgtcctgcttctgtttgtcgtggaaataattcaggagcagacagtataatccagtccacacggcaaaaggaactgcacagaaactggccacttcatcaattttgtagaaagcaaaggctgtagatatagctgtgccgtatatgtagctatagaccataatctaaatttacatatgtatgtatatcagcagggctcccattcgtacttggatgctaagtacgcacttggcttttatgcttggaaattttaactgtatttatttccaagattgtacttggaaaccagaattttggcatatgaactgaaaaatgtcaattttacggaaaaaagtttaaaatttttggaattatttcatgaataatcattaactttttttgttttttaattttcaaactaagtcggtaagaaactgcttttttattgtgtttcttgtcaaaaagacatcattgtcgaatcgatgggagtttcggcaataggtctatgttgaaaatttccaattttttcctccagggcgcctatctgcgccgctggacccccaaaacccttatttttctttaaaaattggcacaaagtcgcaaacaatttctgttttgcttcgactcattttttgctttaaaaggggaaattaatggaatccaaaaagttggccatcacataaagttcaacttttcgaagtaaaaaaatgaattgatactaaaacgaattatgctgaaaggaatcgacctcaaaattcccaatctttttcgagttgaagatggtagcgagacagctgaacatgttcagtccgtaacagctaagagccatggcagtgtttgtatttccgaagcctaaagtagtttttcattgaaaatagcaagaataatttatttttgtttttttgctgtacagttgaagcggtacacttagtacgaatccgcctatacgaatgggtgcgaccttatcagggctgtacgtaattacggattacggaaattacggggtttggagttatggattggacttttccgtaattttgatccgtaactggcttttttagattattttcgaggcgacttctcgncagatgttttttataaaatgaatttagctatttttattaaaaggctacccacatttcgatttcatttgacttattcttggtaacttgtagtattattagcatacatataaggnggggggaggctagcgaaggggaaa

SEQ ID NO: 24967 - DNA, 1310 bp, Heterodera glycines
gggatttatttaggttttctaacatcaatatgaaaaaagttattccagaaattctggaaattttagatttttcagaaaaaaattcgtaactgccttctgaaaagaaatttgagaaaagtaaaatactacaaaaatccacaatttttttctctataatataaattttattttaaatttttatcacatttttaaaaaaagatataaaaataaaagtgattttgtgattcgggtccaaaggggggagcacatggtttttgagtggaaaaatttttctcacaaaaatcttccaaaaatatgtctttaggggttatttgggccgctgatcacgaatacgtgatcagattttacttttgacatcgtcaagacctcagaatccctgtgtgattggggattctgaggcatcattttgaggggggggggcaggttcgaatccggacggtgtaacattatttttttgtgcatttttacgttattttcaatgaatttaattaatttaaaatattttgttgagttaataaataaaaaattatatttaatttaatttttttttgataaataaattttataagtttaaattaattatttttttaattgatagaatttcatgtatttttttaattaaatttgttaaaaatattttcttttagatttaatgaatttactaatcactgttgtatcaatttatatttaaagatttgttgtaaattaataataaaagaatttatgtaaaaaataacaattatcttttaataaagaatttcatatttttttaattgaatttataaaaattaattttatattaatttaaatattcaattattgtacatttaaaattctctttttaattaataaaaggaataattaatttattttttaaaatttataataaattgcattcaatttttgtacctcttctaatcaatctcagttgtacctcttctaatcacttttgtacctcttttaacaattttgtacctcttctgatcacagttgtacctcttttaatcacagttgtacctcttctaatcactgttgtacctcttttatcacttttgtacctcttatcaaatttgtacctcttctaatctctgttgtacctcttctgatcactgttcttcctcttttaatcagtattgtacctcttttaatcacttttgtacctcttctcatcactgttgtgccttttctcatcattttttgtacctcttctaatcactgttcttcctcttttaatcactgttcttcctcttttaatcacttttgtacctcttctcatcactgttgtgcctcttctaatcaaacacagttgt

SEQ ID NO: 24968 - DNA, 1717 bp, Heterodera glycines
  unsure (1)..(1717): unsure at all n locations
ttttcaaaataagaacatctggggccaaaaataagattttnagggtcaaaaataagaacatttcgcaaaattgcttcaaatctgttagagggccggcggtgccgataggcgccgccggagaaatttttaagaattttaattaattttgctaggaattcgccaaatttttctgaaatttccctcttttagatgagaataaggcactaccctccaaatcagaacatttcttagaaataagaacatatagaaatcctgaaatattgaccaagatgaaaaaagttaagtacaaagaaactatttacgaagttttctgatttaaaatttatgtgcttctgagaaaggcataaacaattttttatattattgtaattttaaaattggaagaatccattaaattattaacacattttatttagatttagcatacaaaagcatatataacaagacaaaagggacagaaaaggaatggtgcaacaaattaaaaaaattttttacactgcttaaactgatcatcatgaatatgaaaatgcccaaataatttaaattgtccaaaaaagataaatcaggcggcgaaaaccaaaataaaaagcgatcagcgatttgattaaattcacacaaatttcgtgcatttttgaattggcttctcctctcttttctattcgttccgcttgttttctgatccgttcatcaccatatccatattatcattattatcattagcattgtccatacgctttgttcttcttcttcttctttgactattctctccgctgcttaggctttttgcagaaaattggaaattaactaattggattaattagttgatgagatggattttcattggactttcaagttcacggggccttgaaattttcagaaatttaaattccgaagctcaaaaaaaaattagaaaaacggaattgctttgcttaaaaaatttcagctgctttgttgacaaatgaaaggctttttgcttaaattttaatcaaaataaattaataatattaaatttaaattattattaaacttaaatacttttaatgaattgcgaaattttctatgttccccaaataaaatatttcagcattgtttcaatgttttcttcatttttgtagttaagaattgataattttttgattttttcaagaataatttttgtatcaatgatcggcttttcatttgatacaaatgctttcaaatttcccaatgattctttatcattgagaaatatgtattttcagcatattttcatcattttccaactgtttacaatgtttttgtgtagttttccaaattttcatccattttaaatccaaatttggcaacacataaaatgccaaaggcacgcttttcccaccatccaatttcaaaattggaaccatcaatttttcctgcttttataatttcattgaatgatgatgacgagtccaccaattcagtggccaatttgaagtaatctatcaatgtgaataggcaattaattaatgcaaaatttaaaaaaaattatttaatttttaccagttttagagtgcattttttgcaaatttgatatgctttgactccttttgcttgataaaagcatgaccaatgctaataaaagggtttttggcggtaaattgaaaaaaagcatttttatattttgctctgaaattttttttaaattaataaaataattaaaataaatctgaaatcgcaacgaaattttccaaaataggca

SEQ ID NO: 24969 - DNA, 1296 bp, Heterodera glycines
tcaaattcgatgccacgcgtcaaacaaacggcgaaaaagtcgcagtcgagaaaggagcaaggttccttccaacaccagcagaagatgaggagcatgcgcacccaattggccaccaaaactgctggaccaaaacgaatcggctataaggaattgccaccagtgaaaattcaacaaaaacgacaccacaaaaaaggcaaaaacaaacggaaatggaaaattcaaatttgtcaaaaaatataggtgctctggcgttgaaagaaattcgcaagtatcagaagagtgtcaatttgctcatcccgcgccgtccctttgtccgcctcgtccgcgaagttacgcagggaatgaccgtttccgacgacatcaaatggcggggcttggcccttctcgcgcttcaggtgcacccacacaaaatattttgactctattgcagttcacacgaccataaaataattggcgctattatggaaaagttaccgatttttggattttatcaaaaagtaaaaacaaaagggggggaccctttttgttttgcaaatttttttgatatatagtcatgaaaattttttccatggggttcttggggtccatgacctcggattagatgttagattcgtgatcagagacctctaaaatccgggataacaaattttcatggtttttttatcaaaaaaaatttgcaaaacaaaagggtcccccccccctttacttttgaaaaaaattcaaaaacggtgactttgcatatagcgcccaaaattttttcatttgatggttttttgactaacgccctttttgatgggttttgactaacttcatagcaccgtaataggtgcaccgtaatatctagagatcggattttgcagcatttgctgaattttttggtctcttggggcgttctaataagcatttataacttgattttaggcttctaggtccaacctttttatgctgatttttgcttaaattggtattttcatgcttaatgctgatcatgtaatttttgtgcttaattgacattttttgtaaaattttgactaaaacaccgtctcaacaataaaaatgaagaatacacccctaaatccctaaaaaaaattttttttcttgacaaaatttgatttaaaaatgtcaattttgctaagaaaattttaaattgtcagtgcgaaataaaaaattgagaatttattgttactaataaaatttttgcctaaaaatcaccaatttttatgttttttcgatctttgtgcttattttgccattctcatgcttatttcgtgcttaatataacaatttttggtgctg

SEQ ID NO: 24970 - DNA, 730 bp, Heterodera glycines
ccgtctagagcttaacaaatttaaaaaacgggcgcgaagcgcccgtcagagcaaaacaacatttgaaaaacgggcgcgaagcgcccgtactatgccgcgaagcgggcgaaaaggcccaacaaaatttaaaaacgggcgcgaagcgcccgtcaaagcaaaacaaaatatgaaaaacgggcgcgaagcgcacgtccgatctcaacaagtttaaaaaacgggcgcgaagcgcccgtctgaggccgcgaagcggccgaaaaggcccaactaaatttaaaaacgggcgcgaagcgcccgtctgagctcaacaaatttaaaaaacgggcgcgaagcgcccgtcagagcaaaacaacatttgaaaaacgggcacgaagcgcccgtctgaggccgcgaagcggccgaaaaggcccaactaaatttaaaaacgggcgcgaagcgcccgtctgagctcaacaaatttaaaaaacgggcgcgaagcgcccgtcagagcaaaacaacatttaaaaacgggcgcgaagcgcccgtctgaggccgtgaagcggccgaaaaggcccaactaaattaaaaacgggcgcgaagcgcccgtctgagctcaacaaatttaaaaaacgggcgcgaagcgcccgtcagagcaaaacaacatttgaaaaacgggcgcgaagcgcccgtctgaggccgctaaacggccgaaaaggcccaaactatatctaaaaacgggctcgaagcgcacgtc

SEQ ID NO: 24971 - DNA, 1260 bp, Heterodera glycines
  unsure (1)..(1260): unsure at all n locations
ttagggaatagagggtaaaatctatcccactttaaaagtgctttacatgggcaatagaggctggaacaattggaaaattttgcgcaatttttggcaaatattaaaactaccgttaatttttttaattttaaaaattcaatttttgttgttgtttgagctattaaaaaaatcttttattaaatctttctaagttcaaggaaaatcatgattacattcaaaattttagtactgttaagaacaaaataaaaacaggtgtatcattcaaaaaataaataaattttatttaaggaaaatgtgtcaataatcaaaatattttaccattttaatcagtaaaatatatacagttgaaataatttataatagatttaaattttgtattaagttttgtcaattttttgttttgttttgtgaaaattatttgatttcacatctccaggattcgaacttggttactttttttcatttaattaggcaaaatgatgtcctacataaatgataaacaaatgagccaaaggctaataaaataaagataaaagaggctttaacaaaaaatgtgaaaaattacaagcaaagaccaatcggtacttgtctagtttaggtgatacgtttaacaacattttcagatgcctacaaatgtgttttataaattaatgaaagtaagttttaagggctttttggggtcgctgatcagtgatcacaatccgggctcagatcagcgcgaccgttcactacatgaggtttacatggacaatgaattgacaggcttcctgtaccaagggtaccctcattgtcaaggtgcccatgaggatacctaccattcatacaaattttcgtattttacatatatattcttactaaagtttaaataatcatttattgctgtttagataactttaagctcactttcatgtattaacaaaatacaattaaattttcaaaattttccccggcggcgccgccagaccccttaactcgacaattgttgtaaaaaataatgcagcaaaaataaatttcggaccgaccaatttttcgtaaaaataacaagcaaaatgaatattttttgtaaaaaaataatcgtcttgtctcgtggctcgtatctcgtattttattttgagcatgtaatatttgtgatgaatttgcattttagtgcttatttttggccttaattgtcattntttgtaaaatattgactaaagcaccgtctcccagcaataaaaacgaaaaatacacccctgagaatcgacaanaaccgaaaaactc

SEQ ID NO: 24972 - DNA, 759 bp, Heterodera glycines
aattaattcattttttttaaagcagaaaattattgaataatatattttttgaagtgaatggcgatgcaattaatttgaaaaatgatggacaatttgatggaaacaatgaatcgattgctgagcatcaacaactatttttttaatgaaaatcgcttaaaaaatagtcaaaaatttcaatttttccggacccaaaaactccatattttttgatcgactcaaatcgcaaaatttggccatttttgtggacaaatctgttaacaaatcgcattaaaaattacaaaaatttttcccggcggcgcctatcggcactgtcggtaccccttgtccctcaaaagtttttaggaaaaaccgccgcaaaaaatggtgtgaaaaaaaaacaaattcgtcgcccggggcaaggggttacctcacccccccccccaaacccaaatcctgggaccgtccctggtgcacaatcaaaaatataacatttaaacatttgaaggcgtgttttgaataaatttttatgaagctttttgatcaaaaatgaggcttttgaaaattttaatctgggagccctgagtaaaattgtcctaaatatttgaaattgattagggtaccaacagattcaatctgaaaaacactgtccaccatttgttcggcattaaaacattcttataacggattaaatattattttccgtccattttaataaataattcatttatgtttttaagctggcgaggaaaagctctcgcaattacaaaatgatcagaagaa

SEQ ID NO: 24973 - DNA, 867 bp, Heterodera glycines
ctaaccttaggtcaggctcgccgtacggacagcgcactttgcaacagtggccaatgtatggactgaacgaacgcaaacaaaaaatgtgaattaattattaaaatttaaattttcaaagtaatgaaaatccaaaactaattaaacttcgaaaaaaatttgaagacaaaaaagaagcagaaataaaatgattaaacttatttaggtgaaaacaaatcacaaatgaaaaaaaggggtgggtaaaattttttgcgaaggggtccggccacgtaaatagataatcttttatgattttcaaaccgataaccttccataagtgacgcatcggtaaccaattgggcaactgtccgtggtcgcagcattgtccaacatatccacgtcgttgatgaacaggcgacggcatgtctgcaaaggtgcgatgccatcgggacacacttaaaattgggaaattgaaaaaaaattgtggccattaattaatttaaataattttttggaatgcctgcaaaacaacgcccttttgacgagtctctatgtgtgccgggtgcacattggcacttcccagcgatgcacgcgttaaatggatcgacgcaatgaatgtccttataaaaataaaatgaatactgttaaaatttacaaaataataataataataataattattattattattattattattattattattattattattattattattattattaataaacatagatgcttgtatttttaagaaaatattaataaaggaaggatacataaatgaaaattgaaaacgattttaaaattcgcaaaatctctcaacatgttacaaatccataaatgattcaaaaatgaaaatatcaattttggttcaaattttgt

SEQ ID NO: 24974 - DNA, 1351 bp, Heterodera glycines
aacgtcgttcaaatggcgaatgtggtcgagttgttgttggcaaaacctggagataaaacccatactatcaaccgacacagcagcggacagaccaagtgctgagcaaaaagatcagtcccacgccgatagcttggcaagtctttggccaagcgccaagttggctgaaaataacttgggaaatgaccccaaagcataatggcacggtcgcaaaaaatgcacctgaaattgcaatgggcgaacagtgccaaaagcatggtgaacgagtagagcagacgaagcgcaaattgccgatttgaaatgcacaatgaactggccggattggtggaggtgcacaacggcacgttgaacagcgcaatgccaacgggcaaagcgataagaaaggcaccgacaatgtgccgaggggcccactggtgaagacaaggcaaaagcggacggcgactgagcagaggaagtccgatgagaacgacgacagctaaacagagcgaagcggaaacattgccaataagcgacgaccaaacggtgccatccctaatcgaattttaccggtgaggaaaaccgaagccgtagcaatgtaaaggacaaaaggcagagagacggcgatgttcggttggacgaggaacagaagggagcaaatgataaagagcagagcagacacttggcaaaatgagtgggaattgaggaagggcccaataatttgccaatgacaccgaaaatgtcgatgaacacgccagaatagcgatagcgtggccgtcgcgaccgttgctgctgcttcgactcggcggcggcggaggccaacagaacgggacggatggaaccgccacggttccgttccaactgagcactgagctgaaagaggtggccaggaattgccgttgaaataagtgttaatcaacggcacccacttgcttgtgcttcttcaacccattggccgtgcttcgaatcgctgagtgccgttccgacgaatcgcctgccgcaaaatgtgcacggtattcattttcgatgtccttttggttgaagttcagcgtccagcgattgagcgacttaattttgacaaagagaaatgaaacatttaagttttgaataagcggcactttttgatggagccaaaaacccttcgcgaaagtgccgttcgccccgtggatcacttgtgccaaccgctggtcaaagtcccgatggtccgtgtcttaaaagggaatgccattcattcccttccgcaagtgatttttggcatttgaacccaccgaaacgggtcaaagaggcggcgttgtggtggtgggaaatggccgtgtcgagtcggtcggccattgacaccgtcgaatggcccgcgtcggagccaatctcctaaacatgg

SEQ ID NO: 24975 - DNA, 1294 bp, Heterodera glycines
tttattaattaatccaaaattaaaacttgcattttatttatttaagccagcaaaattgttgtctattcttatcaatttattaaacaaatatttcttactgttcattttaaattataaataaatttttcgtattgttctaattatttcaaaaagtttttcaagttttgatctgcattagttattcgtttttaatatttcatgctagagaagcgttcgttttccataatatttattacgtatattttgatataatttcaattatgtattatcaaacaaattttgtattttaaaaacacatatattattttcatatataaactcagaatatttgatcagttcctaagctatttttgctctattatatatttatctatctaaatgaagttcaattaatttttttatttacattttcgttatttattttaggtatattttattaattaaattgcttggacataggttttaatttaaatgaactgttaggcttctattaaagtgtcaatgatctttttatttatttcatatacggccttttctcgctcaagtgcacatttgttgatatgaccgtgcaatagatcggctatttcggagttggaggctggctgaggcggcattaagtggcgggtgggatggttggatcgaagccgacagctcagggcgcttttgaaactttccctccgtcttcgagggagacaccattggggggggggggggggcggcaatgctttgattagcccagaaaaagaatttataatttaattaattaaatttttagatatatctactttattaattttattttacagttttttaaatgataaattcaaaattttatttttaaaagattaaaaaaaagttcttagtttcaactaaaatataaatttaattgcttgcgcgtaattccaaagatgatttattattgttttaaatatattgaaaaatattttgatttttcaatgaatttaaatttatttaagatttccagtatttattattaactttctcttatatatattttaattattaaactttttaccttttaatataaatttttcaacacatctttttataaaatttttgtattatttttttttaaattttaattttaggtctttcattcctattactcttggtgttttcagcatgaagatacaaaattaaatgttgtctaataaattgtttaatttgaagatagtccattaatgattcatataatatattgaaattattgttttctgaaaaagcgaatatagtctggccgtaatagtctcgccgtaatattctggacgtaata

SEQ ID NO: 24976 - DNA, 1157 bp, Heterodera glycines
caaaaaagagatagccattttctggcatagagaataatttaaaaattccctgtagaatagaatggccattgctctccgcgcccctctgcccatgctgggaacatttgtatggtacaaaatttctcgcaaaaaagagatagccatttttctggcatagagaataaatttaaaaattccctgtagaatagaatggccattgctctccgcgcccctctgcccacgctgggaacatttgtatggtacaaaatttctcgcaaaaaagagatagccatttttctggcatagagaataaatttaaaaattccctgtagaatagaatggccattgctctccgcgcccctctgcccatgctgggaaaaatttctcgcaaaaaagagatagccatttttctggcatagagaataaatttaaaaattccctgtagaatagaatggccattgctctccgcgcccctctgcccatgctgggaacatttgtatggtacaaaatttctcgcaaaaaagagatagccatttttctggcatagagaataaatttaaaaattccctgtagaatagaatggccattgctctccgcgcccctctgcccatgctgggaacatttgtatggtacaaaatttctcgcaaaaaagagatagccatttttctggcatagagaataaatttaaaaattccctgtagaatagaatggccattgctctccgcgcccctctgcccatgctgggaacatttgtatggtacaaaatttctcgcaaaaaagagatagccatttttctggcatagagaataaatttaaaaattccctgtagaatagaatggccattgctctccgcgcccctctgcccatgctgggaacatttgtatggtacaaaatttctcgtaaaaaagagatagccatttttctggcatagagaataaatttaaaaattccctgtagaatagaatggccattgctctccgcgcccctctgcccatgctgggaacatttgtatggtacaaaatttctcgcaaaaaagagatagacatttttctggcatagagaataatttaaaaattccctgtagaataaaatgcccattgctctccgcgcccctctgcccatgctgggaacattttgtatggaaaaaaatttcccgcaaaaaaaaaaaagccattttt

SEQ ID NO: 24977 - DNA, 1160 bp, Heterodera glycines
tgagcatttctcttttacaatttttgtaagaaattccatgcattttaacacgcgcaattacccaaaaaaagaagaattccacaaggcaaaccaccgccgatggaccaactgactgattgagcgccgcgaaaaatgaatggggggggggggaaacgcaaaacgttgcagcaacgaagcagcagcagcagcagtatgcttaacataaatgttgaaatgggtgtgctgctgctgttgctgcgctgggctttgctttgacgctgatcacttctgacggcggacgaccgccgccgcaaaacgctgacaaattaaaaggaaaagaaaataaaaataaatatttgcaaattgcgtttttgctctctctctctctgctgattgtgagttgagtgtgtgatcgttgagtgttgttgtgtcggggataataagtgatcggccggacggcgatttgtttttcgagtgatttgatcccccccccctttctcccatttcgtacaaaaatctctttcggcgaattgcgcacgccacagaaacaaacacacacagcgaaattgcgcgactcttttctacattagtgcgctatgggtgatttatgaatgaatgtatcatttttggttatcgtcgctcatttgttattattaaaagtaattagtacgggcagagtggaaaagaaaactgacaaatgagagggatggatgtgtgaatggggtgcttatcattaattaccatcatcagtcaccgttttcttccctctctttccctatttctttttttatgtttcgtcccattttcatcacgatttgtgatcattcattagtgtatcattacggatgaaaaatgcagagcggtcggtggccagaacagaaagagaggggaagaaggacgagagtcttgactgttgactgatgaatggacgtgatgggtgggacacacaaacagaaggcgaaagagagaaggggagaggaacagaagtaagagagagagagagaggagaggaaagggagagaagtgagagaggaggagaggaaagagatagtgcgtgtttgtgttatcttatgttctctgcttttactgctgctgctactgaaggagttcatccgtcgcattcattattcggtcgcttttcaagcaattatgagggaaaataacgagaaaaatccctctcc

SEQ ID NO: 24978 - DNA, 845 bp, Heterodera glycines
gagatagtcatttttcttggatatagataaatttaacaattctctgtgaaattaaatggcgattgcgctccgccctccctctcacgctcgagcgcttttgtagcgtatgaaatttctcagaatacgagatagtcatttttcttggatataagataaatttaaaaattctctgtgacattaaatggcgattgagcaccgcgcttgctatcatgctggagagcatttgtaacgtataaaatttctcaaaataagagatagtcatctttatgggatataagataaatttaaaaattctgtgaggaatgaaatggtgattgcgcaccgccctccctctcacgctcgggagctttagtgcgtcataaaatttctcacctcccgccatagacagggttggcttgaaattgtaagcgcatgtggcatgaaacatgctgcatccttttcctttttgttgttgttgtgtggttgttgcagcaaagcagcagccatccggcagaaaattgaaaataatgaatgggaggggcgggatggggggggggaatttggaaagggaggtatgagggcggaggagagggatgggggggggcggcgtgttgacaatttgggcatgtgccagcgtgcgggtcattgttggcaaattctgctgtttatgatccctgaccttttcaccactctcgacttttgctcggcatgttcaaatgctttttgttttttcgtttctttcattctttccctttttaaatttgcctttttcacttttgccttctatccttttcgcttctctctctttcttttctcattctcttcctttcttctctccttccccccctctctcctctcctttttta

SEQ ID NO: 24979 - DNA, 1522 bp, Heterodera glycines
acattcaaataagcacagtaattattttattaggctatgcattgtaatgaaaattgaaaatgccaaaatacgcactaaaatatgccaaaatagaggatttaaaccaggggggacgcgaccgcggcaatttgaatccgcaatgcgcgactgtgatccgcggatttttgggactaaatctttataaagaaaatttattgcagcgattgtcttttttaatattctgacttaaaaaaacttttggaaacgggttatttttcttaaaaaatttctttgttgggcttggacgggcgcttggcgcctgtttttaaattttgttgacaggcgtgctttccgttttaagctttgttgagctcggacgggcgcttcgagctcgtttttaaattttgttgagctcagacgggcgcttcgcgcccgtttaaataaaataaattattttaaacccttcccggatttaattagagggattttatatttttttccttttaattttttttttttttggtaataattcatttaacttatttttaataaaacaatttataaaataacttttaaattgattttatttcaaatttgatttttaaaaaggataataaatatttaattaagcattaaaataaccaaaaatatatagaaattaatgtgcaccgtccgtgtccgaaccttcccctccccctcagaatgatcctcagaatccccatttacgaagggtttctgaggccttaacaatgttcaaagtaaatctgattgcagatctgttatcaggatcctaaaatacccttaaagacatatttttggaagatttttgtgaacaaattttccactcaaaaaaccatgtcaaccccctaaagtcccgtattccatttgaagtaatgattatactcggattgaaaatccaaaaatgccaaaatatgcactaaaatatgccaaaaaatgtatggatttaaatagacacaaaaaatggcagaaattttgtcaaaattcgaaattcgccatataaccatttatatgcactaaaaattttcactgaaaaattaaaattttaaaaaagagaatttttttattattactcaaataagtaaaccaatttgagcgagtaactcccgagttaaataaggtctgagaatatgtgttaaactacaaaaccaatggactgttaatgtttaattgcaactgcgtcagcaccagaaaataattttgaaaaaaagttttctgacgtaagagaatttttttggtatgaaaattaagggagggattcttggaaagcaatgatctgctaatgatagggggatatttaagattaaactacaaatgagcccttaatgcttgataataattgtgacacaaaacattgccagcgtaacacttacacctattaattttcaaattcaaaaagcggaaaattgtttgcctacatgaatttagcgtgacaatttaatgagtttatatttctgccactggtacttaatttataaatgcgtaggatgaaaaatattagtcataaaaattgaatatggataat

SEQ ID NO: 24980 - DNA, 1806 bp, Heterodera glycines
  unsure (1)..(1806): unsure at all n locations
tttgggaacaattcttttttccattttctgaatgtttctttatgaatgcgcaattccttggcaaattctttctgttttccttggccatttaaattcatcaattctttcaatgagtttgagctttttctcatcataaaaactctttttcattctgttggttttctttaaatttaattcatttttccatttttgtattaattgccgatttgttcctaataattttgcaatttttctctcaattttgctttgatctttccctttgtattctcctttttctctcaacttttctttaattgcatcaaattttttaacagtttctcttttttgttgatcagtttgattcttttttaactctgaacacttttgagaatgttttgatcattcaaaccgttcatttgatcaattgggtcatttcccatttcatcaccgtttagttgaagaaaattaacaaatttcaaatttttattttgcttcttttgttcattttactgtttgatcactcccatctttgtcccatccgtcgccaaatatttcatcaaagtttggtcgaattttgaccgattcaattataaaagctttgacaaatattaataataaatgccacaaattcatttttatatataatggaaattgtataaaaaattctgtaatattatttatttatttcacaaatattgctcaatttttcccattttcttggcattcatgtaaatatcgataattcactaatttttaatatgaaaactgtttaaattttaatcgtaaatcagctcctttttctgcttttatacaaacgctaacatttgcttttttccttcccgttgcttttctttttatggtgagcggaagtgctgctcgagaccgaaaatttccattgacccgagacttaattaaaaaattttcttattcatttgtcaatctttaggagtttacatgaaattttttttgcttttttcccttgttttagccatcgtccatttttttttacttcctatttttcaactatatgtaaaaatatacaaaaaaaaaatttaattttcatcttaataattctataaagtttacacatccaataatatctcaggctaaagaaaatgacattaaactttgtaattttcagccaattttttaagaaaaatttataatttttaataaaatctattaaagaaaattggccaaatttttgagaatttccctcttcaaagtttaattttaaaaattttaatgtaatcatggtaatattaattattctcagaggcaaccaatctttactatatcaattttatctttcagagatacttcttttctatttatagtaaaatcaaatatctattttttaatgtttgcttttaaaaaatcaaatattattaaattattattttttgcgaagattattttttaaaaatctgagtaaaaattgaattctctgttagagattacgtaaatatattatattaatttttgaaatattggttaaagaaaaaataacaatgaataatatattgaaacgcgaataaaaaatttaataaatttatttaaagcaaaaaattcgatttcccaaaagtaaaaaaagtttgcatttaaaaattgctttttaagctttatcgaatggtgaatttcatattcggaaattttcaaatttttcgagctaggccccttagaaaaatcggaaaatttttttggacaanatggggttgaaaatatttttctggggtaaattatggtgctaagcacgaatatggtgattatttttcgtttcataatttttggaatttttaaaaaaaactataatatttttcaattttt

SEQ ID NO: 24981 - DNA, 1498 bp, Heterodera glycines
  unsure (1)..(1498): unsure at all n locations
gtaactaatctgtgttctttgccgatgcatacaacaagggaatattaatgaaaaaataaaaagaaaatataaacattatttcanaattaagaaatntaataaataaaaattcaacattaataattatatatttttatattgaaaaaatgattaatgattgatagtaattgataaaaaatagactttttgactttttccgaaaaatntagaccgaaaaaaacattctgaaaatcataaataaaatcataattttgtgttttagcgccaaatggttgatcagcgcttaaaactatcctaaaaagtgctttgttttattttggtcatgcatttttatggggtgggcataacggaaaaataccgataccgtaacaaattgttttttgactatctcgccgtcagatttttttttgttaaaaagtagtcatctctcagtattttaattataaaattcagatgtttattaataaaaccacggtccataacacaattatttaaaattcccctaagaaacaataatattttgggcatcaaaattttcgatatcattcaaaattcgcttttccgccttccaaaacttctttttcttcatcggtggttcttcgccgttcacgatgttcacataatcggcgtcgcgcgcacgctgatccattcgaagaacttcgatgaagcgccaaattgtagggaacactgaaggaacttattttagaagcaaattgtggtccagttcttgccccacgatgtcgttcagcgcagcggtactaatttagtatgtgaaaattttgaagtcccttaaattcagggttctgatttttgccaagaattcttacgcaaattgggcgcaagcaatgacagaagagttcgcagatggaacatttccattgcactgcaaaacctgcacaagcgcctaatttccgaaggacttcaaaaggtaatttcctgttatcagaaaaagaaattgtctccttctcaaaaaaaattgtctcccgtttaacgctacagaagtgaccttttcgtagaaacggctcgtatgatcatcaccgcactcgcatttgtgacaaatcagcatattcaattttgtaattcggacttttctacttttctatttataatttatttattttggctattttattaatttaataaataaaacaaaacttactgaaatataatttggattcaaaaaaatgttaaaattttattaaaaatttcttattctttaaaaatatttaaaaataaaaaataattttacacttaacattgaatttctgaataaattataaaggaagtctatacttttaaaatatatctaaaaaaataataagcatttatgaaataaatttaaatatttttaaaagtttttcctagtgattctacaaaaaataaccgcaaaaaatatttttattgcacgcctgaacagaaaaaaagttatgagttatgcgtttagtctgaagtatttcacccgntatattatttatccaaantaattttaaaaaattaa

SEQ ID NO: 24982 - DNA, 2656 bp, Heterodera glycines
  unsure (1)..(2656): unsure at all n locations
gacaaggggcgggcgcgaagcgcatgcccttcgaggtgcgcgagcgaggagcggagcgacgagcgagtgtaccgagcaatacgaacctggcctcttgcccggtagccacgcacggcggcgcacccggggagcgggggggggggggttaattataattttcaaaacaatttcacaatttgttactgaaaactccgcgcacaatataaattatgttgtgtaatttgcttacgaatacacactgccaaaaaaacattttttgttaaatttcatttatttattatttttatcataaaaaatagattaacttaatgaaaatatacggtaactgattatacggtcgacatcggaaaacaattaagcagatttcaaacggagaagttaattaaacaagcaaaacaatggataaaaaatgtgcaaaatgggcttaaagaagactttgatcaaaggtaatgtcggttgaaacagcgattgattttttgttaaaatttattattacatttgtccaagaatttcaacttttgggatattttgagccattttgaaattcttatttagggaaattttttttttgttgaaatccaaattaaattctgcttcattcctatttaggcttttcatccaagttgtccaattacgttttttccgtcgccatttcctcgaacatattttgagcaagcgtacaacgctcaaacagtaaatcattatttattataattttaatgtatatattttataaatcaaaattacacgataatcttgtccaatttttaaatagtgcttaagattaattttaatacaaaaaatattttgcttttttatatttcattttatatttttgttgaacttttagacctttacatagatgttgggatcgaggaatgacaaaataaatttgactcttaaactaataatttaaataaaccaaacatttatgaccagagtgcaaaatttgtgcaaaaattaatatcacaaaacacaatcaattaatttttcactgattccagcgatttttgaatacaatttttcatatcagttaaaaaaattaaaagtcaaaattttcaagaaaaaaaaaaaaggtttagtgcaagaccgaaacgcgaatcgaaaatgcattcttttttaggcatttaatttgttgtatttccgcataatgcgcgattatgaatttttgcgggaaatttaccaatgcataattgggcatgaccaaatgttggcaaaaagcttttgacatggcaaaaaagggctgcggcaagaaatgactaaacatttaaaaagtgtttaaaacagggattttccatgattaattatgtttggtcaatttggcttggttacaaaagatttaaggaaatccgttgtccaaagacattgtttgcacatttttaaaaaatccataatttaaaaacccataattttatgtagccataacattgcaaagatttggacagcttaatctaaagaggtaagttagggatttcgaaacccctgacccgaattcaaacacaaaagttaaatttgaaaattttgaattttcgaatttgttcgaattcgggtccagggttcgaaagaggtcaaaatgaatgccattttggtgcttagcgacacaaaaaacccctagtaaatgttttcacggctctttaaagcaaaacatttaatgtgtataaaataaggtgaaaaaattttcaaaatagtccactttgtaagtagcgccatagtcattgccaaaggtagctgggctcgggcaaaaatttcttaattttcaagaaaaaattttaattcattttgatcattctgcgataatttgcattatggagaagcattgccaaaaaatgcgatcaataagtgtcgtttaagcaataaaatactagtaaataagaataaataattgataaagccaaataaatataaataactgaataaagaatgggtaaaaaattatctatcaaaaaatatagaaaaattatttttttgtttttaagttaaacttagtttttcaaaacaaaaacttaaaacaattgttcaaataattttgttttttaattcttttccgaatgagtcagcattgcgctcaatttgcgcttctctaattcggtcaagaactgcttgaacttgtccgagggtggcacattgataagagtcgggtccatgcctgccacaaggcatttgtccaagcgacagccgcggcattttaccatacctatgaaaataaatattttaattgattttggcaaaaattaattgtcccaacttccaactccatttcgtcttggacaagtgaacaaaatttgttttgtgacgacacgacgaaagaattgcttacaacctgcaatttcaaaaagaatattttacaatatccgacaattccaatttaattaatatttaatctggtaaattaatataataataaaaaaattaattaaaaattttattgcattttctcatttttgaaacaaatctgctcactttcacagcttttgacaccgtagaaaatgtactggacattgtcgtccgcatattttacaatttgccanattggcgttttgatcgcccttgtccatattttattgttcctgtgctctgagctttcgtcaatatctccgtataatgangtctggtctgctgcccattttccattgaatccgatgactcctgctttaaa

SEQ ID NO: 24983 - DNA, 1642 bp, Heterodera glycines
cgcctctaagtcagaatcccgcctaggcaagatagcaatattcttgctccccggtgtcgggaggcactacttatgcgccgcttgcggtgcagcacaaatgccccagcatctggcccgatgtgcgtgcttaattgctcgcacattgccaaagccgtagcactcgtgtgccatggtggaacgtcggggcgcaaaatcacttgtatacgacttgactactggtcagggggttgttagcagtagagcagcttttacactgcgatctgttgagacttagcccttgatcggatgatttgtcttctttttccccctttactttttgtgccaacaacattttaggtacaagtacatgagaaagaaaggctctcttaagggagatacaatatacaaaatcagtacaccatgaaattaggtagacataagtttcttgactttgcttttttttccatttatttcaatcggctagtgctttagggttttgtgttttgactttgcttttttttccatttatttcaatcggctagtgctttaaagttttgtctttgactttgcttttttttccatttattccaatcgaccacgttaattcattctctatacatttagtgtcttatttcatgaaattatattaatttaattttaaataaagaggcaaatttttacagaaaataaatagacgctgactaattagctaacatttataaagaaagtagaaatttgattaaatgcatatacaatatacaaaatattacttttttaaatttgtataaagttcctattttgtctttgactttgcttttttttccatttatttcaatcggctagtgctttaaggttttgtctttgactttgcttttttttccatttatttcaatcggctagtgctttaaggttttgtctttgactttgcttttttgtccatttatttcaatcggctagtgctttaaggttttgtgttttgactttgcttttttttccatttatttcaatcggctagtgctttaaggttttgtctttgactttgcttcggctagtgctttaaggttttgtctttgactttgcttttttttccatttatttcaatcggctagtgctttaaggttttgtctttgactttgcttcggctagtgctttaaggttttgtctttgactttgctttttttccatttatttcaatcggctagtgctttaaggttttgtctttgactttgcttttttgtccatttatttcaatcggctagtgctttaaggttttgtctttgactttgcttttttttccatttatttcaatcggctagtgctttaaggttttgtgttttgactttgcttttttttccatttattccaatcgaccacgttaattcattctctatacatttagtgtcttatttcatgaaattatattaatttaattttaaataaagaggcaaatttttacagaaaataaatagacgctgactaattagctaacatttataaagaaagtagaaatttgattaaatgcatatacaaaatattacttttttaaatttgtataaagttcctagccgtatgtgctttgcgttggttaattgcagagggtgagtgtggtggatgggccgtttttgcgatatggtggttggaaaaaagaagcgatttcgttgtg

SEQ ID NO: 24984 - DNA, 1396 bp, Heterodera glycines
  unsure (1)..(1396): unsure at all n locations
tgaaattgtcnnaacagcgaatgaanacgtggcgaaatcagtgccaatttgaggccgggttcaaggccaaaagaggggaaaatgtccatccnaacatcgctagaatactaaaaataggatttgtttttgttaaagtaaagtcgatagagcgataaaagtttaaaaaaacgaaaaaaaaacaaatagtttgtgactctctttgtgagtaaattgtacaaagtttttacatttataggtttaaaatcaaaatcataagaaattcattcaagaaaaaaattgatttaaaatttcagaaattttttactttagttttttgccttaaaaaatttctggaagaaaaatatttttgaaatttttgcgacgagattttgtccggcaagatttctggcggtgagatttcggcggcgagattttgcctggttaccaaattgttaacaaattttgtcaaatgaccaaaattagcgctttttggaaaattttaagaaaaatagtagttttttttgagtgcgggcggcggtgacggtagtgccgcccggaaaattttttgtaccttttaagcaatataagaattcagtacataattgagttttcagatagataccctccaattcaggacaaatctgaaaaatcaggagaaccttggattagcaataaattgtccttcagcgtgctctttcttgaacttttaaaattttgaggcctagatccaaaaccgataaataccaattatgcacacaatccatcaaaaaaacttgccaaattcagaaaaaatatccgttttgccaccatcaatgcatcgaaagggcaaaagcagtgtcaatttgaggccgagttgagcaaggccaaaaaagggtaaaatgtccaccaaacagcgttgtgcatgtgctgaaaaaaatcacaaaaattttataaaattgcaaaaaaaatttaaaaatgatttaccaaaacccaaataccgggcactttttattaaaaaaacgcggaatttgggaaaaatatttttgtcagctattcattgacttttacagaaaaaaacccaaaaattttatcgaatttggaatttcattttagagctatttttgaaaatttgggcctttatggttttggggctataaccaaaagaaaacttgccaaatttaaaaaaagcaatgtttgtccaccaattcgaaacgtggcgaaagaagtgccaatttgaggccgagtgaaaagccggtcaaaaagggaaaatgtccatcaaacaaacgattgttaagcagttgctgaaaatgttaagaaataaaattgcaaaaaaaaagcaaaactcctaaaaacgggcactaaacaacaacaaaanccggatttggtttttaggcaaaaacacgagaaattggaggcccattttccaaaaatccttaaa

SEQ ID NO: 24985 - DNA, 1333 bp, Heterodera glycines
aatgaatttcaaaacaaatatttccaatttttcagtcattgaacaattcaaaaaaaaatcgaaaaatatttattaaaatgttaaattacaattaaacaaaaaagtccgagttcaccgttccgtctctgttgtccatcaattagcaatattcgggccgtgtcggccctgaacattgtgccgacaaatgtccagcggtggcctttcgcgcgtcaattattgttctattaaatgaaattttaaaatttaattgattactttcttctcaatttcacctaatgtcctcattaatcacgccaaatttgagcggtttcgcgtcgacagagattaactcagcaggcaattggtgggaatgaacttgaacctaaaataatgaaaaatgtttaaaataattagttaatttaaaatcaaaatgtgtgaatcaccgtgctcggtgaacccggcacatttttggagtcaatttggacaatcaattgataagtgccgcccatcaatggcgtgtaaatgccctaaattcattaattacccagtttcggtgatctttttgttctgctacaccttgtagacttgattcctcagggcggacactttgacgggaatctttaaaaaaacaattaataataattaattatttggaaataattatccacaattaattaattaattgattattaattttgttcaaattacgtccgctctttcgcccaacaatgccgcattgattttgccgacttgttcatgcatttcggatgcgtcaatgataaattcggccgactctttgacgcgtgccgtcgtcagtccttcaccacgcaaaaccacctgaacaaaaaaggcaaataatattttgtattaattatttcaatatttttattcgtttttcttctgtattccccactttgcttagttcgtctctctcctccgccgccgtttggccaattttttcagcaattgccaacaaagggtaagcacttggcacgaccaattctaagagaatttaaacatgattaataaataattaaaaaaacctatttcccacctgaacagtacaagtacagcttgtacttgccggccctgggcggtgtgaacagcagctgatgtttgctgttgcccaacgagttcagctcaatgattggtgccgcccccctctcggcacctcccaacagttcgccgtccccgtcgcgcacctcggcacgcaatttaactaaaaaagtgaatgattaataaattgaaaaaatgagtaattctaagttagaattgtaagttcagcttttaacgaaaaaaccaaaaaggaaataatagagccctggaattttgaaatggccagggacgacctgca

SEQ ID NO: 24986 - DNA, 2005 bp, Heterodera glycines
  unsure (1)..(2005): unsure at all n locations
ctacacccgaagcttttctaaattntggcggaagtgcaaccatgcttctcagggcaaccaccattttgtccataatccatctctcacatcggtctccattgcttgaatctcatggcgagattcggatctttcatgctgtattcaagaaattaaaatataatttaattattaattatatttttaaattaatttaaatatactatgaaaaattttattttaaattcaaaaaataaatatttttatatttaagaaaatttttatgataataatacaattattctttaagactacacccgaagcttttctaaatttggcggaagtgcaaccatgcttctctgggcaaccaccattctgtcccataatccatctctcacatcggtctccattgcttgaaactcatggcgagattcggatctttcactctgtattcaagaaattaaaatataatttaattattaattatatttttaaattaatttaaatatactataaaaattttaattttaattcaaaaaatacatatttttatatttaagaaaattttaaaatttttatgataataatacaattattctttaaggctgcacccgaagccgttccaattcggcaggagtgccaccatggttctcagggcaacgaccattcagtcccatagcccatcgctgacattgttctccattgcttcaagctcatggcgagactcaaatcttgcattctgtataaaagaaaataaaaatatgatttaattataattatatttttatgaataatttaaatattgaataaaaaatttaaataagcaaattttatttttagttttatttaaaaaaatttctcgacattttgcgtaaaattttatttataaatattatttacttcgggaaatatttaaatatttttgttatttgtttttcacataccgcatctctgccatgtgcaatgcgttgctgataacatgaacgattgtggcccaatgaagatataatcagtaaatttatcaatgaatctttaaagtcaaaaaagaaaagaatataaatagttttttcgtaaaattaatatgagaaaaacaaccaatgaaagggaggaacaatgtttggcatcacaacaaaacaacaattatttacttatgaactaagtaattttgaacatataaacgaagatgaaattttttgattcattctttttattgaaaataattaacttttcgcattaagcttattttggttatttttattcaaaatttaaaaatttaaacaaaagattaaaaaagacgaaaaaggtgtagaactttaaaaaaataaactaatccaagtatgttagacaatcggcgatttttggagttagtgaatttaattatattattaatattttattaaaaataaaaattttaaattattttaatcttaaagtgtgaaaaagaaaaaatcaaacccaaaagacacaaaataatctgagcgcgaagtatgtatgtatatttatgccaaaacaaaaggttttgcttattttgattcaaataaaaatcagtcatttggcagacattttcttttgcttaaatgggagtcgaatcaaaaaaatcaccttggctacactttcctactaaaggttgaagcaatgcaaagaattttaaggatcttttcctaaagtgccaatttttccaagaaaaactctcttaacttagcttaaaaatagtgaaatgaaataatcttgaaatattcgacaggttggattttgcggataaccttataacttcaaaaattttctctattttttaaatttgctattttaatttttggtcaatctttttaataaatgcaacaattgtcggtaaaacttgatcaaatagatcagcttgagtatataagtgtgaattttcgcgcatatttattaatttcaaattttggtgtgtgtgaccccaaaacaggaaacaaccaaaaaatgcgaaataaaataaaacaatatttatattgatgatactttatatttaaaattaaaaaaaattaattaa

SEQ ID NO: 24987 - DNA, 2121 bp, Heterodera glycines
acttaatcattcatttttcgaaatgcatttttatttcttaaaatttattcctttaattatatattcctttttgttcatcttttcaaatgccaacttttcaacggtaattgttaaaaaaaaattaaaaatttataagtaataattatctttatttaattaggttgatgatgacgcatttgtcgcatttgtgcaagggcctgccaattttgagcattttttagcgggaaaagcagtgaattgagcaaaataagaaaatgttggcacaaatttatgactcttaccttggcattctgtatgccatgagaaaggattggtactgcaataatttaaaaatgaagtttgatggatcatttaccaaggatgtgtgtgtacagtatcgcaaatatttggacatactgtacgaatatttataccatgttcatgccggacattccgtaacgaggccaacattcattgaaaatgctgcattaagcagatataatagagatctgattgagtttctgatatcattgtcaaccatttccaaattttatctttttgattcggaatttgctttatcttctgtgacggatcgtgaggaaatcaaaattttttgcaaatttgaattggaaaatgagaattgcttagaatatcatcatggcctcgcatacaatgaaaaagaatttaataagaaaaaaaggcaaaaaattgactcggaaattcgagcaaaatttgaattattgatggaaaaacatttcaataaattatgggaaaatgccaaattgaaaaacggaaacaaaaacagtgatagaatgtccatatcattggcaaaaacaatgccatcggattatgctgtacatatttatgacacctttttgggcatgccaatatatgactttgatacattagtaagtgaggaatgtgccaaaaatatgggattaattttttatattgaaaatcagatggaagacgaagcattgattaattttgtaaaaactggaggttcaaaaatgactaatattgaaattgctgaagatattgaggatttttatgaagcagttgaaatgcatcttggccttctgttattgatgagaaacaattggcactgtgccaatgccaaagtcgcaaatgcagaaaatgaatgccaaaaactccgatatttcgtggaaattttctaccaatatttgttcagagaatggtgtggaattgcagctgtgaagccaatgttacaaacgaataacgattttgaaatcaagtaaaaactggtttagagtaatttaaaaaattaaagttttttaacaattaaaaaaatccaaaaaagctcagtttactgaaaaatgcttggactggggggctggattaataagacaattgatttccacatttatggcaaaattacgaatttttagcttggattaaaacattgaaattttattgaaatccttccgagcgattaatttaatcatcaagacgaccttcgttttattattattactttaatttcaggccggttatcctaagtgtggaagatattctgagctcctttaatcaaatttcaatgtatttttttggcgcaaattcgagtgctgacaaaaataaatttgcacatttgttgggagagttagctacttataaattattaaatgagcacgaattggattataatggaactccaggtaattgatgggtaggagataattaaaacataattaattcattaaaaaatatgtgacatttcaaaatcaatttgttacaaacatttcaaatagtgagtgcttcggcttcatcatcgactgctggaaatgcttctaatttctcaaggtaatttgttggcgcgtaattttaaaaaattcagggacctgtttcgaattgcacccggacttcatttcaagagaataaatcttttttttcaacattacttatccgggagaatttttcaaaaaaattaactgattagaaccaagattctctacgaaaatccctgcagttcctgagcaaattcgtgtcatcaattaattaattaattatttaattactattttttgtagaattcttaattcgtaaatttgacgaagaattggatgccctgcttgaaaaatggagaagaattcctgtttctggattggaaaattcaccattttt

SEQ ID NO: 24988 - DNA, 1276 bp, Heterodera glycines
tttttaaattaaaatgccaaaaattcaaaacaaagaaatcttctctgaagatttttaatttcgcttcacgattctttaagtccaaccgtgaggccggacagttccaaaatttcgtaccacatttcagtggaaagtccaagtaccttaattggacaaattcttgtcaacgagaacagtcgcgtttggcgagttgtggaacagaaaaaggggaatatcagatggggtgcgttattttaaaaatttctcttttcgtctaccccccccttctttatgcactatttcttaccaaaattgtatcaattgtttgtttttgaaattgaaatgaaaatatacacgaaaattattctcgatttaaattttgcttaacaatgcttttaagtcccaccgttataaaattggttccggattttcttagcttttttaaattaaattgccaaaaattcaaaacaaagaaatcttctctgaagatttttaatttcgcttcacgattcttttaagtccaaccgtgaggccggacagttccaaaattttgtaccacatttctgtggaaagtccaagtaccttaattggacaaattcttgtcaacgagaacagtcgcgtttggcgagttgtggaacagaaaaaggggaatatcagatggggtgcgttattttaaaaatttctcttttcgtctaccccccccttctttatgcactatttcttaccaaaattgtatcaattgtttgtttttgaaattgaaatgaaaatatacacgaaaattattctcgatttaaattttgcttaacaatgcttttaagtcccaccgttataaaattggttccggattttcttagcttttttaaattaaattgccaaaaattcaaaacaaagaaatcttctctgaagatttttaatttcgcttcacgattcttttaagtccaaccgtgaggccggacagttccaaaattttgtaccacatttctgtggaaagtccaagtaccttaattggacaaattcttgtcaacgagaacagtcgcgtttggcgagttgtggaacagaaaaaggggaatatcagatggggtgcgttattttaaaaatttctcttttcgtctaccccccccttctttatgcactatttcttaccaaaattgtatcaattgtttgtttttgaaattgaaatgaaaatatacacgaaaattattctcgattttaattttgcttaacaatgctttttagcccaccgttataaaattggttccggattttcttagcttttttaaattaaattggccaaaaa

SEQ ID NO: 24989 - DNA, 1278 bp, Heterodera glycines
ctgaccacgttcgaaattgatgaaaagataaaatcacttaagaatgttctgtgaaagtttggtccgttgtgccaggtcgcgcggtgttcaaatggagttgccaaagcgggggattgaccattttgatgatacatcactgtgagttaagggttaattcacggtcactgtttagggggcaaattccgttaatgattcacacggtaaattaacggttcacgggctcaattccgatcgactcacgtggcatttcaccgtcatttttcgcgcgatcatttcacgctcaatattcatgggggcaattcacgtcacatttcacaggatcattattgacgctcatattttttgggtgtcaatttttctgtcacggatttgctcagttgtttaaaaatgggcttttttaattgaatatgtttttaataattttttaaactcaaattaatatcatcttttttccagtgaatttgtccgtgagcaattcaaattgttttcaaaacatcttgtccgttttgtgattttctttgcgcccgcgaaggatgcgtcccatgccggtgatgtacaccatacgttcaaattgcaaggaattaaacagggcaagtccaactttttcctccttattgtagtgatgttcaagactcaaaatttccgaaaatttaactcaaagaatataggaagaaatttttcaattttacggaatataaattaaaattcctactccattcatttgactcccgccaaatggccgcattaatcaaaaaaataatggccaaactggggcttaatgatcaggcggagaagctaaaaaagcaagggaaaaagctcgttgaaaatgcgaaagaaatacaggaagcacaagaaaggcccaatacgcctttcaaggataatgaattatacttagaggaattaaaaaacccaaagtttactgctggagaggttacacttgaagtaagcctaaaaatgtttgacggtgtcgggtccactgatttgcttcctttttcagacttttaaacaaattcatatgctcattttaaaaaaagacaacgaagggatgattcctggaaaatttcgacaaaagaatgtgtgtgtaaaaaaaggaggaaaaattgtgtatgtggcgcctgactacaaaggcttggatgaaattgccaaagtttttttgaaaaaattaaacgaagttttggtaaattaaattgatagtgccttattttcacataaattttaaaattataataaaaaatagggacctaattttttttcaattttctgatctttttcattaag

SEQ ID NO: 24990 - DNA, 2102 bp, Heterodera glycines
  unsure (1)..(2102): unsure at all n locations
aattcatacaaataatagtttattgtttttgtacgttattcgaattttcaattaaaatttacaattatataaatatattttcatcaaatttaatttatttaatgccaaataattattccatattattatttttatttttacataggtttaaatggttttatgaattttgataaagatgataaactttaatgtttggaattatttttaaaattttaaattataattatgtcatggttcatcgcctttaattattttaattcataaaatattttcaaatttgtatttgtatttatggaagtgcttttataaatttaatttgtttaaataattttaatttctctcttaacatttttttctattttagtctcatgtttgcttgagtagtaagttcggaagtatttgtcgtcggtttaccaacttgaattaaaatgttttatttatttatttattttcctttttaatttatttccatttattttaacgactgaacttcacaatgctcatttaatattaatgctatttattatttaatttgcagattaaaaattatagaaaaataaaaaaatagttatattattactatatatgttatattgactaggggtttcgttgccaaaaacaaaatctcccggccgaaggccgggagcgccctgaaagtagtggaagggtcttacaactttttgaggtgcatccgggaaaactataggttttttgatccgacggccaactgagtcccagggagcgatttgtcacttttgcttgcagtttaggacccgtaactttttttctaaaaccctaatcaaaaagtacccgctttgagggcacccccccaaagggtcctctacatgcttgtattttttatttttttattagagccaccccttggtctgcagttgtgagcaactgaagcgtgctcaaaaagtacacttcagtaccaggtgaataacacgccgggcttttatctgagggaaatgtgcccagcagacttattgtagagcttggaaagctcgattttttgaaatttcaaaatttcgaaaattttcaaaatttttcgagttaggcctaaaagtaggttttggggttttttaattttaggattttttaacgatttttcccgggaaaacggaggactcttccaacacatagtttttcgagctctatcgaatggtatttttttcggaaaaatttcagttttttcccggaaatagaaaaattttttggcctgagcgggacatttgagtcccgggcccataactcgttaggggttgatttaatcgaaaaaatgccttagagctaaattgtagagcttttaaaatgctatcgaatggtgtgatatatggtcggaaattttcaaaaatttccgagctaggccccctagaaattttcggaatttttttgttgtgttgaaaattggggtgaaaaatatttttcaggggttaattaaggtgctgagcacgaatatgacctttgttttccgtttcaaaatttttggaattttttaaaaattcgaaaatattttccaattttttggccaaggaaatttgggctaatatttgaaaattcataacatatgattgagttggtcaatttaaatgaaataaagctttaaaaatagagaaaaataaggagaattttatgggatttatttgggttttctacatgaattagaaaaaaattattccagaaaaactggaaattttcgaattttcagaaaaaaattcagctctcggttctgaaaggtcactctggaaaagtaaaatactacaaaaatccgcaatttttagccctattttataaattttatttcacatttttatcacattttaaaaaaaagatacaaaaataaaactgattttgggattcgggaccaaagggggtggacaggatttttgagtgaagaaattttttcgccaaaaatcttccgaaaacatgtctttaggggtaatttggaccgctgatcacgaatacgtgatctgattttacttttgacatcgttaagacctctgaatccccgtgtgattggggattctggggcatcattttggagggntggggcaagttcgaatccgggacgaaacacattatttttctatgaaattttt

SEQ ID NO: 24991 - DNA, 1484 bp, Heterodera glycines
  unsure (1)..(1484): unsure at all n locations
gctaattttaagttgttctaataataaaacatataacggcttaaatgcgcgggcggatttcttaatgcaaaaggatatggcaatacaatggttcaatattgctttgatggatattcattttgctatgcggcaacctgcgccaaagttacgttttcttttcattgtttcgatagcaaattattaaaaaaaaaaacaaattttttttgcgaaatttttaatttttatttgagccgaaacgggttcggattcaaaattctggcacattgattttttaaaattaaaattttaagctctacgaaataaatgtttaaatttctatgtctgatatgttaagaaatgaatttataatactgttactgattgtattttaataataactttaggtgaggagcatgtccgaattgagtggggatgtgctaagaaaatggaatgttctgcaatcagtgccggtgtacaaaaggataccaaaatggcggggattaattgccagtgtaaatttggcgtgatgaatgacgatttcggaaacagaaaattgcatgttacaccaaaaggacggaccaccaccactgttagcacgacggagaagagaaccaaacgcactcgcaccacgaccgaatcaacttcaacaacgaaagtgccaaaatcaaaatgaccaatagggaaaattcaaatttaaaaaaaaaattttgttggcaaaaaaatgatataaaattgggatttgttaataacatgaaaaacaaagttttagttccaacaagcccattaattggactcataaaatgcaatagaacagaagtatttctttttttcaaataattttattaaaattttcagccttctccttcacttgctaatgtcaaaattggaaataaaatgcagtgcatggccaagaacatttgcgatatgtttgttgctttaatatttgcttttaaacaaattgccccaaaatttgtttttgtttttttccagtaatgaaatgtggaagggggcaaagcttacgaaacgctttgaaattcgcaaaaagtgcgaggaaatggtcaaaaattgggaacagatgacgaaagaaattagcactgaatacgaaaatgcggacaacaaaaacagtgcgctcaacaaaaatggccaagtgttcttggcggatttcattagcgcgcgcattcattaagcccgagaaatgaatgccttttcgtcaaacttaagcgatgttttactaattttgggatttaaaaaaatatatatattatttaaaacatattcattttgtaaaatattttcctaaataaagtttttcccgaaggatcggttaccaccgccgaattactttataaaattatttaatctgaaaaaattaaattaaatttttttaatttctatttaatttatatattgagacgaaattanaataaataagaagaattttgggactanatttaagagtaattaaagaatgaatttagagaaaaataaacgaaccaaatttcttt

SEQ ID NO: 24992 - DNA, 946 bp, Heterodera glycines
  unsure (1)..(946): unsure at all n locations
taaaaatatgtnnttaagaatatatacgaattatatatttttcttacgtttttcttcttttttgattaacagttattaaataatctnttgtcttatgtgtgtagatatcttaaaaagataaatttgtaaattaaatttaaaagatctttgtcagctgaaataattttaaaatggtcatattaataaaggttaaaattttttataatcaacataattcattttaatctttttaaaccataaatattctttttattaatttaataatcttggggggttttttttataaatattacatatgaaggaatgtgaattcattaattggaggtaatgatgaataatcaccattgctaaactatttggtaacgtgaacccaccaaaatcatttcacaaatcacattctcaaaaactaaagaactctgtccaaaaactaacagtttgtttaaaataaggaaattatttttattttaataagaaaaatattttttaaggctaaaatgcttgggaaacgccaatttgtcctcattaatcatgtcattattattcattttacactcatcaaaatgctcgatacaatattgactaagccgtacatcaaagttcctgtttcgcctcagaatccgagtgtgcaagaagatatattgagtggggttggccttggtatgtcatttggcgcattcggcggcggatcctttggccttgtcctcctgggaattgctggaggccattatggagctttgatgaatgagcaatatacgaattgtcaaacactagttcgggcctgcatttgcaataaagccacctgtgttttaaacgcagatgaacgatgtttgctttcgtttttgttttatttttttaatgaaaaaatctatttaaaataaattaagggaattcggaagctgacacatgatgtggcgaaatccatgaatggacatgcttttgcgagtgg

SEQ ID NO: 24993 - DNA, 1754 bp, Heterodera glycines
tttgaactatcaaattgttgtcttttcctctccacttttcctctgattggtagcatatttttaagaaaattaaggaattttagggtcaggcgcctaaagagtgccgtcagacataaatcgaaaaattctgagcgagtattcttgaatatttttctcaacaaaacctcgcgggatcccgtcccgcaaagaattttggattccaatcccgcagcgggatccgcaaatttgaaatttccggtctctagtgatcatacgcttcactgcaccgcctcgctttatgattgaagcaacaattttattagaaacttttattttgaaatttttatttctaagaaatatataagaatgaacattatctcgaatgattaatgatcattggtcggaaaagcaagactcgaccattcgtttatgtagcgaaaaattgaattgattattttggttcgatggcaccttattttttagaactttattttctcattgataaatttgtagttatttggtttttaaaatttaatgtctatggttttggaacggcaaattttggaaaatttttgagcaaataaaaagtttttagttttttttgtttgttaatgttaatagtgaggtgtgcctggtaaaaaattaaactttgttagcctaagggtagtaggtgaaacacgaaaaatgtttctgaattttgatcagattgtatataaagataactttttttttaccaattttgggtcttttcgggaataaataaatatttcacaatttttgcatttttagtcaatattttgttcccaatttttgaaattttcataagaaaaattcaaaaaatcgaaaatacacccctaaagaaacgacttttttagaaacttttaaaaaaatacacatccgaaaattttcactgacaacaaatgaaattattagaaaaattttgagatttatttgattaaattgtgaagctagaattaaaatttggcattttaagctttaaattttttggtaattaagtttattttttaagtttgtttaagcaaatattgaatttcttggaatttttgagagattaaaaattaatttttgtcagttttcagtccatatttggcaatttttaagctttttcgtccatatttgaccttttttagtccatataatttcgagccctaatacatatcagcttaacgtcattaatttcaagtttgggagtattgaaaatttattgaaaaaagattcttggctattttttttctgcttttcgtcatatatttaaagaagagtctttcaacgagaattatggattttatcttactgatgagctcaatatgagagacatttttaaaaaatttagataagtaaaatgaaaattatttaaatatttggttttattcttataattagggcttccaattatatggaaatccatattttttttcctggactgtgggaggtctgaaacgcacgaaaaacatgtttttaacttggtttaaagcttctaggatgggtttccatatccatttttcccatatttttccatatttcgcgatttatgtccatatttccatatttttccttattttggcatttttatccatattttatgtccatattctgggatttttccaaaaaacctctattagaaagacccccatcagctaaattgggattttgaccccaaatcggaaaatttttgcgaaaaagacattttttatcaaaattttgtcgaaaattttgattaatgtatcgtgtttttttcttcaaagaatggtttt

SEQ ID NO: 24994 - DNA, 1138 bp, Heterodera glycines
caaatgctccaaaagcgagccaagggccggagagcaatgaccatttaattcacagagaattttcaaatggctattctacgccagaaaaatggctacctctttttctgagtaattttgtgttcaacaaatgctccaaaaagcgagccaagggccggagagcaatgaccattttaattcacagagaattttcaaatggctattctacgccagaaaaatggctatctctttttctgagtaattttgtgttcaacaaatgctccaaaaagcgagccaagggccggagagcaatgaccattttaattcacagagaattttcaaatggctattctacgccagaaaaatggctacctctttttctgagtaattttgtgttcaacaaatgctccaaaaagcgagccaagggccggagagcaatgaccattttaattcacagagaattttcaaatggctattctacgccagaaaaatggctatctctttttctgagtaattttgtgttcaacaaatgctccaaaaagcgagccaagggccggagagcaatgaccattttaattcacagagaattttcaaatggctattctacgccagaaaaatggctacctctttttctgagtaattttgtgttcaacaaatgctccaaaaagcgagccaagggccggagagcaatgaccattttaattcacagagaattttcaaatggctattctacgccagaaaaatggctatctctttttctgagtaattttgtgttcaacaaatgctccaaaaagcgagccaagggccggagagcaatgaccattttaattcacagagaattttcaaatggctattctacgccagaaaaatggctacctctttttctgagtaattttgtgttcaacaaatgctccaaaaagcgagccaagggccggagagcaatgaccattttaattcacagagaattttcaaatggctattctacgccagaaaatggctatctctttttctgagtaattttgtgttcaacaaatgctccaaaaagcgagtcaagggccggagagcaatgaccattttaattcacagagaatttttcaatggctattctacgccagaaaaatggctatctctttttctgagtaattttgtgtttcacaaatgc

SEQ ID NO: 24995 - DNA, 1452 bp, Heterodera glycines
  unsure (1)..(1452): unsure at all n locations
aagttccccagtcgattttcccacgttgaataatttcgaaacacttcgaaaggttgcctccgaccattcgcaattacaatctttgtcttcattaattccgcgcaattacgaattgtctgcaataattagtatatgatctactttacctttggtggtgctgcgcattttatgtacaatcacatgcattttagatcagttttttgttctatttttgccactttattctcgcggaagtcctctcatttggtcagtttcgctgtatcggcaacttcccactgattctgcagcaaattccgacactttttcaatgtccatcacaattttttcaaatgacaaatttcgctggtgactcggaaatagcagtgggtagttcagtaagaagccaggcgttccgcacatttttgattggctatggtactgtttgatgccggccaattcttctgctgttaaaataccgtacggtcctgtaaaaaaataaatgacataattgtaattgttagtgatccttaaaaatgtttagtttttaaaaagataattttttaaaaaagtgtcaaaagtctttcaaaatgtcaggttaagatttttttaaaatctagcgatgcttattagtttttttttgcagaaaaatagtatttacatttttttatatattaattcccgatttttaccaattttttccgaaaattcattttgtgagaaaagcggaaagcgaattttgaaaagtgccgagccaagcatttgacggcgattctctgctgaacaatcaatgccattttcacggcacttttcgtcggcccaacggattgccaaaaaataaattagaattaaataggaatattttaataataaaatagtaatttttataaattttaaaaaaattactgcttcccatacagaaatctcttcattcattcgcaattggtcacgctgcaaaatttcgcataataatttttgatcaatttgcaaaaattcctccgatttgagcaaagcgtccgcatttttgttgatgtaatccaaacaatcgttgcaatattccttcaattaacaaataataaataaatgatcaattataggttattttatttaaaaataataatttaatagatgagactcatccaaaaaattaattgcattctttcgtaaattcgaaataagaattgatatttctttcccacctccaattcaaaaaggcgggcctgggcaaaagcgtagaaaacatttggcaattcggagaagggaatttgcaaagatgcgtcggccaaatcagtgatattgtattttttggctaattaggaaatcaacaattattaaattttattccaaaaaacaaatccaccggcgtaaagcactgccattgcattgccgccgtttaatccgcttatatcgtccgtgtaaatgaagctcaacatcactttanaggcttctgcttcatcgtcagggatttccacaaca

SEQ ID NO: 24996 - DNA, 1382 bp, Heterodera glycines
caattaatcatttcttctgcggctgatcaccgtttttgatgttttgtccgtcactcattgtcagaacacgaacaaaaatgtcccaaatcggctggtgaatccataaatgtaaatcagtgcctgtttggtcgaaaatttggtgatttgaacgaagaaaatccaagtcgaaatggaaatgatcagcgaagtaaattatgttggccaatggactgtcagccaatggaatggcaccgaatttgcagcgccgataatgacaaaaaattgtggtaccgttgttgtgaaactgaccttgcgacgaatttcgattggtctccaaattgtcaattagcttttccaccaacgcattgaaacgtggcgaaagcaatgccaatttgaggccgagttgttcacgtttttggtctaaaaatggtttaaattattgttttaattaagcctgatggatgactttcagttcgtatttaaacattaacaaatatgtaaaaaccgaaaaatttgaatttccattgaaaaaaagttgagttaatcaataacgcacaccatctcaaacatgagaatgcgaacatacagatggtgtataaaaaaacaaattgtggtcaaaaaatttatcgaaggataaaaaattatttaaatattagaaggggttcaaaagtgataaaatggtacaaaagtgattagaaaggtacatatacaacagaggtacaacatttgttagaagaggtacaactgtgatgagaagagatacaatagtgattggaagaggtacaaaagtgattgggagaggtacaaaagtgattagaagaggtacaacagtgattagaagaggtacaactgtgatgagaagagatacaatagtgattagaagaggtacaactgtgattaaaagagaagaaactttgaaatacaatgattgaatatttattaaattgaaaagaattttttgaaattctaattgaaaaagcaaatgaattatttaatttaaaaagaaataaataatcaattttaaatgtcaaatttaaattttgtggtcaagatatggggcgcttcgcgcccgttttttaaattttttttggttcagatgggcgcttttgcacccgttttttaaattttgttgaactcataaaaaattttattgttaaataaattaaagttttttaaattaataaaaaccttgaaaataaccctaaaatgcacagaaaaataatgttacaccgtccggattcgaacctgcccccccccctcaaaatgatgtctcagaatccccaatcacacaggggattctgaggtcttgactatgtcaaaagtaaaatctgatcacgtattcgtgatcagcgtcctaaatacccctaaagacatatttttggaagatattgtgaaaaaaattt

SEQ ID NO: 24997 - DNA, 882 bp, Heterodera glycines
gaatttcgactttttgattcaagtcttagaaaagcgctaaatttttgaaaattatcagtttttaaattaaattttttttcattattccccctcaaaaaaaaaatccgaaaattcagtggtcatggccggcattgtggccatctacgggctggtggtggcggtgatcatttccggccggctggaggcggccgggcccggctacaccatcgaccgcgggttcagccagttcgctgcaggcctcgtgtgcggtctgtgcgggttgggcgccggctatgccattggcgtggtgggcgacgcgggcgtgcgcggcctgtcgcagcagccgcgcctgtaaaaagcggtgttgaaagcaaaaaaggtcattgatttacattaatttacatggccggagaccccttcgcaaaattggaaaattggccgctgatcccttgttttgcaataatctgaattctgagctctacatctgaattttagtgttctttatcctgaatttgaaaaaaaaacttggtcaccctcaatatacatatacttctgaacaattctaatgctaaaaaacaggcactcgcgcgaaaactgaataaaaattttgtatttgaaaaatttccaaaaatttttacgttggaaaattaccggtttttaccggtaccggtaccggtggaaaaagttggtaccggtaccggtttttttacaattaccgattaccgctcaactctagtcgaattgattatttatttggggtaaagtaaaactccccgaaatctcatcatttgcaaaatattctcctatttggtggtcctcttatgtgcgttccctttttcttccgatccgtcgtcattttatgtcaaaatgttccgcggccttcgtttttttactaaatttctt

SEQ ID NO: 24998 - DNA, 1010 bp, Heterodera glycines
  unsure (1)..(1010): unsure at all n locations
cccctcagaatcccagcgtatcacccctaatgcttcacgcaaaaaattttcaaaaatttcgaattccgccgtcacgcataacccaatttaaacttgagctagaaacatgcttaatagctcattagaagcgcctaagtcttctgatgtgccctttctccaagcacaagacgctatctttaacacccttcgcgctagaggccgacaacagcgacccgttcaaaaaatttccgaaaattttcaaaaattttctgaagaaacttttttttaggtgaaaatttcaaaaaacgctttccaccattcgatagagaatccttaaaaaatagttgtgctcttttgttcggagccgatccgaccaacttgaagagagttattcaaaaagcgcggttccacatcaagtatcttggtgagtataggacatgtaatgcccaaatgtatatatggcgtatttcactatattttaaatatttccagtataaaaaattctttaaaattccaaaaaaattttcacccccagaattattaaattttttattagtgcaagagtagtgcaagagtagtgcaggagttgttcatcagtggttcattagttgttcgtgagttgttcaaaagttgattattttacataccaagatgcacatgcagtatcttggtgataactgaagttaaatcagaaatttaaacgtcaaacatctttttacactgttttaagactttctgatgtattacttttattacttaacctaattttcaaaattgaattttttcggattctggacacaatttcccatgaagtatcttggtcagtattggacatgtaatgcccaaatgcacgtagggcgtctttacacattattttaagtatttccagtgtaaaaaattcatcataattacccatncacccctctgaatccctgcgtatcccccctacaaaaaaagtaggcaaaaaaattgtcatcagatccctttttagggtatttccgaaacccgaccaaacctgccttaaaccatct

SEQ ID NO: 24999 - DNA, 1510 bp, Heterodera glycines
caaatgatgacatttatgttccggttgtttgatcaatttgtattgttcttcatagctgcttttgtcaacacaacctccattcggcaaaatctcttttcgtcgttttcactggaaaagcgggaaatgttttaattgaatttttcggtaaacagtttcgaatcaatttgttattgtcaaatttaattttagcatttggattaaaaactaattaaaaagtttaaagccgtaaaattggattttttgattgataaatgaggtcacattttcacaacagtgggaggcgtatataaaaaggaatgatattaatgggcaatttggttaaattggtgtttatgcaaaaaatttgcaaaaattttggaaccaaaggtatagaaaatttatttttatttccatagtctattttctcgaattaataagtaaatgttgaaacgaaaaaaatctatgctcaaaaatgagacccaaatcgaccataaaaaccaatattttgattaaattacggtattatgtaagtaaatttttaaattatactattttctaatgattctggcatattttttgtgtcttttgcaataaaaattgccattattcggtgcaaatctgttaataatttgaataaaaagttccaatttttaaaatcctattctttctttaaaaattggcccaaaatcgcaatatccattttagcttaacagatggattagcttagtcatacatcccctaaaaatactaccatcatggcaaaaaatgaaatagcactgatttgcttcttccgtgcatttgtttccaccactaacagtataatcaaatatggttttgcgtccgcgcttgcacgtgaatttgcgtgtcgctttctaaagttgtggttgtggtcggaaacatcgcctcaaccttttgaataggaaatttattaaaagaaaggattattcaaaactggataaaaaaagtgctgaattttttttgtttaaattaaaaatttaatcaatattcaagatcccgcaatccctgcgcaaatgcgggatttgcgggttaatcatattcggcctagcaaaaattttgagtttcaattgcgcaacggatacgaaaactttaaatttataaaaaaattaaatgaaaaagaaataatagaaatcaaacaaagaaatgttaaattgttgaattttattaaaaaaattttttctttaaaaaattctaaatactcatttaaaatttttttcgaaaaagtttttcataaacttgaaaaaattaaacttagttatcggaatttctttaaatatttttcaaaccataagaaatttttcttaattttttgtagtgagggggggggggggggtgatcgtcttttaagaaacgtgtccgtgccgcacaaataacaataataaattagacaaaaaaaattgttaaataatcaaaaaattgacaaatgattttttttaaagtgcgaaatttgcaattaaaaatgacctccttccaatcgttgacacatgtgtactgaaaatgatccatgcatcat

SEQ ID NO: 25000 - DNA, 863 bp, Heterodera glycines
agggaatttatgtgaccagcgtggaagcaaagtggcgtgccaattccctcttaataattttaatatttcgattttaagttcacccgcggaagaagctggactgaaagtgcatgacaaaattctgcaagtgaacggcgtcgattacgtaaaataaacaaaataaaatttacaaaaaaaacagataaaaatggtataatgagtttttttctatgaaattctgatgccacttaaatttttttgaaaattgtaataattttttttctgtttcattttttgcagacgatgatcactcacgaaagagcagtcaaatatttgaagaaggagtccgtgttggatttgctggtgaccagggccacacccaaacacagcacggaaatgcaaatgtgaacagattgtccgactgctgatctagcacaacatttcatccaaataaacacacattccaatctttgatccatgtattggtccaatcgaaaaaataaaactttttcttgatttaaaaaatcacaacttcggcgatgtacagattaattctgtataattgaagcagtgcgtgaccagcaagtccggttagaaatcctggtcccacccagtatcggcggcttttttggtcccagcatttttggtcccattttagattgcctgtctcactttttgttttgattctcacgttttagagaataagcgagcgaaaatctcacaaattttaagaatggtcatttttgactgaaaatagtaaacaaaccgagaataattttcaaaattttcacggcggcgcctatcggcagcgccgaacgcttccttccataaggttttcgaaaaagcaaaccgaaaaagtggtttaaaaataaaaaattatatat

SEQ ID NO: 25001 - DNA, 1313 bp, Heterodera glycines
taacttttttagtgaaaattcgatcactcatatttttcgttaattgagcagaagcgtaccaaactttgcagggatactccccggtaaaggactaacttacactgaaatgagcgccgagctagctggctcaaaaaaatttttcgaaaatctgagtctttcgtttttatttatttgcaaaattaattcataaatattttttcagaaagggttctgaaacgcaccaaattttatttacatgttagtttaggcactctgatgctttttctatcaataatggaggtgaataaaattttaattgctttttaactttgggaaaaagtttaggcttaactttttagtgaaagtttgatcactcatatttttttagtctaatctactcaaaacggttcagaattcaataaaaataacattcacggtgcgaaaaatggggtttgacaagtttattggggaaaaaaagactttacaaaataatacccctgggagaagggagtgggaaacatgatttcaaaattttcaattttttctagtctaatctactcaaaccggttcagaattcaataaaaataacattcacggtgcgaaaaatggggtttgaaaagtttattttgaaaaaaagactttacaaaataatacccctgggagaagggagtgggaaacatgatttcaaaattttcaattttttctagtctaatctactcaaaacggttcagaattcaataaaaataacattcacggtgcgaaaaatggggtttgaaaagtttattggggaaaaaaagactttacaaaataatacccctgggagaagggagtgggaaacatgatttcaaaattttcaattttttatagtctaatctactcaaaacggttcagaattcaataaaaataacattcacggtgcgaaaaatggggtttgacaagtttattggggaaaaaagactttacaaaataatacccctgggagaagggagtgggaaacatgatttcaaaattttcaattttttctagtctaatctactcaaaccggttcagaattcaataaaaataacattcacggtgcgaaaaatggggtttgaaaagtttattggggaaaaaaagactttacaaaataatacccctgggagaagggagtgggaaacatgatttcaaaattttcaattttttctagtctaatctactcaaaacggttcagaattcaataaaaataacattcacggtgcgaaaaaaggggtttgaaaagtttattttgaaaaaaagactttacaaaataatacccctgggagaagggagtgggaaacatgatttcaaaattttca

SEQ ID NO: 25002 - DNA, 1618 bp, Heterodera glycines
tggagctgtacctgaaggcctacgagcggaagaaaccaagcctggcccaggaaatgacggttgttcaaattgtgcaggagcaccaaaatcgccccctgtgtttcgccaccttgtccttttgtgagcaactgccggcactgtttggggagacgacgcatttgatcatcgatgaggctggacaggcgccatacgtccaaagcctcaacttggtaagccaactccccttggaaataataaattgctcactgttatcgtgcatagcgcagtcgttcacgctccttcgcttacttaaatacatgaaagttcgagtccgctcgaacgcacggcattttttattttattttccaaatcttttcatttttatttttcccaataatacctataataatatttaaaaattattgaaattcataaattaaaaagaaaacatatttttagtggatttagaggatgctgaaattgaccactaccctcgagcgatgtattaataatgacgaataaatataaatttctgaagacctcgttttgacgaaaattcctattacttgcgaaaggaagaaatgaaaatgaatctgaatcggattttaacgaagaccctgatgaatgccaaaataaagacataaatatggatgctaattatatgcacgtgcatgttttcttcctgaactatgggaggcctgaaacgtacgaaaaacatgtttttagctttgtttgaagcttctaggtcgtactcccatatgcatattttgcatatttgtgcatatttcgcgatttatgtgcatattttgacattttgtgcatattttatgtgcctatttgggcatgtgcccctctcttaaagcggcccttttgacctctaaggactgaaaatttcaaaaaatttcgttttttcgtaaatattaataaaaaatgtaactttttttttgtaatcgttcgcttagatttcattactgtagaaaaaataaaacaaatggaagttgtttttaatttattttatcaattcaattaggaaaaaactttcaattcaatttttcatgattttattctgtattaaaaacaattaattaaattccgttcttaagaaaatttcatgaaaacaaaattcaaaaacagattcaggataatcaaatattttcggttttcgtctcttagtctataacgaagggtttttatagcttctttcgataatgagtcacagactcgggactgaactggccaaaagaaaatttttttgacataaaacacattttttaccgtttaacaactttttttcattaaatttactctattttttaaagatttcctcctcaaaaatgacaatttagcggggtttaggctgaaatttaaggaattttacgaaaaagagagcagcaccaccggaaatttttttttgaattttcttgagtcgtctaattctatccaaaaaaaatactaatcaatatatttcaacaaagaaaatcagctttgacccattaaaagcagcaaagtgtttttattttatgactactctaattttcttgagtttttagtgttgttcattacttgaaaattttaatttggttttagttttttttataaaaaatttaagagagcttacttatcgttcaatttttagtct

SEQ ID NO: 25003 - DNA, 1172 bp, Heterodera glycines
attttagcgctcataatgggatgtataaaggcgattgtagaaggaatggaagcgctaaaatgttttgagaagctttttgagcgtaattacgatttttacttacaccattttttgctaggcttagatcacatgcgattttcggcactctgataattttagcgttcataatgggatgtataaaggcgattgtagaaggaattggaagcgctaaaattgtttgagaagctttttgagcgtaattacgatttttacttagaccatttttttctaggcttagatcacatgcgattttcggcactctgataattttagcgctcataatgggatgtataaaggcgattgtagaaggaattggaagcgctaaaattgtttgagaagctttttgagcgtaattacgatttttacttgaccatttttttctaggcttagatcacatgcgattttcggcactctgataattttagcgctcataatgggatgtataaaggcgattgtagaaggaattggaagcgctaaaattgtttgagaagctttttgagcgtaattacgatttttacttgaccatttttttctaggcttagatcacatgcgattttcggcactctgataattttagcgttcataatgggatgtataaaggcgattgtagaaggaattggatgcgctaaaattgtttgagaagctttttgagcgtaattacgaatgtcacttatcttattttctctaggcatagctcacacaggatcttcgtcagttcgataactattgtagcgctcatgatactgggatatgtacattagatagtagaccaatattaaatacataaaattgggtggggggggtctacccccctgacttcgttcgtatgaggggccgaaagagggttggttgggacaaaaaggtggggaaaggtcggagacgaagggaaaagaggaaaatttttgaaaaattggctattttcttaacaaaattcattaaaaattcttaaaatttttccccgtcggcgagtatcggcaccgccggccccccaaaaatcctactttttccttaaaaaattgaccaaaaatctcaaaattttgtaattttttagacaaaatctgcttataaatagcattaaaattacaaaaaaaaatttccggcggcgcctatcggcgccgccggacccccccccc

SEQ ID NO: 25004 - DNA, 2197 bp, Heterodera glycines
aaacgcaaaaaagtcataaaatcccaaagagttgaaaaaagtcaaaaaaagtcacaaaaaatgtatattagaggcttcaaacaaagtgtagaacacttttgaagtcattttaaggtcatttagagtcagcaaaaaaaaattcattagacttaaattcccatccctagtgaaaacgaaaaggtaatagttaggtggttccccctcttttggcagaaattttttgtttaaaaagtcgtgaaaacatgtttggtttttggggttgcttgctgatcacgaatatggcatccattttggcctatttcgaatccctggcccgaactaaacaaaagtcgaaaattcgaatttttcagaaattacttatattatgtacgaatcttttgagactttttgttcgagttcgggtctggggttcgagataggacacgtgatcagcacataaatcgtcctagaaaaaattatgaaaaaaatttcaaaggggtgacaaaacctacaaataccaaaaattcgtcgctcggctttttaagaaaattcttatggggtcaaaatctttttgagtattttgtctattttaaaacaaatagctggctctgccaaaaacccacaaaagcaaaaaaaaaagtctttttgaacgctgaaagcctgttaacttttctcattaagggattatggaaaaatttgtaatttttaaagcaaattacgcaatttttatacaaccatgaagtcgaaaagatttacttcaggcttccgaattccgtcacttttgcgcttggaatttcgaattccgagattttctgggggcacgaaattcgtccctaggtaataccgaagcgcccgatagggaaaaaatgtcgaggtcgggatcgtcaggtgggacaggtcgggtactgtgtttggaagcaggccagaaaaggtcgagaatcgtggatcaactcaattaaacgcgaattctattcaccctaccgtaccatcagttgtccaaaactctttcgttctgtcttccgtggttggataagcaccgttttgtgccatcgtagaagcagatgacttatccgaacagcttgggcaatgcggagaagaaacagttgtcgcggatggatcagcttcagcaatggcaaactgctgatcattttgtcgttgtgccaaatttgaattgctttcgtcagttgcgcacgtagcaaatgatgacaaaacaaaaataaagcaaaatgtacacatttttctattcggtttctcaattgtcacgcaattaatgagaatattttccaattcatcaattattatgtcttttgccaaaataggacggtgaaaaaatgtttaagaggccaaatcgatctgtgaaattgttttttccaaaaaacgaattctaagattgggaagttaaagcataacaattgaaaatgccgggaacttacagcagatcaatatagtatccatattttttaatttgcttaatatttgtaatttggacaagatttaaaacagcttaataaaacattctatggagtcagattttagcctttcttaaattaaagaggtgtcatcgtaaaatgtacagtatcattatgtgaatcattttctttctttctttcttttttgttttgttgtcaaaaaacagaagaagccaagtttcatcagctcttaacatgtactttaagctccgctgatttgtctcattttcatgcttacaaattaatgtgacatattccattttcgtcagtcatctttggtcggaaagttaaataccacacttttaaaccagaagagtgtccatcggaaaaattccgaattgaaagccgaagaaacaaaggacgtccttggaacaaaggacggatggcaatcttgactttgtacttagtccatatgtcaatgtttttctgtaaaatttcaagtcgttttcaagaaattaacggagttacaaaatcatcaacatttttccctaataaaaaagcctttctactaattatgcggactctgtcagttgggcctccacgtttgggccccagaatgtttttcctctatatctttttttttgtttgtcaacaaaatccaacattgttgtaacattcgatagctttttaagagctctattagccctacaaaacgcggaaagattttcttgcctgtaaaaaatttattaagaaaaaatttcaaaatttccgatttttttttttttgcaattttcatgtataactctttt

SEQ ID NO: 25005 - DNA, 1050 bp, Heterodera glycines
ccccgaattttccaggatgattctgcactgttgtcttcttagctttttgctcaattgtgtccggtgacaaattgcctttgttgcgcgactcgccgcccgagtcgcatgttgagccggtggcgcaactgttgcgatctccacgtgaccccatggacaacatcaccaacccagcggacaacaactttgaggacaacaccaatggctttgctttggcgccttacaccgaacagcgacgtaattttgccaaaaaactgatattccttacatacatgaaatagtaggggttgacttcatacgaacgaagtccaggggggggggtcggagatcaaaatttacgaagtcctcttcaggcccgtaaaaatttcgcgcgaagagctttttttttttttgctcttcttgccaaaatgtttttggtttttcaaatccgttttttttgcggagcgctttttccaaaaaacttttggagaaccggggggggggcggcgtcctttcatatatccattcaataaattagttagttagatcgatcgatagggcattctaatttctaagtgatcatctgctgatcactcctccgcccatggatcggctatctctcagggcgagcactcactcaccctagtcaccacgacttcggtccccgcccgattcgtcgctcggcacgtgtaaaatacgtcatccgatgccttcactttcgaaattcgcacatttccatcttcaaaaatggaatttcgtggatcgttcttccaattttaagtgatttaccaccaaaagtgccatattttgatgagtatgtgtccaatgatttgttctgccacaaacattcgatgttcggctttgggtctccgccgaccaaacagaaaatgtctgccatttgattttcaatgaatgtgtattgtttttcttgaccttccattgctaagggtggaactgccaattaaggccaagtaaacaatttgtcagaatctcccccctgtcccctttcagtcgaaactgaacccgactcgaccacacattaacatgtgttctgccagaagattgccccctttt

SEQ ID NO: 25006 - DNA, 2018 bp, Heterodera glycines
acaaataattagaataaaccaatcccttaattgggaccaatctccagttatttgtttgcccatttcatctctaacttctttccagtcagagggagaggactcccttcactttggagtcatcaaattcaatcaggtaagtaagtttactaacctggaaaatatttgctgcgaaagaatgagaaataatgtcagacaaattggtaagtgctaagtgatgaaatgcatgagttttgattttaggaatttcaaacaatgaattggattctagtggaagattgttaactttgagaggggtgacggacccagtaatttggtccacttggactagggagccgttgataagaatgggaatgttgcggaactcagagcagggagcagttcgggcctctggagtgacaatcattgaaatggggtttaaaaatgctgattttgggccagaattagtggaaaattggattgggaggagatcaaaacaagtttgaagctcagttgccttaaattggtagctagagctgtttattggtacgcagggccatattttaattgagtcaattgttaattgtttggcaaaaatgtagggatttgagaaaatactttgtgctagagcagttggatttgagaggagggcagaagaggtccaatgtttattttcatcaataaagttacatagctgggtgagggaatgggaaaattgaaaaatgagagaagtcttaacttcatggtcaagaaaagtgagttgagaagctaattgagatgtggtgacaagactgtcagcacttctctttgaacgaggttgatccgtgggaagaaattgaacggcaaaattttgatatgagagagagagagtttgattacagtcctcgatcaaagttttggtttggggaaaggaaagagcaagatcattttcttctgcaacccaaatgtttgacagaaaagttcctaaaaattttccgaggttaatgaattgacagagtttcttaggagagggaagccacataaggatggatttgtcgtcgaggcggcaattctctgctgtatatttacaatttgggtgtcctagagatgttcggatatgatcttcggaatgatgcacaaaaatctcagtttgaaaagcgaaacaatttgtggaattgtgtgctttccaggaccagccaaggaagggataccgtttttcatagctgattggattattggagaaaaggagctccccactttggattagaatcccttcggaacatgacttttcctgaaccatttgcttacattcatctaataatactgggagattttcggacgggagttgcttaatgattacatcattccatggattggtgtactcaatcagggatttctttaccttcctgcacacccatgccttggatttttgttcgaatgggttcggtcggaaaaggcgaataggttgtttgataggggtgtcagaaggagtatgctttaattttggacatggtagccaaatgggtagagaccaaattgtgccctcaacgtgtgtctgacaaaccatagggaggatttttaaggatgattgactgtgagaggatgagaccaaagaagcacttagagaaagagtaatgatacaaaggataaaattgaaacgagttagaaagggagctattgaaaaatttgagctgcgcgggtgtgattcccaatttgtgacaataggagtggggggaacaggctttggttcggattttaaagcatccgtgagatttggttgcttatcagcagagccagagcacacgagctgttctttgatttgagatggtgaggcagtaacgggttgttggatttggtcagataatgtaagagtgttaaatgaagggtggggaccattatcagacattgaaagattttggattgagtctggggggaagggaatcatagggtgttaagggaataaatttgtcgtcctcggccataagttggttgggaatttgggaacgattccaattccgattgtatggagggaagggttgcctggtttttccttgcaccccttt

SEQ ID NO: 25007 - DNA, 1105 bp, Heterodera glycines
  unsure (1)..(1105): unsure at all n locations
tcctcacattcctctatgaattgctgctgatcttcctttgttgtgccaatttcgtccgggaagccgctggcatgcgttttcatggccatgaattcggcaacgtagcctcgaaaaacgcggtcgctccactgcgtatcgtcccactcgacggagcgataataggccgtacaccggtacccgttgcgaagcgcctcctccaactcgattgacgtcacagtggacacccacccccgctcatcatcctcgcgatgcgtgcactcgtagtcttcattgacggatccatgcggatgttgcagagcgcacgtacggcacagcgggaaaagaagccgctgatcaaatttcacgggcagaacaggcacatcaacgtgatggggcggcacaacgaacactttgagaatgcctcggatcggcacctggtcggcgcgtcgccagtcaaccgcctgctctgcctcaccaatgatgttcactcgtgttgggtggcccacaggatatgctgtcacagcattcgtgtgggggtagagcgaacgaacgtcgtaatatttcatccgccacccctccggcacctcgtagtgtagtcgttgtggacccacacgtcctccatggtagcagtccttcaaacgaattgggccgctgtccttgtactgagcaaaggcgcgcttcatttcgtcgttgttgcgcttctccgcgttgatttcgcactcccaaaatacgagcacttgttgcacctgagatgtgatgaagaccatccgtctcgcatcgtcctcccgtatccgctgcgccgttttcccgttcgccatcactgtttggggctgaaagcggtgacgcgggtggtcgtgcgcgtgccagtggcagccgttgacctcaatcacggtgtcggtcgacgcaatgtatccgtccacagtgtattgtccaatttttttctctccgtcgggcgagtgtgccgtctggatgctcaccccgttctttttggcgtaccaatccaagaatttgagcgctataaggctttgcgtgtttgtagtgtcgtagccgcactcgggcacaatggcgagctgatcccgcatgaggtgattgagtcgaaangtgtctccattgaggccactggcga

SEQ ID NO: 25008 - DNA, 1661 bp, Heterodera glycines
tttttaatgcagccttccgccaattccataccaaaaccttttagaatacctgcaactgccaacacttgagaataggcgaaagctgtttgatctgttcatggcgcataaaattgcttatggccgaacagatctgaaactattttctatttttaatccatcagcacgctttaacatccccttttacagatttaacacaaaatacaaactgggcaaaaaattcattccctttgctgggagggcaacaaaattatagaatcaactcgataaagaactaataaaaacaaattctttaaatcaatttaaaataaaacttaaaagttcactagggtaatctgtaagaccgggaaagttagaatgtaacaaatttctaagtgatttggtatttcgacctcatttgactttgacctcaatttatttattatttattttcacatattttgtctttttttaattcatgtgatcatccatatattttgtcacttactctacgacatttatctgatagtcgtcagagtaagtggttctcgcccttctgatgacttttttattttttatgaataaacaaataaaaatgtattctattattatattttcataaatttcagtacattcgggatcactaaatcagatttttaacattttttgcggcacatttccaaaaaacttggtgaatgtgcgaggggagaggtccggtggtgccgattggcgccgcaagcggaaaatttttaagactatatgaattttgttagaaattagccaaatttcttagaaatttcccttttttagatgaaaataaggtactaccccaaaaccaaaacatttcttagaataacaacatagaaaaaccctgtattatttggaaaaaaaaataaaatcacaagaaaacgtcaaccgatgtcgaactaataacaaaaagtttgttaatgttgaagcactaaccactaaaccacaaatattttaaaaaacataagcaaatttaatttatttcataaaaatttgtaaaagatggttaaaaaaattcaaaattgtataaatttttgcctttaatttcacgaatatgccattgaatcagcaaatgaaaaattacaacagtaatcatttgacgaaatatttggagaaaaatgggaagaaaaagaagaaaaacaaaatgaagagaaaatcaagcaaaaaggaagaaaatattcatgaaaagaatggcaacaaaattatgccgaaatttgcaaaaaaattggggacaaatcgaacgaaaatttataaatggattaaagaatttggtctttaaaaacaaataaagaaaagctacaaatcaaaaacttatgaagaaaaacgtcaaattattcaaaaattcattgaaatgacaaatgaattcatgcatattttgccatttttcgtcaaatattttccgattttttgcatattttgccatttttcgtcaaatattttccgattttttgcatattttgccatttttcgtcaaatattttccgattttttgcatattttgccatttttcgtcaaatattttccgattttttgcatattttgccatttttcgtcaaatattttccgattcgaatatctcttaggaaaaaaaatttgattatgcctaaaattaaatccaaatttgaatgggtgagcgagtgggtcaacagtgagcttca

SEQ ID NO: 25009 - DNA, 1096 bp, Heterodera glycines
aaaaagggggttttaaaaatttttggggaaaaaaaagcttttcaaaattattcccctgggggaaggggagggggaaccagatttcaaaatttttaatttttttattttatttatcaaaacgggtcagaattcaataaaaatacattcccggtgggaaaaatggggtttgccaaattttatgggggaaaaaagactttacaaaattattcccccgggagaaagggagggggaaacatgatttcaaaatttcaattttttttattctaatttactcaaaacggttcagaattcaataaaaataacattcacggggcgaaaaatggggtttgaaaagtttattgggaaaaaaagactttacaaaataatacccctgagagaagggagtgggaaacatgatttcaaaattttcaattttttctagtctaatctactcaaaacggttcagaattcaataaaaataacattcgcggtgcgaaaaatggggtatgaaaagtttattggggaaaaaaagactttacaaaataatacccctgggagaagggagtgggaaacatgatttcaaaattttcaattttttctagtctaatctactcaaaccggttcagaattcaataaaaataacattcacggtgcgaaaaatggggtttgacaagtttattggggaaaaaaagactttacaaaataatacccctgggagaagggagtgggaaacatgatttcaaaattttcaattttttctagtctaatctactcaaaacggttcagaattcaataaaaataacattcacggtgcgaaaaatggggtttgaaaagtttattggggaaaaaagactttacaaaataatacccctgggagaagggagtgggaaacatgatttcaaaattttcaattttttctagtctaatctactcaaaacggttcagaattcaataaaaataacattcacggtgcgaaaaatggggtttgaaaagtttattggggaaaaaaagactttacaaaataatacccctgggagaagggagtgggaaacatgatttcaaaattttcaattttttctagtctaatctactcaaaacggttcagaattcaataaaa

SEQ ID NO: 25010 - DNA, 1909 bp, Heterodera glycines
atttttccagactcatgcaaaggccatgaggacatgcgccaaaacgggggctatttgaatccgaatgattgcacaaaatgccattgtccggacggatacggtggccaatactgtgacgcactggaagagagtgagtaaaaaaataaatcaaaattaaaaaaatcaacatttgaatgttacgaaaaatgactttgatcaaagcatattcgatcaaatgggaaataaagtgtccagataaatgttctcccaatttattagatcagaactgcaaaattttggctgatgagtcgagggaattgaaatctgatcagaccgctaaagtgttgaaaccggtgatcggatgcacttctgccggcaaagaatgccgttgccattggcgaattacggcaatttttattttgttataaaaagataattatagtgttaataattaacaatataaaatgagtgaaaaagattttagcccatgtctggcaaaaaagtgcaaattcaattcaaaagcttgaacaattcgctcatctgctcacacccatgcacaccaccgtacgtcgagatcaaataccgtaccgacaaaagggcacaaggcaaaaaaattaatgaactaattaattattacttagcaaaatgatggctcattaaggtgccaaactttgctgtccccgtgcacttactgatctgaacggtaatgaatacaaaaattggattgaggcggaaaagccggacatggacattgtcatttccgcgcacctttcaccaaattggaccgtaccatctaccgtattcgaactgacatttgaatcaggcaaggaaaaattgtaaaataaattttatttgttttttaaattaaaaaaaattttaaatttgtattttaaaatgctttacatatctaatggaaaattgttctaaaaatctgttaaggcaacgtcaaactcataaattcgagcaaatgcgtgaaaatcgaaaatttgtatgccgagaaaaggaaccccggcaccggcactttgcgttgttataacccgacaaagaatcaatattataactgctcctgtaacggtgataagaaatgcctcgctgaagaaaaatgggcacacgaccgctttctttgtccaataatacaggtaattaattaattaattaatttgttattaatgccaaaagacactgccacagaaacatttcatataatattggcaatttaattttttggctgtaaaaattaccatttttgtatcaaaaagcggaaataaggacaaatgagaacataaatgaaaaaaatgccatctatttaataatttgtaaattcaaggtcaatggaattcaaatccaaatagattatcggtacaattggactcgtcttgatgttgattgttatgtgagttgggttttcctaatttctcaaaccctttttaattgactaattttacagaaggccgaaggaggtaccgtaagcttttggggctacagtaagcccgagaccaaagaaatcattcgtgtggacgaaatccactgtttgacttttgaagctgctggagtaacaccaccgtcacagaaacggttcaagagtttgcaagtcgaggaacatctgtcgatgaaattgaatccaagtacattattgggcaatgcttcatcacttatccatgtgttcgtgccatttgttggccatccatgagagaaaagggggagatcagtgatcagtggatgtgatctgtctgctgctgctgctgatcatttggccaatttccaatcagcaaatttattttttttaattttaagggtgtcactgttttatgtaagtccctatcatatttgtatttttaacgcctcatacaccagcatggactatataattttttggctaaaaatacaaaaatatctctcccctaaatagacaaaagtgatgcaagaagga

SEQ ID NO: 25011 - DNA, 1771 bp, Heterodera glycines
  unsure (1)..(1771): unsure at all n locations
gcatgcnnctgcaggtnncccgtacgacgagnnacattcgcattggcacacnnttttctccacttttgatcaaaaataaatgatgctatctgctgtactgctttccaattttttttctgctgtactattttaaattttttatttactttattgaatgatcgacgctcgagtaaaattaaacagtatcaggtccgtatagaaggggtgaggcacgtacttccctcccatggttttcccacgacagtgaaaatttaaaccatattattacactggacaaattttttttgtttggtttggttactccactagaggtccgacaaaaatcattcggggcctcttttttgcctgcactttttgtcaagaaattggttgaaaatcctgaattttccagtataaaaatgttatcatcggtggcccatccctgtctaatcatctcctatggtttttcatcgggccaccactgaagcacctaaacaatgcaagtgcctttggatttctcctaaaaattttttaaccggtaactcatggttaaaccactcatctccaaatttataaaaaaggctgccctttctaaaaaaacgtaattcttgcgtaccttaaactgcatgaattcgtcgacttccattgttgagttttcgcttttctttcatcgttggttgtttgcatgtagtcaacgcacaattggctaacggacgccagcggatggtctcattttttgtaacagagggtccggcagtgccgttaggcgccgccggtagaaaaattgtgaactttgtcatatttttagcagattttcatcaaaaaattgtgaattttcggaaaattttaaaaaggcccagcacgactgaactgaccggtttgataaaatgacagttgaatttttaaaaatttaaactcattaacctgtcatacggtaggatttgaaaagagaatgtcactactcttcccattattgaatcaccaaaagaccgaaacacaacacaattgtcttcgcctcacattttgtctctttttagtccagatttttcacttctaaaatgggattcgtcaattatcaagtcaaaacgggtggatgaactgaatcatttttttcggttcctaaaaggcgtcaatttttagctgcgaatatttttttgagggttttcgttcataattctaatttttggattaaaacgccgagattccgcctaaagattttcaacttttcatatctgaaatagatgtcctgcaaataaaagaaaattcatggattcattttcagaattggtgtcgtctctgcttctaattaatacatcaattaacattttgtaccgatttttgactaaacaaaactaaaaacaacgtttaattcactaacaatcagtgcccaccgccgccatgccctatgaaaatgttagttttatcatttttctgaagcatgtattgtgttcgcagaaacctaaagataacaaacaatccggtaatagtagggatggttgcccccatttttcggagaatttttttttgttttcaaaagtcatgaaaacatgtttccaatggttttcggggtcgctgatcacgaatccggcatccatttcggccaattccgaaccccgaacacaaattcaaacatttggccgaaattttaaaattaaatttttttgtttttttttctcttttctcttttatcatattgttatatgttttatctctttataattattgttacttaattaggctgcgctagaagaactccgtggttttactttaaaaaaactgaatgagaagttga

SEQ ID NO: 25012 - DNA, 1764 bp, Heterodera glycines
agaagaacaaatgacaatttcataccaattttctgttctattattaaaaattaaatatatttatttggagcaataaaatataattgaaaaaatttaacaatatgaaaaatatagtaataaaaaggcattctagaagcatcaaaccaatataataataatatttacctattttgaggccgaataagtatgccaaaaaaaaacataatcaattaaatccgggcccagtaataatacatcatattaaagatgcagaatatggctttggactcaatctaatttgtagcgcacctttttgggggagtttggaaaaattgtattagtaataaaaaaggacttataatgcctatttttgcctatttcggggttttgtgtataatgtgtctcttttgagaattttcgaaaaaatcctgaagaaaaatgcaaaaaacacgaaaaatacactcctaaaaaggcctgaaaaattttagaaaataaatacccctaaaagttaaaaattttctcaaaaattgattctaaaatataataatttcttcataaaaattttagatttaaaaatttgtccttcttttgaaaaaaacttatttaataattttatttacacttgaatgctatttttgagcccctttcttcatagcatatgcgcagaaaaaatatgcaaaatcatacaacttataaccctaataatatcaaacgaagacggaggagacaatgcttaaaaaaaataattttaaatttgggtgaaaatcactatattaatatgtgaatttcagtatttattaccagttgtttgagatgtttacgtcgaattaattttttgtccatttaaaatttgaaaataaagtgaataatatgaaaaagacaggattaaaatcattttaacctttaaattagaaaattattaagctgataaacttaaaaaatatatcaaacaaagattttattttccaaatgtatggagattattacccaaaggagaattggctggagatgggatttggaaaaaccgagaccagcagcaggagttgggactaaacagaaagagaaagggagggaggggtccgtggtgtagacactcgcccaaggggagaattttgactaagacatgcaaagagatttgtacaacttaacgccacatgggcgtttaataaatccgtaaaaaatctaaaattgatgaaaaaactaaacagttattttaaatttattagctactcaaaagaactcaatcaatgtgccctagtcaaatttaaaaaaagtacagtaagaaactgttaaaccgtaaattcacgaccggacctgcccggaaccgggaccggccgccaaattactctctcaaaagaaattacaacaattaattcaaaaaatgattaatataaagaaaaaaatgttggttaattttaaataaataacgaaatgaacatgaaagaatcattaaccattcgtgaatgaaaatgggcatacaaggcaaaaaaaaaagtgaaaaggcacggcaaaatcaaaaaacggaaactgtgcagaaagggattaaaaataaagaactttaattggacaacgacactttattcgataatcattacacattttttaagcaaattgtagaaacaaaaaatttaaatttctttccattttgttggttcatctttcaaatttttatttcttttttatttttatttttcgcgcagcaaaacttctaatgattttttttatttaaatttattaaaaaaaaaggaatttaatcgctggaaaatttccattttaaagaaacta

SEQ ID NO: 25013 - DNA, 1288 bp, Heterodera glycines
agagaaaagaaaagcgaactcactgatgaagggcattgagaggaaagaattggagacagaaaagaagcaaaaggacggaaattagaagggaattggtggggaaattgaaggggcaaatccgaagagatggcattctgagagggaaaaaggataaacgacgagagaaaccaaaccaaaggacgaccaacggatggactcgtcactgaaagccaatcggcggattgttttgagttattacaaaggattttacggggcggaaatcggtggaatgataggaaaaactccgcacggtacgaagagtaatcggcagggatggtggccaatgtaatggaaatgttatcagcaaacaattttgggttggtcggaaaatgggggagggaattgggggggggggggggggaaaattaccgggtgagaggggaccatttggggggggggcttatcaaagcgtcaacaaagcgctgacatcgcaaaaacaaaacagcccaggcaaagcattgataaaagagtaaaagcaaatggcggtgagagtcggtgccgcgggaaagaattgtcgacggattggcatttgccaaattgagaatgccaaaatcacttcacaaatttgcgaaagcttttttagtcagctcctaattttgaaatttttaaagaaaatcaaatcgaaaagcaaagcgaaattaattttattttcttagaaaaatcatgaaagtttaaaagaagtataaagtgatactcttaaaattttgttgaggtacttatgtatttgtttgaatcctaacgatcaaatatttatgagtagggcttccttttttaggaacaaaaaatcgcgaaaaagccacctaaaaaggcataaaaaaatcgcaaaataggcacaaaaatcctcaaataggcactaaaataggcaaataaaattttttattaacgctttttaggtaacaaaacacgttaaaactttaaatatttcaattgtaaatgaaattattaaatgttttaaagttttttttcgaatatgaacaaatttttaaaccaaaaaatttttgttaagaaaaatatattaaattttgggataatttttttgaaaaattttacaattcttaggggtgtatttttggttaatattgcatttttgttaaggattttttcaaaaaccctaaaataggcactttaggcataaaaaccccgaaataggcaaaaataggcattataaaagtcatcgtagacaccccaaaccaagcggaaaatgcgtttttcatgcttatttacacgtattaagtgcgcaaaaatttta

SEQ ID NO: 25014 - DNA, 1443 bp, Heterodera glycines
  unsure (1)..(1443): unsure at all n locations
ccagtatcgccctgtgccttgccacctcttctgtgtattgggagcggtagaccatctgcgtttgctgggcttcttccgcgatgcgcagtcgttctgccacttgtgagttgacattgtcccatcggacagtgatctgcgagacacggtcctcaatttggtccacatccggatggctaaacatttagatgattgggttgaacaatgccaaagatttgctaccgtgacactatcgctactacagtatcacctttataaaactcattattgtacaattcgctaccgtacaacactaacttatatgtaattaaatcaccagaagcaggcaatgcatattgtgtgtgttaactcactactgtaaattggtactgtatcgcatcactctactatacagttcggttttacaccaccaatttgtacgatatcccttacgagcattcacaaagtttactgtacaaacacactttgcagcgccgaaacgcgtgcgcgcaacatgttggcgcagcgttgcagtgtcccggttcagcttcttgacgatgttttcctgctgttgcagtaccatattcagctccagcagctgggcgtgcacgccgcgcaggcgctccagcgcggccggcatgtcgtcaaaggaggccagcgtgatctcatggcgtcgcacaatgtccgtcacttcgtccaacccgttcaacaccgattcaagccccttcagccgctccacgtacatgcgcgacagctcccaaatgtcttgccagcgctgcaccatgttgtcgtgtgctgctcgctgggtgggcgttggatggggcagctggcggtacagttccttcacattggacacgtccacgtcaagcgtctgtagagaaaataagaaattaattggattttaaattttgatttatttaattttggaaaatgtaatcattttcaaaagaattattaagaatttctttgccgaaaaattaaattaaaatccatgaagaaatattaaaaatttgtaaaatttcaaaatattatataaataatttttgaaaaaaacgaaatgcgtttattattattaaatgtaaggagaaaatcaatttattcgtcgattctaattattgtaaaataaaattttataaatttaatataaaaatatgatatttgaattagagaccggaattttcaaatttgcgggtcctgttgcaggattggaattcaaaattttttacaggacaggatccggcaggattaatcctgcaaatcctgcaatactgcaaatcctgcatttaaaatctgcaggatcctgcgcaggattgcggattttaggaaatttcaaaaaattctgtattaataaaaaagtcttacaaagtataaaaaagtattcaaatatatttttaaaccanaaaatgatgaagatgaaaaattaataacgtttttttgcttacactccaanngcatcgctgaatcttc

SEQ ID NO: 25015 - DNA, 595 bp, Heterodera glycines
ggacctggccctggatttgctggacaaaaatccaggaaaatccaggtccaggaaaaatccaggctcctcgagacctctggatccaggcctggacctggattttttgaaatttattttaaaaatcaaaagaatgtttgaaaaaattaattatttgcttagaagcatctaaaaatatctaataaataataataatgtgtttttaaatttatttaatctgtttttgaaaacgtgaaaaaacatcggtcacttgaaataataaattctaaaattttgtccaggaaaatccaggtttttcgtgttttgcctggacctggacctggattttctggacaaaaatccaggaaatcccctggacctggatccaggaaaaatccaggcctggatccaggtccaggtcgaactctactaaaaacatttgtgaaataccttttacttggttaagaattaaaaaatttagcctattaaaatatttagaaatttttttattatattgtatattttttgaaaaattcccgatttcttgcaccgcaaaaaagtggttttgaagaaaaaaaaatagtcaaatttatgaacgttaataatttgatttccgatc

SEQ ID NO: 25016 - DNA, 1983 bp, Heterodera glycines
  unsure (1)..(1983): unsure at all n locations
ctgcttccccctttcctccagtcgctcttatcacaaaaatcaatctgctgcgcaactgcaattttttcagcgctcgttccttcaaaaaaatttttcagctccgcaacacacacacacacaaacagacgatcaatttgaacgaaggacaaattattttctcggcttttaattttaatttttaatatttaatcaaatgtccaattaatggtcaattttctctgtttttaactttcattttttaaatttaataactaaccattaaacattttaatttaagttcatttttaagaaagcatattgatttataaaaatctaaaaaacgtatttctaacattcgttttttagtgttcacacgaacacgaagatcagacaccagacgaccatgccggaaattctgaaaaaaattacgaaatttcttgggcttcgctttatgacataaaagcatgtcagaaatgtcgcaccgaacggaaatggtacataataaagtttaaaaaatctgggaaggttttgacgacatctcgaggcgcagattgttatctacttgacgaagacgtctggcaacatgtaattcttttttattcggcctggattttctaaatgacatgaaaaaatttatttttatatatcttgtatttttcgaaaaaaagatcaacaataaaaaatagaaaaagtacacatttaatatgatgttaaaaaattttttcggtactatatatctttgaaaaccattaaaaaagaaaattcgggctatagtatataatacagtaagatgcacatatttattcagtccgggtttacacttggacatttgctaagtgtagtttacacgagagcattcaaagacggacacgtggacatatgtcgagcacgaaaaatgtaaataaataattaaaaattatttgtttgttaaaatttatagaaaaatatttatggacaattcgaaaaagggctattatattgacgatgaggatgcttcggcatttcaaccgttttccggttcatcttcaaatttgataaacacccaacacctgccttcttcttctcttctgccaaattcttcatcttcaattcctcctcctttaaatttcattcccactcccttccttacacaattggcatcccttccgccaaattcttcatcttcaattccttcccattcaaatgccattcccacttcctcccttacacaattggcatcccttccgccaaattcttcatcttcaattccttcccattcaaatgccattcccacttcctcccttacacaattggcctccattccgccaaattcgtcaccttcaattcctccacagttaaatcccaatcccggtccctccattacacaattttcttccattccgccaaattcgtcaccttcaattcctccacagttaaatcccaatcccggtccctccattacacaattttcttccattccgccaaattcgtcaccttcaattcctccacatttaaatcctattcccagttcatctcctacacaactgtcttccgttctgccaaattcatccactcaagccgcattacttccgtccgattttatcgagcctacgagtatctttatcattgactatcaactttataaaaaatatcgctcctttgagcggaaaacccactattttctgacatatcggatgcttccgcttacttacaaatcgacgagcgcgatgatgggaatgaacaatctgcatctgcacaagttttacgttcaatcttagacgtatgtttgttctattacactatcaaaaacaattttttctgaagacgaaaaattccaacttaatttgattctcacattaaacatttgagaatcatgaagtttcatgaaaataaaaaaatatgggaattttatgcatattttagtttttatttaactntaattcattttcattgctaangtaattatttctgcaatatcttcataaaacaataatttagctccgtccacatcatccacggcgtcat

SEQ ID NO: 25017 - DNA, 1513 bp, Heterodera glycines
  unsure (1)..(1513): unsure at all n locations
atttaaaattatataaatgaagtatttttttatacgtcttccatttagagtttgtttgtatttaatttttaaattaagagattttaataatttgatgcgttttttgtagttaatttatgttttttcttattattatcatcaattttttgcaatttttttttgaattttggggcatttcgtctttggaatccagagtttcgattgacgtttcagcatacttaatgtggcagtaaggaggtattccaagagaggacgaaaaagcgagtgaaaagcaacacagcaaatgcttaaagtatgataaagcattgttaatagggcaggtaaagcaaagttcgtaaataacattcattaaatatttattaaaagtcgacctcttgcttccaagttcttaacagtagcttggtttcattttaaaaatatataacaggttttgagtaataattagtatattcgttggactttatttatttaaatttaacaaaagttacttaatgcagcttgtttgaagtagaatataaaattattgatttaaagacgaaaaattgttctttttattcttttcgatataattatttaaattaaaaaagaaatcgtattattttttcatgttcataattaaagtttattttcaattggtaagcatcaccgttgtgtaccaaggagttgatgaattgcaggccattttgcgaagacattgtcaaatgcgtcaagaaatttaatttttgctttcgaagatttttcaatttatttttagttcttcttttaaatttatttagtattaaatttattacctacatatattcaaataaatttagtaaaaattattttcttgattgagttttgtaaatgaatattgttaatcgtaattaatttacttttaaatagctaatttactttgttattttcatgattaatttttgcaaaaattttttggaattaattttgtttgtaacgtttttggttggatcggtttgtatattgtaaggaattgtaaattcttttttttcagtggtaatataaataatatgaaattacatttcatactaatagttaattttattataaataaattgtgtataaagtttaacaaatttaagcggaattagcaagtaaataaaagagtggaaaacatacaatttttaaagacaaaaataattgaatttttacaggaaaaatcctaataaaaaatgctataaatttatagcaaaattttttttaaatgattgatcatttcagaaataattcgcttcgttcgccaatttaaatggctaaatttgcgttaacgcagacaatttaaaaattcaataaaagaggtggtggtggctcggagaaatgcctaatgaaaatataataaaaaattgcgaaaaaggatgatccatcaaagggctggctatgaattatgacgggctanatggtgacctccttgaaatttatttatttatgcaaaaacgaaaaagtcaacgaaagggagtgagtgatccaatcactatgtggacatgtctttgattaatcg

SEQ ID NO: 25018 - DNA, 1024 bp, Heterodera glycines
acgggacggaaactgatgaaaagcaattgaaatggcacattttgacgaaatatttggcacttttttcggttttgaatggaagtgaaaatgaaaaaagcaacaacaaacagaaaatgggaggaaaagcattggaaaaaatatttaatgcattcaatttgaagagcaaaaatcatttcgaaattaagcatttcaaaacaaggacaattggatggaagaaaatgctcgaccaaattgaaattggtctgtcagcttaatctcgatttacaagaatccgtccttggatgccaaggatgcccttggaaatggcccttgtcacttcgaaaatcctttttccaagaatgcccttggaaatttgcatttgcttatgggtgtaaaaatcacatcaaaatttaaaaaaatggtcacaaatagcttgatttttctctcaattttttttgaatatttctattatttttataaattttttctaatttaaaatttcgaaagattaaattaaaaatcattcaatgttaccaatttgcgagaaatgtagttttaaatataaatttgaggtcaattaaaaataatttcaattagataataatttattttttatcaattaagataaagaaatgcatgaccaattttctgaagcaaatggaagcggaaaatttttggcgccaatttttccaaaaatttcgcaatcaattgaattttccatcccaaatttggatgagcaaatttatgacgacgtaatttttttgtttttgttcaatcattgcttaaactgggctctgagctgagatgttttaaatttttttttaaattctataaaaaatcataaaatggtcatttaaaaacataggtcaagaaagactcgtcacccaaaacaggccgggaaaaaatttttatttttttaaaccgatttttctttcttttttttacaatttttaagtactttattttaaatggtacaaatacatacttttatttaggagggaacataggtaaaattacagaacatctgttacagtatgacaccatt

SEQ ID NO: 25019 - DNA, 1048 bp, Heterodera glycines
tttttgtagtctaatctactcacaccggttcagaatacaatataaataacatactcggtgcgagaaatggggtataaaaagtgtattgtggaaaaaaagactctacacaataatacccctgtgagaggagagtgtgagacacgttttcgagatattctattttttgtattctaatatactcacaccgcttcagaatacaatataaatatcactctcggtgcgaaaaatgtggtataaaaagtttataggggaaaaaaagactctttacaaaataatacccctgggagaagggagtgggaaacatgatttcgaaattttcaattttttgtagtctaatctactcaaaccggttcagaattcaataaaaataacattcacggtgcgaaaaatggggtatgaaaagtttattgggggaaaaaagactttttacaaaataatacccctgggagaagggagtgggaaacatgatttcaaaattttcaattttttgtagtctaatcaactcaaaccggttcagaattcaataaaaataacattcacggtgcgaaaaatggggtatgaaaagtttattggggaaaaaaagactttttacaaaataatacccctgggagaagggagtgggaaacatgatttcgaaattttcaattttttgtactctaatctactcaaaccggttcagaattcaataaaaataacattcacggtgcgaaaaatggggtatgaaaagtttattggggaaaaaaagactttacaaaataatacccctgggagaagggagtgggaaacatgatttcgaaattttcaattttttgtagtctaatctactcaaaccggttcagaattcaataaaaataacattcacggtgcgaaaaatggggtatgaaaagtttattggggaaaaaaagactttttacaaaataatacccctgagagaagggagtgggaaacatgatttcgaaatttaaattttttgtagtctaatctactcaaaccggttcaaaattcaataaaaaaaacattcccggtgcgaaaaatggggtatgaaaag

SEQ ID NO: 25020 - DNA, 1397 bp, Heterodera glycines
ttcggcaatcgtaaagaatgggggtcccaaatataaaattattttttttatttgagctcaaaatgagtatttgggggttttcgagggcgctgatcacgaaactgaattcggatttgctcaattccgaaccccggacccgaattcgaacaaaaaagtttgatttttttccaaaggtacatttttctgggtaaaagcttcgaattcatttttaggagaatctttaaacgttttaaaaaaagaaaaaatatttaaaagatttaatcctaagtttttagtaattatagaggaagaggaagagaaaacaatagtgattccattagtagtggcgagcgaaaagggagcattttatattttttttataataattttttacaaattttaattcattataattttctctaatctgaaaaaagttattcaggttctccttagactgtctttttcgatgaacgtttttaacaactatttattttgatgcaaaataatgattcaactattaattgtataaaaaatatgcaatttacgccaaaattagatcgattttaacgcgtattttgaaaaaaaaaacaaattttttgttcgaattcaggtccggggttcggaattgagcaaaaccgagtctggattcgtaattagaaccctcgaaaacccccggaagctaattttaagcctaaaataaaaaaattaaattagggacccccattctttacgattgccccagttttctacaatataaaagctggtgatgatgaagaacgaggaaaacaatagaataaggagtgaggtcctcccgtaaacggggcatggcaaaataagtgacaattaagtgaacggagtcaaaaatattttccaatggtcacatttcctgaagggaagggaggagagatgtcacataacaaaaataagtaatctattcacaaaaattttgtttaattcctctgatcatttcttcggccaatttggtcaactgagggaacacttcgcgcatttgatcaatggtcaacgtgtcccgcctcgaatgaaggaatgcttgaacaatcgcagcacaattgcgagggctggaggaattgtcgaagaaacggaaaaaatcggccacgattttcttggctattggaatggttgttgttgacggtgaaggcggcgcatgagggggaacatcggacggactaaaagaaacagaaacatcctttaattgcttttaaactttttaattaaagaatgctttaatattttaaatataaacgttatgttgaaatacaacaaaagctgacgagaattgagccgaaccatgttgtgcgtttgactgttggtggaatacgttaggcatttgcggattgtgagacggttcaatgaccacagaacgaatgatgggttgtggcgattgatggaattgctga

SEQ ID NO: 25021 - DNA, 2254 bp, Heterodera glycines
  unsure (1)..(2254): unsure at all n locations
aaaaaaaaaaaaaaaataaaaaaaaaaaaaaaaaaaaaaaaaaagaaaaagagaaaaaaaaaaaaaaaaaaaaagggggagggggggtgtgttgttttttttttttttttctttcctcttttatattaataaaaaaaaaaagaaaaaaaaaaaaaaaaaaaaaataaaaatatttttgtgttttgtttattttttttaataaataaaaaagaaaaaaattatattttttttcttccctctaaaaaaaagaaaagaaaaaaaaaacaccccgcgcccagcagaaaagcggcccacaaaaaaaatattttttaaaaaaaactctcctccctataaaaaaaaaatccccccccccaaaaaaaaaaaaaaaaaaaaaattttttttttttgtggggtatttttcccccccatattttttttaaaaaaaaatttttcaaattttttgtggggttttttgggggggtttgtggggaaaaaaaattttaaaaaaaaaatttttggttttttcccctttcaaaagaattatattttgggaattttttgccccaaaaaaaaccccttttaaatttcctataaaaacttttttttttttggaaaaaattaaaaagggaattaaaaaaaatttttttttaaaaatttaaaaaataaaaaaaaaaaagttgaataaattattggaataatttaaaaagtttagttaaccaattatttaccatttttcagggaaagttatttcccgaaatttcagtttttaaatttacgaaattttcagaattttaattaatattttcaaaccaacaaggaaatttaatccaaaaaatgggtaaatttttatttccacgcccaaaatcgccaatttctttactttatttttaaatttcctgttttnggtgattgaaaaaaattgtttttttattataaattactagcggggtcagcgccttcggcgcatccccccgctaggcagttcgattgtgttatagaattatgaatgataaaatcgactggctcggccgcttcgcgccctcgcatcattttcttggcttttctccaatctctgggactcaacccaccagcaattcaatctctgggactcaattctccggcattccaaacattgggacttaacctaccaactttcaattacattccaatcgctgggactcgacccaccaactttcaatgacattccaatcgctgggactcaacccaccaactttcaatgacattccaatctctgggactcaaatctgcggcattctaaacattgggactcaacccaccaactttcaatgacattccaatcgctgggactcaacccaccagcatttcaatctctgggactcaaatctccggcattacaaacactgggactcaacccaccaactttcaatgacattccaatcgctgagactcaacccaccaactttcaatgacattccaatcgctgggacttaacccaccagcatttcaatctctgggactcaaatctccggcattccaaacacggactcaacccactaactttcaatgacattccaatctctaggattcaacccatcagcatttcaatcactgggactcaattctcctgcatttcaatcactgggactcaattctcctgcatttcaatcactggcactcaacccaccaacattccaatcactgggactcaaatctccggcattacaaacactgggactcaacccaccaactttcaatgacattccaatcactgaaactcaacccaccagcatttcaatctctgggactcaaatctccggcaatacaaacactgggactcaacccaccaactttcaatgacattccaatcgctgggactcaacccaccagcatttcaatctctaggactcaattctcctgcatttcaatcactgggactcaattctcctgcatttcaatcactggcactcaacccaccaacattccaatcactgggactcaaatctccggcattacaaacactgggactcaacccaccaactttcaatgacattccaatcgctgggactcaacccaccagcatttcaatctctgggactcaattctcctgcatttcaatcactgggactcaacccaccaactttcaatgacattccaatcgctgggactcaatccaccagcatttcaatctctgggactcaattctcctgcatttcaatcactgggactcaaccgcagcaaatttctttagcatttttaactttttgtgtgccttgagatgttgaacagttgggga

SEQ ID NO: 25022 - DNA, 362 bp, Heterodera glycines
tttcggttccacttccactttctcttccactttcggttccactttcggttcctcttgctctattttttccactttctctttctcttccactttctcttccactttctgttcttctaccactttctgttcctcttccactttcggttcctcttgctttcttttccacattctctttctcttccactttctgttctcttcctctttctcttccatttctcttccactttctgttctcttcctctttctcttccactttctcttccactttctgttcccccttagaagatcttcccctttctgttcctcttcctctttcgccccaaaggacaaaaattcttgatctttcttttccactttctctt

SEQ ID NO: 25023 - DNA, 1561 bp, Heterodera glycines
taaaggagaatttttcaaagaccaagtcacatcaaaattccaggatgaattttcgagcggttttttgtttttcggtgagtattttttgcgtaaattattgtaattcaatatatcttcttggaggaggaggtgccgaaggcgccaccagagaaattgacgattttaagaagattttcagaggtttttggtccaaaaaattttgaaaaatagaaaataaacgggaaataaaaaaagagtcataggcaaaatgtcaaaatattaaaaattttcataatctaaacattttacatgcaggaaaatgccaatatcttttattacctcatcattattttcggcatttgagctgctgctcggatgactcaaacattcattgataaaagccaaaagtgtcggctcaaaccttgaaaatttccaattaattgagcgaattcaataaaatgtaaaaatatcgagaaaaaactcacaaagtttgtctgaatccgacaaaaattcggttcgcttcgcccatgtaagccatcagctcatctttgctgtaatcaccgctcattgaaacagcgaatttttgcaatttttgctggcgtaagtttttcccggtctccaaagtttttggccataattcgtggccatggccgtcgctgatcaacacgaaaaccttggcatttcaatatgttaaataataataataataaaggcttttttgcatttattattattttttctggcacttatagcacagaatacaaagagtactctcatgcaattgcagcgaaagggaaaatcatttttaaaatctaaagtctgaaaaaagccttaccggaggtgcatttattcttttttttaatggattgtccatttttggagaaaaattaccggcactgccggacccaaatctccagtattctattataaaaatagaattaaaatgaaaattttgaaaatatcccaaacataaatcgctcaacattgtgttatcaaattctattttttcgaaaattctatggcacttttatttattatttgaattattatctttttgtaaacaattaaatatcacctctcactcgatgctacgtctaataaatgcttctcacctttaatgcgccgcttcgaccgaatttctcaaattccttttgccctctgtcaattgcgtcacaaatttgtgtaacgcttcaaatgaataaaaaataagtttttattaaaactttcaatgctttaccctccgctgaattgcacttggcccactcggctgagcatttcggtgccattcaatgtgtcgttaagcgaaaatgccacggaaggtttttctgcaaaactgatcagactgacacggagcgattggtcgccgatcgaattttgcaatttggacaaaaggctcttcaccaaagccacttcattgccaaaggtgtgaaaaatggaaccactggtgtccaacaaaagcacaaggtcaacctaaacacagaaaaataggaaaaccaattcacacatttaaatgcaattgtaacgaagcaaaaaattcaaaaacctttaaaagttgaataatggaaaaacaaacaattttaat

SEQ ID NO: 25024 - DNA, 1428 bp, Heterodera glycines
caaaaaaattagttaaataaagattgaaaatttatagacgaaagatttttttcttattcatagcgcttgctttttgccattcagaacaattctgttgatttatattgaattgacaaattaaatgtctcacaatcaaccaaagaaagcaaaatatgagcaagcccaagagaaggaggataaagcaccacttacggacgacgcagagaaaaaggaggctaaagcggataaagcatcacttacggacgacgcagaggaaaaaaaacagaaaatgacggaaaaggaaattactgtactgagtgagtttttatgagtgatggtctaatttttccctatagtttaatcagatgatcaaccaaaatttaggattttctgacaaattgaaccgtttttgtatgaaaagaaagaaatgatagaattttttggtccttttgtgatttaagagcattaattccaggactccatatgtatttttttaaaaaggtacgcacgaagctctacactgttattatgcgcaccaatcaactgttgcaacaccaacagaaatgtttatgtcgcaagatggcaccggttttgtaagtttttagcttttgtaccatttataaatcatgggaaatagaattttgcgcctttctttaatggaatttgtcattttaaaagaaggttccattaccatttgatgcgggatgaagaagaaaacatcttcgacattgaggtggcactagccgccatcattggagaagaaaaaatttttggacaccattttgatgggtcagaaagcgatatcgaacaagcgacgagagtaagcaattaattaaaaatcagtttttgtgctgcttagtttatgttgattttttcatgtcttttttattttaatttttggttgttgacctgggacgagaaacgaaactgaacattgaattttttaagaaaatttgaatgtacatgatttttttaaatttgatttgaaaattggtcgcttggattttatgcattcataaagttttcccttttgcttcagaatctgaaagcaatgatcgaagaagagggatcgaacaattttggatgtatgcgggacttcagcgtaaatttttctcattaaaacaacaccaaaaaacggaaaaaaaactattttggtgttttggcacataaaacatatcacacatatttagggtttggcacatattttggcagttttgagaaaaatctgtaagaaaatacaaaaaaaaaattcaatttgcattttaaaattcactgctgaaatttatcatatttcgggatttttagcacataaaaatgcggtctttactaatcgtactcacttttaaaggttctcacgcccagaccagaaaatcaaaataaatatgacgaattattccgtcaaaaaatggacgaatgtgaaggacgtgtgacgaaaatgtggaaggcaaa

SEQ ID NO: 25025 - DNA, 1865 bp, Heterodera glycines
caggtttgatgatagttttggtaagccaaaaaaaatcctcacctttattaatctataaaaaatttaaaaatgagaattcatgctagattttctggaaataagcttaatatggcatagttaagctgtaaaaaaatttggggcgatttgaatgagaatagaaagagccaggttcgatgaagttttggtaagccaaaaaaaatccaaacatttaaaaatctataaaaaatttaaaaatgagaattcatgcgagattttctggaaataagcttaatatggcatagttaagctgtaaaaaaatttggggcgatttgaatgagaatagaaagagccaggttcgatgaagttttggtaagccaaaaaaatatccaaatatttaaaaatctataaaaatttaaaaatgagaattcatgcgagattttctggaaataagcttaatagggcctagttaagctgtaaaaaaaatttagagcgatttgaatgagaatagaaagagccaggttcgatgaagttttggtaagccaaaaaaatatccaaatatttaaaaatctataaaaaactccccataaatctgggcgcatcggttcggggggactgccccgaaaacaaaaaaatcgattttttcaagtgtccgtttggggtactcaaacaattatggggagcaaaaatccaacgcagaattaaagtacaggctatagggaagctattcccgaaggatttggtctccccataaatctgggcgcatcggttcggggggactgccccgaaaacaaaaaaatcgattttttcaagtgtccgtttggggtactcaaacaattatggggagcaaaaatccaacgcagaattaaagtacaggctatagggaagctattcccgaaggattcggtctccccataaatctgggcgcatcggttcggggggactgccccgaaaacaaaaaaatcgaatttttcaaaagtccgtttggggtactcaaacttaaaaatgagaattcatgcgagattttctggaaataagcttaatagggcctagttaagctgtaaaaaaaatttggggcgatttgaaagagaatagaaagaaccaggttcgatgaagttttggtaagccaaaaaaaatccaaacatttaaaaatctataaaaaatttaaaaatgagaattcatgcgagattttctggaaataagcttaatagggcctagttaagctgtaaaaaaaatttggggcgatttgaaagagaatagaaagaaccaggttcgatgaagttttggtaagccaaaaaaaatccaaacatttaaaaatctataaaaaatttaaaaatgagaattcatgcgagattttctggaaataagcttaatagggcctagttaagctgtaaaaaaaatttggggcgatttgaaagagaatagaaagaaccaggttcgatgaagttttggtaagccaaaaaaaatgcaaacatttaaaaatctataaaaaatttaaaaatgagaattcatgcgagattttctggaaataagcttaatagggcctagttaagctgtaaaaaaaatttggggcgatttgaaagagaatagaaagaaccaggttcgatgaagttttggtaagccaaaaaaaatccaaacatttaaaaatctataaaaaatttaaaaatgagaattcatgcgagattttctggaaataagcttaatagggcctagttaagctgtaaaaaaaatttggggcgatttgaaagagaatagaaagaaccaggttcgatgaagttttggtaagccaaaaaaaatgcaaacatttaaaaatctataaaaaatttaaaaatgagaattcatgcgagataatgtggaaataagcttaatatcgcctagttaagctgtaa

SEQ ID NO: 25026 - DNA, 1628 bp, Heterodera glycines
agttaagctgtaaaaaaaatttggggcgatttgaatgagaatagaaagagccaggttcgatgaagttttggtaagccaaaaaaaaaatccagacatttaaaaatctataaaaaattaaaaatgagaattcattcgagattttctggaaataagcttaatagggcctagttaagctgtaaaaaaaatttggggcgatttgaatgagaatagaaagagccaggtttgatgaagttttggtaagccaaaaaaaatccaaacatttaaaaatctataaaaaatttaaaaatgagaattcatgcgagattttctggaaataagcttaatatggcatagttaagctgtaaaaaaatttggggcgatttgaatgagaatagaaagagccaggttcgatgaagttttggtaagccaaaaaaaaatccaaacatttaaaaatctataaaaaatttaaaaatgagaattcatgcgagattttctggaaataagcttaatagggcctagttaagctgtaaaaaaaatttggggcgatttgaatgagaatagaaagagccaggtttgatgaagttttggtaagccaaaaaaaatccaaacatttaaaaatctataaaaaatttaaaaatgagaattcatgcgagattttctggaaataagcttaatatggcatagttaagctgtaaaaaaaatttggggcgatttgaattagaatagaaagagccagattcgatgaagttttggtaagccaaaaaaaaatccaaacatttaaaaatgaaagagctagagccgaagaaaatttttttaatttaagcctaaactttttggcatgtttaaaaagcaaattacaaattttattcatctccctttttgatagtaaaagcatcagagagccttatttaacttgtacataaaatttgatgcgtttcagagcattttctgaaaaaatatttatgaattaattttgcaaaaaataataaacagttaaaaactcagaatttctaaaaaatttaaaaccaattacaattgtcattttttcaggttaagttagtcctgtaccggggagtatgcctataaaatttggtacgattttattgcttattgaaagagctagaaccgaagaaaatttttttaatttaagcctaaactttttggcatgtttaaaaagcaattaaaaattttattcatcttcctttttgatactaaagcatccgagtgctaaaattaacttgtaaataaaatttggtgcgctttagagcactttctaaaaaaatatttatgaaataaaaaaatcgattttttcaagtgtccgtttggggtactcaaacaattatggggagcaaaaatccaacgcagaattaaagtacaggctatagggaagctattcccgaaggattcggtctccccataaatctgggcgcatcggttcggggggactgccccgaaaacaaaaaaatcgattttttcaagtgtccgtttggggtactcaaacaattatggggagcaaaaatccaacgcagaattaaagtacaggctatagggaagctattcccgaaggattcggtctccccataaatctgggcgcatcggttcggggggactgccccgaaaacaaaaaaatcgattttttcaagtgtccg

SEQ ID NO: 25027 - DNA, 1207 bp, Heterodera glycines
  unsure (1)..(1207): unsure at all n locations
aggctgtgcaggaatttgctgtggcacaaaaggagttgcggctgactgcgcaaagatcgggtgggcgaaaccggcaaccaccgggggcaagagcttgccacgtaaattgcggattcattgcgttagttataaaagctttaaattcataaagaaaaattgcactaaatcaaaattattattggggtgagaataactttcgtcatagatgagaattctgtaattttttgctaatttttaaaatataatatctcgggaaattctttgtttttttacgattttaaactctacactcgaaataattttaaaaaagaatcctgaaatataagtaaaccatttatatttgttagggctacatatttgtttttatctcatggcacattcagatttgatcaaaaaaaaagttccgcggaaggcggatttggtatttcctatcagttgtcttccatgctccaacttttcaatttaaaaaaaacgcaagtgaacattatgccaaatcgaaattggagatcacatctttcgcttaatcactttaaagccgttctctttgaattttcactttcctgctcattttttgataatgggtcgacacaggcgttatccgatgaaaaaaacagcaaagaatacaaaccaagcccaaaaaatagaacgattgtcctttgacactgatcagacgcctcttcaaacaccaaaggacagcaggaaaaacaagttttctattctcgaacatagagaccttgaaaagtcaccttataggaatatgaacaaaaagccatccaattcgatgttggaggaacagccaacaacatggaaagagcaaatgttgaagaaactgacagacgaagttgcacaacaaaaaaataaaatacagaaaaggaacaaaaagccaaagaatcgacttttgggtaagagacaaaaataaaaaatttgcggaatttttgattgttaattcagaagaaacgcagaaattgggttatcatcacatgccctgggaaagtgcaaaaacactgatttaccgaattcagcaagaccaaaacaaggctataaatgaagaacttttaaaggtcggaaattggattttttgcttttatccttctttttaaggctcgatttgcaaaagcaggaagagatgttaaggaaatagcggaggaatacaaaataatggacgaaaaaaacaanaatgaaaaggagcggagaaaagcattgcacg

SEQ ID NO: 25028 - DNA, 1193 bp, Heterodera glycines
taatcaatattagttgtgctgaatagaaataatttcccgttattggaattgggtagagcgttgaggaatgagatttttgatttcttttgagagtctactttggatggttgatgagaatttttgaatttgttttgcgttagtttcggaatgattaattatattcgccacaaaatgtcggcgaatataaaggaaaattcaccagatgcccaaatggggtcaagaacacattaattgttgtgatcaaaatttgactataaataaggaaattgtacgagcgagattcattcattcattaatacataaaatatttattattattatttctgttttcttaaatatttcactaatgtctcaacaatgtaatttaatttaatattttttaattaatcaactaaaaatccgcccgtttagctatggactcagcggaccgtcgctcacctacccccgacatggagctttgcgaattgtcatcctggtacgacattttgcaggatgacgatgacaacgtaaaaaatgttttttcatttttcattttcaaaaattattattccagattttaaattggttcacaccggtgacggctcgcgacgtttgccaggaggtgttagcatttgcacaagagcgccgcatgccgtttgaaaagattgttaaatggaagcaaattttggacaaaatttgtgctcagatcgcccaaaataagtgatcgttttgtgatcgaattcatttttaaattgatgcgctttttttggcactgttaaaataaaagttcattttaaatttatgtgagaattatatcgaattgttggggcggtgggggggggggggatctctttatttttgaaaaaaccggtacttgtaccggtacgaaaaaacggtaattaccttgccggtaccggtaccagtaccgctccactctagattggaattaaccaaaccgaaaccgaaactgagtgaaagcgtcaggtgacagctaagacattaattaacgcttagacagtgctgagcagctgaaattaagtttacttttaagatcgttgcaaaatattaattataaagaacgaaaaatttagcgaaacaagtgccaatttgtcacggtttctatgacaaacaattgggtcccaaatttttcatttcaacttcagaaaatcaaatgaaagaaaatcttttttagcacagtcataatattggtgcta

SEQ ID NO: 25029 - DNA, 1999 bp, Heterodera glycines
agttacagtaaactgacaaggaagtcctctgatgactcttatcacactttctcgttttccttcatcttccatcaaaaaatcttcaaaattttcgatgtccaacgtgagccggcctcttgaaccgccagtgttttgcataactctcggatgaattgagaattttgcatttgtatagcccgaattcgaatacgaaacgaacacgctcaacgcgtcgtcagcgtccaacacgccagtgggaactacaaaaattattaaacaaataattaataagtcatttgccctcgtcattttttggactcatgtcacacaaaaaaaacgaaatctaattaataatttgttacaaatatagtccgaaaagtccctttctgcgataattggaaaacggattttgtaaagtgcgtctcccatcattctgcggagatccaatgcgaagcattttgttcatcctctttttcttggcactgattttgcgcccaacgaattgcctaacaataaaataaagatgcaattagtttcaattgtcatatgattaccgccttccaaacgtcaacggagacagttctgcgcaaaatgttcgaactaaataaaaacaattattagctgggtcgtttcggggccatcccaagtttttgggctattattatttttaatttcaatgaatcaacaatcttttggcatcattctaactcatagcatgtttagaaggtttgatttcgttgaaactaaaaaaaattatagcacaaaaatttgggctggcgccgaaacgctcctttcccctaattagcgagttaattcaaaatacaattaatcctttcttaatgtaaaatgagttttataaatatttgcttatatatagcaacgcacattaggtcctttcagcttgagacattcggaatacacagcaaaaatgttgggaatttcggagaagtcaaattgcagacattcggcgacaagttcgctcatgaagtattggtcagctaaacaaaaaaaaataacaaaataaaaaaggcatttgatgaccggctatgaaaacttcgaacaaaatttcgcctttcacttctgccatatcaccgcagtacaaatagaaaagaatggcattgaacacgtcaaatttaatgtttttgattgccacgggttttgttggaggtttgtctaaaaagctattcgtctttataagattcacatttttggcacgacctttgttcgcatcatctgaaattagacgatcgaacgcaccagaaatgccccacaaaatttgcctgtgggctcggacatgcttaaaggtaaaaatgttatgcttcgaaattctgaattctatctgaagtttatgccttggtttcgccaccctcgtcaaatacaaacaccaaatcagcaacggacccagtcaataataaatttttaaaacgagttgacacggaagacatttcaaaattaattgtattttaaaatatgtttgctcctattagaaaattgcaaaagaaattagaaggaacaggcaattgcaaaataatgaataaatagagagaaataacaaatagaacagagaatgaatgactgaccccaatgaaagggtcaaaaattgaaaaagggcagagtgaaaaataaagtggggaggggcggggggattgaacggacgtgggaaaggcaatttgcaatcgatgagaagtttattaatcattcgtattttttaatctatgcatgcatatgctttatgtgcctgcgtcattttttttattcaaggagtatgtgcatcaacggaacgaaaagggtcttttcacatgaatttaccgtattggtaggatggcattctaatgcccaaagattgggcagagcttacctaaatattgccactttattttaaaataaatcagtcgaagaaatattgttttctaggagaaaagcccattgcttaatgtatgaaagaaagttgtttaatgagaattgttctgtgaaatctgaatgttttactgaccacagaaacgagtcaaactttcaaaag

SEQ ID NO: 25030 - DNA, 1752 bp, Heterodera glycines
agtacaaatgccgcgcgaatggcgactgtccaattgacaaaggtgagagagagaaagccaagagtatgaatggcaagtggttattttgataacacttgtttcatctttggattaggtcgatcattttcaatacttatacttttgtgctgttttctttctgtactcagatggcatgcgcaattgttgtcgtgcctgccgccttcggcgctgttttgaggccggcatgcgactcgatttggccccaaatgcccacggcaacgattggccttacgctgagcttaagtccgccgtctcctcggccaattttctcgagaggccacggccaacaaagcgtgccattagcgatgccattatcagtgccattccgacgacttctttcctcagcagtccctctgcctttgatgctggcttattgttatcgcctctgccggtcactaatcgaattggccatttgctgagggaattttcggacagacaaaaggccatttgtgcccaacactttggcattggcactgtgcttggcaataaggttggatcgattgtcattgacaattgatcaattatgctgatcagttgaggccgatcactcacgaagagtacagctgcatcgaacggggcagagttgtgctgctgctcaattttgtgcgggcaattttcccccaaattgactcgataccgacacaggaaaaggtactaattgggcaattagtcttcttacttccctaatttccatgataaataattctgtattttttttgaaattcgcaattgaatatttgctataaaatttgaggtccgtatactcaaaagcttcacatttctcttcaatgttctccatggcagtgatttaacggtgagaaaactaaaaaaacaattaaaatttaatttaaaagttaattaattaaaaggtccaatattttcccctgctggaagggtcggactgtcaacagtttgtcattttgcccggctgtctgttccaagtggaccattttgctacaacactaactggcccgggaaaacagcagcaaattgtgtcggtgccttaggatgaataagaagcagaactaataattgaactgctcgagagtctcggcctcaataaaagaaaatctcgcgcattctttggggtcttccgggttcattttcagtattggtaaatgcgatttctcaagtagtgcaaccaatacggtaccgtaccattagaaaagcaaattcagtttcgctagtcaatttgtgagccgcttttgtcatttcctctcgcacacattcaaaccgttgggcataacgccgttggaatttgccgcgctccaaggcattcagttgtggaaatgcggtaattccatcggcacttttgccaaaagaaaaaccaaaatttggggaacagttggcgaattcgcggacagcacgacctcgcaattcggaaccacttctgtcgaacgtccaattgacgcgctgttttccgagctccattcgctgatcgtcgcctcagaaggcggtgccgccaattcgaagggcgtcgccgtccgtttcgggcgcgattctgtcgatgctaacggatgtttcggttggcacgaattttaatgattgaaaatattgctcaatgcttctctcccctaaaaaaggaattgggtcgcgatttgagtgaactgttcactctgtgcaaagtgtttttggaccctggagagttgcgtgaatagcaacgtcggttgggacgaaatgttcgcggagaaaagacggagccagaaaccaaga

SEQ ID NO: 25031 - DNA, 707 bp, Heterodera glycines
attcacttttacgttcatatctgcacagaataatattttttgatgtttcaatggtttttgactggatttagcttgttttggtcaattttggaacaaaagtgagaattttgaaattttttaattttcgactttttgttcggattcgggtccgggattcggaattagtcaaaatgaatgccagattcgtgatcagcgacccagaaaaccccaaggaaatgtgttttacacggcttttttaaaaacttttatttttttcgaaaaatgggggggggggggtaaacttcagtattaccaaaataagtctaagcatacaagcctaacctaagtctatgttcatcgccttttgtatgaattgtcatgactagagatgggatttttaggtttttacctatttttttgcggcttagttatgatgatagaagcccaaaaatagcattttcttcgaacaattgcgactttttagcatctaaaattactaaaactggattttcggtcatagcacctattttggcatttttcgagttttaacacctattttggccttttttcagaaatgattttatctatgatttttcatcaagtacttggttttttccaaaattttaaaaaattaaacgagcgtaaaaactcatggaccgatggtggagagaattgcatattattatccaggttaacaatttgacattgtgtgtcataattaaataaat

SEQ ID NO: 25032 - DNA, 992 bp, Heterodera glycines
ataacaaaaaagacggtgtaaactctgccgaaaagtgcctgttatgcatacatacttgattatccaattatgttttaaatacatatattaaccagggccctgcgggccctgtgaaagcgccgggggcgctttcaacgctggctctagtgggagatataatttggggcgtgcaaaaagcatctattggccactaagcgatcctcatagtttaggaatatgagaatttggaaatgaacaaaaattaatttaaaaacgatattgttttaaatttaatttaaatgcgatatttttatttaaattgattttaatttattttttttaaattgaaatagcttcgctatttaacagtctctagagggcgctacgcgccaaaaaacttttatatgtaagaaggcaactgatttttttaatggccgggaattcaattaacgttttcctaaaactcaaatttttaatatgatcacttaaaatctcttacttttcctctttctcatcccctttcaccctcctttctaccttcccatttcacttcatcactctcgctttctcttgctctcttctctttttgttccttcctctttccctttgttgctttttctcttcctcttccactttcaccttctcttcctctttctgttcctctttatctttctcttccatttcccatttcctttctcttcctctttgcctttgttgctctttctgtttctctgttttcttcctcttccacttcctcttcccctttctattcctcttccactttctgttcctcttccactttctgttccactttctgttcctctttcagttcctcttcctcttcctctttctgttcctcttccactttctcttccactttctgttcctcttccactttctcttcctctttctgttcctcttctgtccctcttcctgttcccctttctgttcctcttccactttctcttcctcttccaatttctgtttctctttctgatcctcttccactttct

SEQ ID NO: 25033 - DNA, 1918 bp, Heterodera glycines
  unsure (1)..(1918): unsure at all n locations
ccaagaaacatcttttcgcgactttttctaacaaaaagggcccccaccatctatagcagggttaccattgaaaatttcccgaaataagaacatcgctggtcaaaaataagattttagggtcaaaaataaggacatttttaaaacacgcttccaaaatttaaatcgcatttttattcaacaaaatcaagcattagcaacatatttctcgccgccaactatttttctgagcaattccggcttagaaatgagaaatttatacatccccgaaaatggattttaataattttgtggaaaagataagcaacttgtaaattattttaagttcattcgggatcaaaaaatcagtttttaacaatttttttgcggcgtgctttttccaaaaaattttgaggaatgggcgatgggatggggtccggcggtgccgataggcgccgccggaaaaaaatttgtaatttctttctgatttgttaacatattttcatcaaaaaatcatcaatttttgcggttttaacattcaaaaggctttttttgcggcatttttttaaaaactttcttttttatgcggggggaagtccggcggagccattatgagacgattggaaggattcctccaatcaacgttacttacattcaaattttgctcctaaggatcgctttatccatggcatatctaatgtcatctcttaagatgtattagtaattacgtgtaaatatatctacagatagttgtcccctatcaaaattgtgacacagttatttccgcagggacttcagctatgctatgcttcgtttgctaggatgtttatttctctaatcctgtgtttaatctcactgataataagggttgcacaaattacagatgtgccgctaaaagtaggcttagtaacagcataagcatgttattggaacatccctcctaccattatttcatatttctctcatatggcagaaagctacatattctagcgatcagacttttcagttgatctggtgttttacgaaagaattttgtgataatgtagtggtgctaatgtatttctataattttgtatattgtatatttcatcatgaacaaaattgaaaatattttcgaaacaaaaacatggtacagaaaggaagcttaactttctgcacacgtagatgggctgaattttggcatcgaatgcgtctacaatgcatcagtatttctatttgttacgatgacatactagaaaatgtagaaatcaactattttcagaagattgcgaggcttcctccgatctagtttggcaacattgagttcatgcttctaggtattgcaatacccacagcatatagaatttgcctagaaaggctgtattagtgtaaacggataaaaatatctacaaaggttgtcaccaatccaaattgcaaaacagcgatttccacaggggcttcagctatgctatgcttcgtttgctaggttggcatttctctaatcctgtgtttaatctcactgataataagggttgcacaaattacggatgtgccgctaaaagtaggcttagtaacagcataagcatgttattggaacatccctcctaccattatttcatatttctctcatatggcagaaagctacatattctagcgatcagacttttcagttgatcgggtgttttacgaaagaattttgtgataatgtagtggtgctaatgtatttctataattttgtatattgtatatttcatcatgaacaaaattgaaaatattttcgaaacaaaaacatggtacagaaaggaagcttaactttctgcacacgtagatgggctgaattttggcatcgaatgcgtctacnatgcatcagtatttctattttgtacgatgacatactagaaaatgtagaaaatcactattttcagaagattgcgaggcttcctccgatctagtttgcaacatt

SEQ ID NO: 25034 - DNA, 2576 bp, Heterodera glycines
  unsure (1)..(2576): unsure at all n locations
atttcaagaaaataaacgattttntggaggattcttctaacaaaaaaagaaaagcaaaaaacataattaattacccctttcaaatcattcaaaaatgcgcgccattctcttccttgcaatggtttgcttggtgatggctgttattcttgagacaggtggccaaaattaattaaaaaattaaaaatattttattattttagccaactcaaaggcagtgaaaaataagaaaggtataaataaattgataataaataataattggaatatgcttttaaaggaacaattacaacgccagcaaaaggaaaagcggcgccgaaaggagcagcgaaaggaggtaaagcagaaaagagagagggactaattaatacaaattaattgattaactaattaattaattaaggaattaaaaaagacgcaaaatcaaagggaaaaggaaaaaaggacgccaaaggcaaaaagggtaagaattttaagtttatttttaatgttattaattttcacaaaatctataaaaaaaaaattccgttgtgttggcaattcaccgaaattaataaataaggattttgatattttttaaagttttaaacaattgttaccattccgaatcagtcatcaagctaaatgtagttgtcttatttttaattaaaatcaactaataggctttgaaaaatgctataaatattttagaccaaccaacttattttgtgattaataggagggcttcctttttaggctcaaaaaatagcaaaatagacgttaataggcactaaaataggcaaataaattttttattaacgctttttaggtagcaaatggtaaatatttctaattgtatgtggaattaataaatattttaaagttttttcgaataagcacaaactttaaaccataattttttataaagaaaaataattaaattgtagaggatcaatttttctaaaaaaaatttgggtcgtttcttagaggtgtatttaagagttttccgaaaatcctgaaaataggcgccaaaaatggataaataggcacaaaattaggcattataaaagacatcgttgactccccaaaaccagtttttcgtgcttatctgagcgtatcaagcgcgcagaaattcttattcagttccaattaatttttctacaaaatgtaaaaaaagaaatgaattaaaattgtttgtattgtacgatggattaacaaaaattaagtgctacgcatgcggcaggattcgaacctgcgaaggaaatatccctttgcgatgtaaacgcaacgccttaaccactcggccacacatgcggtaatgtcattcaatactccaatgcgttaaaaacattcaatcaggcaacgctccgggtttagcgctaaacccgagttgacttgtgttgatccggattaacctttttatatcgcggtgtgtctctaggttaaatgtttcttaacccgtgtttaataaataatctcgggttaacagcgtcagtgtcctcgtctttggattcttaaccgggttatccgttaactcgggttttgttaactcggatttaccaacttttaacccgggtttatctccgtgaacccgggtttaaaataaatttgtgtgctcgtttaaccttgtttattttcttaaggatttttaaccctgagtttaggcattgttaacacattttaaacaaataaataatttaaatataaagaactcggtttaacggcttaacttgatttatttagataaggataatcgaactgactaaaatcacatttttgcaggttttaatgcttttgtgatctcataattatttttatatatcgataaattgtcaaattaacgaattgaacatagacaaatcaatgaaaaaaaaggttggcattggcataatttccgggcaaaaaattttggaaaaacatttccaatttcaatgaaaataaaagattttggaggaatataaaagctaaaagaaagccaagcgaaaaacatattcgaatattttaatttaattaatttgcttttattatccttcaaaatgcgcgccgttctcttccttgcaatggtttgcttggtgatggctgttattcttgagacaggtggccaaaattaattaaaaaattaaaaatattttattattttagccaattcaaaggcagtgaaaaataagaaaggtataaataaattgataataaatattaattggaatatgcttttaaaggagcagttgcaacgccagcaaaaggaaaagcggcgccgaaaggagcagcgaaaggaggtaaagcagaaaagagagagggactaattaatacaaattaattggttaactaattaattaattaaggaattaaaaaagacgcaaaatcaaagggaaaaggaaaaaaggacgccaaaggcaaaaagggtaaggattttaatataaagcgaaatttaaacagttaatttttgaattttagacaaaaaagctaagccagccaaagggaaaggagtgcctaaaaatggtaattattattaattttaaatgctaattaaaattgaatgaatttagacaataaatccccagcggcaaaagccaatgacaaaaagagcccaagtaaataat

SEQ ID NO: 25035 - DNA, 1615 bp, Heterodera glycines
aaaaaacgtgtgcgaagcgcccgtcctcttgccgcgaagcgcccgaatgttcccaacaaaattaaaaaagggctcgaagcgcccgtcctgaggccgcgaagcggccgaatgttctcaacaaaattaaaaaacgggcgcgacgcgcccgtcctgtggccgcgaagcgcccgtccggaggccgcgaagcggccaaatgttccccacaaaattaaacaacgggcgcgaagcgcccgtcctgaggccgcgaagcggccgaatgtcccccaaaaattttaaaaaacgtgcgcgaagcgcccgtcctgaggccgcgaagcgcccgaatgttcccaacaaaattaaaaaagggcgcgaagcgcccgtcctgaggccgcgaagcggccgaatgtcccccaaaaaattaaaaaacgggcgcgacgccccgtcctgaggtcgcgaagcggccgaatgccccacaaaaaattaaaaaacgtgcgcaaagcgcccgtcctgaggccgcgaagcggccgaatgtcccccgcaaaattaaaaaacgggcgcaagcgcccgtcctgaggccgcgaagcggccgaatgtcccccgcaaaattaaaaaacgggcgcaaggcccgtctgaggccgcaaagcggtcgaatgcacttgctcatcacttatcaaacgcgcatgcactagcaacgaagtcctttgcgcgaagcgctcatgtcagcgcccgcccatatataccaaaagtatactgtctacaccgagcaattactgtgcaaagcatactgtctacaccgagcaaccactgcgccacacgctagtttaatacactaataatcaaatcgtgtttcgtttccaaaaactaaatctcgggaaccgctggagggaggggctcgggatttcgaccttgcggacaactttttgaggcgcatctgggaaaactatagattttttgatccggtggccaggtgagcgccagcggcgctgaaatggcttttttaaaattttttttgccgttttttggatcaaaaattttttaaaaggcctaaatgaaaattccgttcccataggaaattaagttggactgttttgcataattttttgttcttcaccgaccccatagggcttaccgatttttccgaaaaactgagcaaaaattgcatacttttttaggccatttcagcgccggcgaataactcgccggggtttgattggaggaggtcggtgtaagcggcttttttgtacagtttgacgagctctatccaaccatgtttttggatttctgaaattttcagaaattttcgagctaggccccctcaaaaattttccgtttttgaattttatgattttttacagatttttccggggaaaacggagaccactttcaagcaaccgtttttcatgctctatcgattggtgtcattttcagaaaaaattttcaaaatttttttggaaatagaaaattttccggaattgagggcttatttcagtattgggtccataactcgtcaggagttgattttatcaaaaaatcgtctaagagcttttttgcagagaattttaagcccaatctaatgtgctttatctcatgtttttatcttgaatttaaaaaaagttataaaattaattgtgatttt

SEQ ID NO: 25036 - DNA, 1658 bp, Heterodera glycines
aggaaatgttttgtgtaaaatagacaaattttcgattggactgatcaattcgagcaataaagtgctgatctcgatgctgctgctgctgcgtttttttgtcgccaatttgggcacgaattgtaagccgaaaaatggtggaattctttgtaatttttgatgggtccggcacagatagggcaccttaaatggcactgcaaaatggcaacaaatgcactgttctggaatataccgtccttttccaggacaaatgccccgaggcaattgcctgcagcaatttcaaaagttatcctcccatcttggcgttggtgttggccactgttagtagcagcggcaaaatggtgcaccacattgccattgggatagagagtttgttccaaatttgccataaaaattgtgacattgggtgcactgaaattgtacggacggagtaggacaaaacgtcgccggacaaaacatcaccgaacggacgagtttttgggctataactttttgctttctcaaccagattattaagtatttctggccataactttagcagaataatagaaaacagataaagctattactaagaatgcttaattaggttaacaaggcaaaaaattatgatccaaaaaatcgtttggccatatttcgaccggcgatgttttgaggtgggcaccggaaaatttacgaatcacggacaattcagtatagcgaataaaaaactttcatttttaaataaaatatatttttcttttttattttggaccacacctaagaaagtgaatggcatttcttttcgttgcattggacgaccattggtcagtgtcgtcgatttggacattgacgcgaatggcacatcgggttactgtagtcccaccataatcctccattttactgacctccatcaacaagacaagggaatgctttaaaagcaagaaacaaaaattcaaatttaaatcaaattttgcatgcaccaaatttcgatccaatgttttctgaatgtaaatattgccgtcaaattcgtcgactcgaaaatttggcgttgcatttgcattgacaaacgaaaatttatgtgttgcactatcggtgacattgtccaaaatgttgacacgaccaatcaaagtgcctaaaaatttgtaaaatttaattttagtccaaaaacatgccacggcacacaattttcaaattatttgccatacataccaataggaactgattcactaatattccactgctgataggatatggcacaacgaagctgtcgatgattgacattttgtctccaatttgtccagtcaatattgatcaattggacagctttttcataaacaaattgatcagacaaagaccgggccatgacacggaatccaaatttgttgtcggcacaatttatgtgctgaaatttgcccatgtaaaatgaaccctgcagttcatccaacacgaaaattccttgctgaagtgcctgaattttcaagaaagaatgagttagaccaatcgagaaatttgaaataatgaaacatacaaaaacttttttaatttcataatagttttttgctagaaaacgaaatttcaattttttagctaatttttcatgttttgtgtgattttttaaattttacacatcaattgtgcgaactgaactgcatattgtacgaagtattgttaaaattcttgat

SEQ ID NO: 25037 - DNA, 988 bp, Heterodera glycines
caattttagttatacccaaaaaaccatcattaccgtccctactacgaattcctgtttccttgcgatatgcgcctgatcttttgaccatgtaccaactgtctgaaacagaacaatcacttttttgtttttattttttacgtacatttgtcgcttcggtgatgtcttcatcgctagcgatggtcctcttgagaacgatttcaactcccaatttggcagccaaacaaaactcaacatcttccaattgctggtgctttccacccaatttttcgcagtgttttcgtcttcttgtctataacacaaattaactagggcttttttcagtgatcaaggttttttaataaaaattttttgaaatttgtacacaatttcagcaaaaaaaaactttttttaaaactcacttctcctttcccattacgtgcgtaagccatttcaacggggtcgctccacacggactcatgcgcaacaacagcgcgtgacgcttcctttacggctaaaaatggaaaaattgataaaaggcgggtataaaaaagtttttgataatttttaaaattgaaatgaatgaaatgcaacccacttaatattattttttcatcgtctgtaatttccattccttctgttccatcatccgtttgtgtgtctacgtcaactttttccatagggacagtttgttcctcttcggtaacttcaattagtgggggtttttttaggaaaagataaaggcattggccagaaaattggcccaaaaacaactaccgaatggggaaggatgaaattgagcgattcttcagccaatacgaagcggaccaattggcacacggtgaagaagcggaagaagaggcaatgcaataaaagaaacgccaatggacgatcatatgcatttaatgcataacaatttaaccatttgttttttattattaaaaatgccccccatttcacaatgaaaaagctttattttgtattcatcagaaaaaaatagttttctctaaaa

SEQ ID NO: 25038 - DNA, 991 bp, Heterodera glycines
  unsure (1)..(991): unsure at all n locations
accanngtcattggaaacttaaattcattcgaattttcattcccaaaatttccatttttaccacgaattcattggcgcattttcccgcactttttttaatgattcaatttaaaattaccattaaattaaaaggaattcgtttcattcacctacctatttaaaaaaaatgtcgcacaacccgaaagaagctgagagagaaatggaaaaagcgatgtaatattctaaatttggatgcccatggcttatcattttgcttttccgttttcagcttcatctctgccgattgttggctcggtgttttcgatttgcttgagcctttacaacttggcctcggaattgcactgatcagccaccgttttgactattacgtgaacgtaaattcaccgatttcaatttttcgtcgacgaagcgctggggaaaaaacgcatgaaaatgtaagttgaataaccaatttaaatgaaatataagatacgtaatactggagaatctggattccacccaaaattttttttgttatgaagactaacccggggtttttggggcttctgatcacaaaatgatatcagatttgcaaaaacaatgatttacaaaaagggtacaacattcgatcatattaataattttttttttaaatctgattttcaaaatcaatgataaaatgatttttgtttaattttgtcggcgagtttatgccccggcaaagtttccgccggcaaagttaaaatattagaaactttttcgggtattagagcccggaaattttgaaatgtcatgacctgaaagtcaacttgggcgcgactcccaaaatgagagatgtattttctcttactctctttatttcgggacctgaaaatcgaccaaggcgggactcccggttgtctcgggattttgtcaaaataaaagcccggcaccagactaatcggcgaacaatcccgtcggcgagaaattttaaattttatttcagggtggaagggaatacgatctcctcccc

SEQ ID NO: 25039 - DNA, 1393 bp, Heterodera glycines
gttcaacccaatacatttacagttaattttttgtggccataaaattgttaattaaatcaaagaaaaacgatgcaaaaattggaaatggtggcacaaacgctgcattcactaatgacttatgagaataaaaaattggccaaaaagtaggcgttggcgagaaaagaagcccagcggcagaaggggacggcggacacacaaaacggtggggaaagaaaagaaaggccttcgggggaggggagacgggggacggattgccgtggcaacgattgacggacggaatggacgggggcagcacagtcagctgcggaacaaacttatgcaacggaatttataggcgcggagggaacggctaatgaattaaaacatttcaattggaaataaaatttaaataaataaaaacaaaaaaattgaaatgtgacgattagtggccggttgttttgaagaaatcttttgaaaaagagaaaagggaaagtgaattcagcaaattttaaagttatatttgtttggttctaacttataaaataatgatgaaaaattccaaaacaattgcataaagccaaattagtgccgtaatgacgaaagtcagaaataagatttttgcttaaaatcgctacctaacaaaccaaaagtggagcgcggacaaaaaaatatctcgcggttacgaatcgcgcgtcgtggattcaaattgccgcgatatcaaacacgacgcaaaaaaaaatcatcgccgcgaatttcgttttgcggtcgcgctccaccccagctagtcataacatattctatttatatgctctgtaagaaaattatacgttcatgattttaataccacaacaaaaatcggaaagtgtaaattttatgaattttttgagccctttattcataaaaatttattttattatatcacaacattataacggattgttttacacttttgtatcttcttctatttctattttgaatatagcgcatatcctttcaaaatagggtaattaaggcaaataaatgcgatgtgaatcagtgattttgttgcgacagattgcgcagcttttcccaattttatttgcacagttttgacacgcaaacgcatggccacagggcaagaagatgacttcgatctaaaaagttcaagtaagaattaaaaaaaaagacaattaatttattaaatgctatgggattttattaaaagttttgagccgtttcttaaaacgaccaaattgccaccgattcgtgggttaaaaagtacggttttgtttttatttttctatcatttggcaaatttcagaaattcatcgcatcgttttaaaactgccaaattaataattgcacattttttgcattttttaagctttatttttacaacaaaatcaaaaaactttttctttgaagcacacacaca

SEQ ID NO: 25040 - DNA, 1569 bp, Heterodera glycines
acatatgagtagggcccggatttttagtgataaaaacttcctaaataattaactaaatagtgacaaaaaaatgccaaaatagtggcaaaaatagtggcgaaaaagttccaaatttagggggtgtaattttttaaatagctgttttttaatttgaaaataatttaaaattgaggtaaacaattttattcactgattgcagttacaaaatattttcttagcaaatattgaacaagaaaaaaaaatttgggggaagaatttttgtgaaaattttccaattcttaggggtgtattttttgaattttttaggtcgattcttggggtgtatttttcgtttttattgcattttttgggaaattttccaaaaaatgccaaaatagtggcaaaaataatgacgaaacgccaaaatagtggcaaaaaattattttagtggccaacttccaaaatagttttttttagtggcgaagctccaaaatagtgattcctagtgatgaatagtggcgttaaaacgaataatttccgaactaaaaatgtgtttttcgtgcatttctaatcaaaataaagccgcagaaaaaatagttaaaaaactaagaatccgggccctacatatgagtatacgaaaagaaaattaaatataattcaatttctgtagagggattgaacctggggaaagaagtagaaaatcaagaagattagccactaagccatttgcacaatttttagtgttacttttagactatatcaatttttttttaaattttgcctttaactccaattttcagcattaaattttcactcagacccccttcataccagtgcttgtttttctcggttgccctaccgggaccgggaaataaatttttaaaattcgggacctcggaggaccgggaattcccggtcccgctctattctagtctattggatcattttgacatacatttgatttttgtaatcaaacaatgaaaccaacattttaaacaattcataaacattgtttaacaaacaaactaaaacaaaaataatgtataattttggaattaaatttcggagcacaaacacatcgacttgaggatgggagaataaaaaggccaagtccatgtttgtctaatccatggcatccgttcgtcacagaaatcccatggctgtactggttgttgttctttcatcgtcgctgttttcccccgcttttgcgcttgctccacttcggcagtgcgccgcgtcgttggaatgtgccacgggcggtcgcctcgcgacgctgcacaatggcggtgaaccggcgcttgttgcgtgccaacagttccgtgtccgccatcagctcctccaccattgtgcgcttccgttgccgtcttggaacccgcgcggcgtagaagtcgaccttggattcgtcgatgtggccaatttgggggagaaaacaataatttatggaaaaaatagattttttttctctattgcacagtttaatcgatcataaaaaaataaattttatcggttcataactttttctagaaacgttcaaattaaagattttcttgtcatatttgataggtagaaggattctgtattatctgcgaa

SEQ ID NO: 25041 - DNA, 1506 bp, Heterodera glycines
tttcatttttgaatggcaaataaaactaaagatttatcttccggtcagaagtatattgaccatttaccgaattggtaacctgttgtgtcggccttgagagccatgtatttaatttaatactaaatattttttaatgttaaataagatacgaccagctgtgtctcctattacttctgactatgctactaatcctagtgattgagacaaagagaaataatgggctaggcttatttgtcgcctgctatttgttgctactgaccttatactcaaatttttgccttaacgaacaacactcactggaacctattcactttatcgaagtccggcatgcctcctgccgatacttactgatcaaagatagttcgattctttgatcagctcattacatatctcgcgcgtcttgtccctctactcctcgccgctttgatttttcattccctttttttgacattttaataccaaaagcacttaattaatctgccaattttcacatgcccaactaattaaatgaatatggaagaatttttttctttttaagggaaattaaactgatttcaataaacaaccaaagtaattgtttgtaataattataaaataattgttaaatccagaatccatatttcatttttcacagttttgttagataaaattttcattctctttttttgacatttaataccaaaagcatttaattaatcggccaattttacttgcccaactaattaaatgaatatttttgtctttaaaatgaattgctttgtaagggaagtattaagtacgactcaacccttaagcaaattctctggaattaactcatgatgaagatatcagaatttcgcccctcaaaagtctggaaattcccggaatcaagttttcaaattttaatcaagtttcatttttttttattgacagatctcaaattagaaaagttctggttaatttaaataaaaaagaaataaacacattgaaatcgattacattcttttcaacattaacattaaattcattacaaatctcaaattaaaaatttggttaattttaataaaaaaaaattaaataaattaaatatattttaattcaacattttacattaacatccaacaattatttaatcaaaagtcaattgaatccatcatagttggtaacattaaaattttttaaatgctcaacagttgacattttttatgtcaaacgataaaaaaatggttaaaatgtcggttaattgtgtcctgcaatgactaattacacaatttgcgcctccgcttttcacacataaagcaattgacattttaaaacacaaatagcaaatttatttaattcgttgcccattaatgactaatcggtaattgcctggcttaagggcttcaaaggcagcttggtaaccaaagattcgacaaataaatgaatatttaagctcaaatttttacaaagaaaggcacattcattcattctttattatatttaattaattaaattttataaattcaaaattaaaattaatttttc

SEQ ID NO: 25042 - DNA, 1397 bp, Heterodera glycines
attaacggatttttgactaatttcggtttgaatgaaataggaatgcggggaccgtataattaaaattatattttattattaaattaattattaaaagattaattaatattttaaattgtaaaactaataatgatattttataaaatctctaaaattatttattttttcttaacaaaatgttatttttgatacataatttataccgtccctttttagcttttcatttattaaaagcagcgtctatccactgtctgcccctcccacccgccgctgcctcgcgtggacaaacaggcagacagtgaactatttctttccttcattccctctaaccactacagcatgggaggagaaatcttttccttttctaactatttcttttgctttcttctttttcttagctatttcttttgcattcatctatttcataactatttcattttcttctctttttctttgtaatctctccccacagcaaatcaactcaacgccaaacgccacattcaaaccagggcggatacacacgccaaactttattatataggatcgtcgtatttcaaaatttggttttaattattatttttcaatttacatttttgccctttttatgattatattatatgatttcttagtgatttatgttttgttcttgttattttagcattttcttgtttgaaaatatacttttaaatatttttaaatattacttaatttgttttttaatatgtattactttttgtggtatttttaatcttttcctcatttagtgacgccttgtttacgattcagaaagcatttgacttggtcagtgcattttcgtttaactcgttcatgttcggtagtgtttgttttctttattttctatttgtttattgcatgtatattatagttgtataatttttttctttttatttacaaatgtgttcatttatattgccttctattcatcatttcaaaggaatttaattaaatatttaattttagtattgttttcaataccgtaattattatcgactccaaagtggttaaccgtatgaatgatttttctaaaatttcatttgtaaagattctttaaatttttgatatttttttcaaatatttatttaatttattattttcaatttaaaacaaatagaattttttagtattttttaattctttcaatttataaaaatggtagttcttaaaattacccatagaattaaaaaaaattcaatttatttaagtgtttgaaaaactatttagatattaaaacaaatatttataaataaactaataaaattaataatagctacattattaaaaatgccaccatgtttacgaaaatatcgacaaagtaatgaccaaaaattggataaataaaaatattctattgctaaatgtatcaattgattttttca

SEQ ID NO: 25043 - DNA, 1080 bp, Heterodera glycines
  unsure (1)..(1080): unsure at all n locations
agtaattattatntattttaaatgtttttntaattatatgaatttttactgnnaagagattaaactgattctttttttctcgtcgtcttatntagtagataccttttcttcccaatgtaatgcttgctgataaataaaaacgttattttataaacttatatttcttcatgctcttctcaataataacaaagttaaaaattattaaaattatatatataaaaatattttaattttttgattgcttttttttacaaaattttttttgttatttttttatctatcaattggggagcgcccttaatcaggtcatcaatgactttctttggggtttaaaagaattattattttatttttaaacaatgatttatatatatttcaattgccatttgggtgtatgctatgcgcaattagagaatggcaaatcaacctttttattagtttttgcggggtatcaatttaaatgttgatatttaattaaatcaactaacattatgccatcaacgcaaatatcaacgtaatttttaaaatttgcgaaaattttttaaaatttatatgagcggtttataattttagtgcgagagataacgcaaaaatgagagagtgctggatctcagtcccagtcatacaaaacatttttgatgaaggaggtagagaaaacaatttcaataaagagcgcaatgggaagggagttcatgtctcttcttcgctgattcttttggtaagagacgcagattcctcgctatgttctctattctctctctgtcttaaatctcttcccataacactctctttttaattaatttttctttattcttctttaccaaaaatgcttttgtatgattggggctgaatataacaccctctcacttttgcgttatctctctccccatcttattttccgccaaaagtcatttttgaaaaattgctttaaattttaataaattatcccaattttaaaaatagcgttgatattacgttgatggcataatgttatgttgatattaaataaatatcaacgtcaatgttgatatttattaaaacaattttcgctaagagaaaatgttgatttgcctttctcta

SEQ ID NO: 25044 - DNA, 1707 bp, Heterodera glycines
gagtctgttcttctctctcctccttgctaccgccaattcttatcggacggattatcatttaagtttcttgtttcaatcaaaggaaattgtgaagtagtgcaaaggttttgatagcccgtctgcatcagttgggtttttaaatcacaatggaccttttaggcacccaaccgatttttcaacaatactcacccattttcaatcagatttcggcatcgggcatgggttatttaatatcttctgtccatattttcaaattaaaagtttggttaaaaatcgttttaaatagacggaagcaaactgaaagcatcagtccttcaataagagaaaagccgcttttaaccaaaaatgctaaatcgaaaatttggacttagactttttattcaaattctggtccggggttcggatgaaatgaatgccggactcgtaatcagtgacctcgaaaactcaaagagcatcggcgattgtttagcgggcaatttgagttgcagcagcgacttcttcggcggattcactgcaaattaatagattatcaccgtaaaggtttttgccatccccaaggggtgtacaaaatcgaaaaccaatgctgacggagaacagaagcaagcagaaatggcgaagaattgaagccgaatgcaattcgtttgaagcgaaaatcactaaattttcagggattaaggattgggaagggtctctatctaaataaatttggccacttcccggtcttccgcccgaagaccgacggccaagaaagccttcttaatgtctgcaatgtacaggaaaggtagaggactggaaacgtagctaaattcccgctaattccggaccaaatttgggtcagggaggagtaaatcgttcagtgaagccttccatttttcctgcgcggagttatcatagacaactcgcaatttttgggggttcgaacctcatgatgttgtataaaatgctcccttgcccctgaacaaaccgccggctttataattcccggtcaattgttccaaaattgtcgcttgatattattctcgaattcggtgttgacccttaattttaggggcattccatcagacgggaacaggcgagtgaaaaattattagacaaatggtctctgcctccggcctccacggtcaaccaacgtcataccttccatacagtgtcgattcggaaaaggcctgggtgaatttcccaggacaaatctccaaaattctcttattcccaaaagaatttggggttctaaccgttatccacattttgctcgcctcgggcggcttccaactcacgaagtctcagggagcatgtacggcttccttaagccgtacaaattttgcaagcctctccctccactgtttagaggaccacggcttttctacaactaccacctttttagaaaaggcccttattgaggtaggttgcccgtgggtttgactaagtgaaacagctatttcggagggtgatgcgacttttgcggcgccgacacttgcggcgcagacatttgcggcgcccacccaaagtgacacttgcggcgccgacatgcggcgccgacacttgcggcccgacatttgcggctattttttttgcggcgccgacacttgcggcgcccagccaaagtgacacttgcggcgccgacttttgcggtgcccacccaaagtgacaacatttttatcaacaacaattcttttattttcatcgttgtaattctaatcccacgtttca

SEQ ID NO: 25045 - DNA, 1389 bp, Heterodera glycines
agggagagcacaaagggcccggggccgatcaagacgggactccggtcggattggcccgcaaaaaggaagcacagaaaattaccaccaaattttatctcaactttgggtaattaaaccgaaatgggtgagcaatgggggaggacaattagggggggtaaaaatcggccaaatgggccacaaagtgaaaaatgtgaacaatttggccctattagcccatcacaaaaaattgcattgaaattggtcaaaatgggggaaattgggagagcaaagagttggagcagtacaacaacggaaatgtgtgagggggcgcaataaatgcatggaaatggcttgggggcgccgtgatggtgattgattggggagcggggcgcttgtgggacaattgtgggggacgagaggaagagagagagagagagaattgaagcagcactttggtgtgctgcagatgattggtgtgttgatgaagcgctggtgttgagcacttatttatattggccaaaaagtggggagagaatgggcgagttgaagctgataaggcgggaggaacggaaaattgctggggggagtgacagccggtgataaggattggggaaggaatgtcactcaatcgaacattggccccaaatttgaaaattgttttaatttggtttttggggccaattcaattttgcacaatttgtgcacaattgcaaaatcaaattatttgattttcgcgaagggcaatcgcgacactcccgaggcggcaaggaaaggctcgtccgttcttccttccttcttttctcttccttcttggttcttttgggcccttcagtcgtccgccaatttcatcggtcgcaagcgtccgaagggcgtgtcttccgttgcgctgtgtgctcttgctctcgttcggaatgaggccgttgctgtcgtcgtgtccagtcgtattggtggagtcgattgctctggcaattgacgtcgtttccgccggattgttgtgcttggatttgaggcgttggttgtttctttggtcgaaatccaatcatggtcatgagtgtgatgcgaatggggttcaggaagtaagcgattaggcaggttaggatgacgtcacggcaaagtatggcagtttgtgccaatcgttggacgtttccattttttgagtcgattcgcacccacaagttgggtttttgttgcacttgcagatgatggtagcgaaattgagagcaacttgcgatttttgagatgagtgagaggatgcgcatctccgggtcgaggaatgcgtcttgtgttgtgtttggcagatggattgtgaccgggataaacttgtagcagtccttcgttgtccggtagctgatgttggatagggagattggaacgcagggaaacacttcgattgttgtttcgctgatccat

SEQ ID NO: 25046 - DNA, 1075 bp, Heterodera glycines
tggggcatttgcaggcggagtgcgctgagatgctcggagtagctgcgtgagctcggtctgaggcccagcctttcggggtctggtacccggatcgggggagtgctgtttactctgggtgaattgtgcaatggtttcgggtccgtgtgactcgagctgggggtcggtggcggtcgcgtgcgacacgtaccagcaaccagttcggtccagctcgggctctcagttgtgcgttctcggtgtaaaagccggtcatctgttcgacccgtcttgaaacacggaccaaggagtttagcgtatgcgcaagtcattgggtgttcaaaacccaaaggcgcaatgaaagtgaaggcttcttacggagctgatgtgtgatccctggcactgcggtgttggggcgcaacatagtcccgtctcgatcgcatgcgatggggcggagacagagcgtatgcgctgagacccgaaagatggtgaactattcctgagcaggatgaagccagaggaaactctggtggaagtccgaagcgattctgacgtgcaaatcgatcgtctgacttgggtataggggcgaaagactaatcgaaccatctagtagctggttccctccgaagtttcccccaggatagctggagctcgttaagcagttatactcggtaaagcgaatgattagaggacttggggacgaaatgtccttaacctattctcaaactctaaatgggtatgaagccagggttgcttgactctgaacccaggcgttgaatgtttgagctccaagtgggccatttttggtaagcagaactggcgatgtgggatgaaccaaacgtggagttaaggtgccaaagtgcccgctcattagaccccataaaaggtgttggttgatatagacagcaggacggtggccatggaagtcggaatccgctaaggagtgtgtaacaactcacctgccgaatcaactagccctgaaaatggatggcgctggagcgggccacctatactccaccgtcattggcttgtacacgtgcttgtcgcgtagtctggccatgacgtgtaggagggtcgtggtggttgcgttgaaggctttggg

SEQ ID NO: 25047 - DNA, 1692 bp, Heterodera glycines
aaaaaaagggggaaaaaaatggccaataaataagtttgtttttaaaataaattatttcaagaaaatttttttttatttccaggaaaaattttaaagatttttgttggatttttcaggcttggggctcggttaaaaattaggattcggccgggcttctgtacccggcaatccctgacccgtatttgcccaaatccccaggcccgttcccctaattaatatccgattttgagtttttttaaattaacaaataaggctacagaaaaaaattgaaaaactctcgcctctcgtcctctcgcctctcgccaactctcgtgttttgggggactctcgcctctcgccaaactctcgctctcgtctttttggggactctcgcctctcgccaaactctcgctctcgtcttttctgagacaagtcacacccctgatatgcacatatttttatacatattctggactttttcgcattttttttttctacatatttcgcaatttttgaggattttttaacgaaaattcccccccccccccccccccccgccgcctcgaagtttttttttttgagtcagcgattttttgggagattaaaaaaagttggtataaaaaacttattgtttgttataagaaaattcaaaaagaagatattaaataaattcttgcgattttttagacaaattttcaaaaaacaaaagtttcgagattcatcaaaaatttttaaaaaatcgcgggaaaaatcaatataaacattttctagaaagtcttataaaaagcaaaaaatccaactccatcccccctcctggtgaaggtgttcatccacccgttcatggacgggaatgggcgcacctcgcgtctgctgatgaattgggtgctgctccgtgccggcttcccgcccgtctccatccccgtggagcagcgccaccgctactaccacgtgctgcgcgaggccaacgacggcgacctgcgcccgttcatccgcttcattgccgagctcaccgaccgcacgttggaggtgggtgggtcatgagacatgaatgactttttaaatcgcccaaaaaatttttcaaaatttttttcataaaaaaaatcggggcggttgggatttgaaaattagggtttcataaaaaaaaggtcctccattttttcaaaaagtagctaataaaaaacaatgcttggtccaatgtctgctgatataccaatcgaaaaaagccctctgacatatgggaatttttgtttttttggaaattttgatttgaaaattttatgggaatttagcgcagcccggcaccgcctgggaaaaattttgaatttttaatgaatttgttgaaaaaaaatttgtgtaaaactattgtacccgctgttgtgttgcggctatgtcaatgaaatttgttgacattttagcccaaaaaggacaccagaaatatttttcagaaattttaatttctgttttttacacgaaaattttgttcatttttctaaattccttccatttttcacatttcggtaatttcaaaatgaccctccattttttacagtcgctgatcgccggctcagtgtcctcggtgtgcgaaattggtgacgactgttcagcatcatcatcatcgtcatcatcatcatccgccggtggtggcgacgcaattgatgccaccactaatgggccgaaggagggcgaggaagaagcattggatgccaatcgtag

SEQ ID NO: 25048 - DNA, 1348 bp, Heterodera glycines
caaaatcgatttttgcagaattcatgttgcaaccttttaaaagtcgttcaatcgcttagaaatagcttatcactgcttttaaatatgtagagcttccgaatgatgccaaatttataaaatttggccaactgtgaaaacagttatgatgttttaaacatgcctgggacggaactggcggtacagaaaccgaccttcactttgttgagaaatgcctgtgcaatgccaatgttcatttgccgttcccgacacccttaatgttcagtgggttaaaatctgtgtcagtctcaaaattctttctgatttatgaaaaaaaaaaatttcgaaaaattggagagggggactggctactaccgtctattaccaaagacttgcggtaaataggtagtatgtgaggtctcccattcgtccttaaatggcaagggtcctcgaaattaggccctctaactttgaaatttgaaactgcccttgaatttaatgtccttgaaaaagagaattcgagaaaaaacatttaacatattacagtatttgaaattttatacaatgttttaatcatatggcattgtttgtgcaaaatatgtttacaaattaccactgaaattttcaaaaaaatttacgggtggtcggcacagccggacccaatgttctcaaaaaattttttgaaaatagaacgtgcgatgaaatgaggaaaatgatcagcaaaaaaaaaatattgaaaaaattcattccagcgaaaactacaaaccatttgaataaaaatttcattgaatatgatttttgtgtcattgaatttaatgaaattttcccgttatgttcttgaaaatgaatatcccgtccttggaaagcattcttatcatacctgaacaaggggtgcgccagggcgaggcccatacgacgaacgattggcgcaggggggggtgcgcaaggaccaatttttcgtacgaaggcccccaatttttcccaacgacgacctttttttttttgctattcaaaaaacagtttttttcggcgtggtttttccaaaaaattttcgggaacaggggggccggcggtgccgctaggcgccgccagaaagtttttttgaattttgtattgatttcgctaaggaaatgtgcaaattttaggtttttccccctacgttacgaccccccccccctctcctttacagccgccccctttacgacgaacaaggggggggggggcaccaaatggaaaacagcaaaaaaaggatgagctacaacaatgatgaaggcatggcaaatggtggaaaaggcaattatcaacaatatgtaaaacttgaaaaaacagtgaatcagtgccgtgttaagacatttgcggtccggacatttgc

SEQ ID NO: 25049 - DNA, 2463 bp, Heterodera glycines
attatcggcaaaatttaatgaatatttatcattcgagaaattttcttcaataaattttgaaaaattttaaatttaaatgaatttgtttgattgaattttcaatttctaatttagattatttattatttttttttaattaatttattattttagaaggcagaactatctgaacattacaaattcaatttaactcgattaacggacattgacgtcattgcgaagaaagactacccatttagtgtttcttttaataggttaaacacatcaaattttaagaaagcaagtgtgccaagttgggccgtcaattttattcgggtaaatgccaaaaaaaaatcgcataaaaaataaaccaaatttttttacagttaaagggtgagcacatcaaattgctagaccggccatctgtactgaacgaagaaaagaaggtaattttggaaattttttggcaccaaaaattccgattgaataaattgaaatttttaattttaaaagattttttgggtcaatttttaaatttttttagcaaattttatgggggtatgctaaacaattgagcatgactatagttgttgttgttgtttttgtcgtatattcatcatttatcatcactcctttcataaagaaaaataataatttaaaccttaccgcatcattggatacggtgcttaactacggtgacgaagttttcctgtgataaaaatgcccaagggtcgttccgataaatttctacttaaaaaatgattttctattttattttcaaaaataaaaaagcacgggtttcaaattatttgccattttttgcccaaatttaggttcatattttgggatggatttttcgcctttgaaaatcacaccacttttttcgtatttatccttttttagcaaattttttggcaatttttgtcatgttgtttaaatttattttggcagttaagccaataaattgcgcttttttttgtcctttgaatttttggcgccttgccaattttgcattttctcataattaacatatatgcgcatccatccatccgttcattgtcaaaagaatttttcggtcaatttctaaatttttaagcaattttattgggaattctaaacatatcgttgactgtagttgttgttgttttttgtcgtatcttcatcatttatcgttgtcccatttcattcagaaaaaaaataacttgaaccttaccacatccttggatacggtacttaactacggtgacgaaatttggatggaaatgatcacttataatacaacgaaaagtttcaccattcgattgatgcacgaatcgatgagattcagcacggaaagtcagttcaattcagggctgatttctgaagccaaaaaatgccgaaatgtgcagtttcggcgcaaaaaagtgccgaaatcacagaagcggaatgtaccggaattcacaattttaaaataatttttcaatttttgtattatccaaaaacaattatttttgacagatttggtaacaaaaattggcatttttcaattttaagcattttttttgaataaatataataaactcagaattttgccggaatttttcacttaaaaaaatgccgaaatgcgcaattccggctctaaaacgcattttagacccatgatcaattgtggggcaattcgtatttatttaacaatatttttgatttattcaatttaattttacaaaaaatgttttctaaaacaattttttaaataaaactcgataaaaaaggcatagaaatttaataataatttaaaaaacaaaataattaatttatttttttaatttaaattctcattttcagttggtgacactttgttattgttggaatttgatctttcgaagccaaatattagttgcaaaaattatctgcacgaggtgggaaaataaaaaaaattttaatttaatttatttttgggattacagtattaaaggaatttgaatgcgaaaactttggacatacagtatcacaaataaaccaccattaaagcaaaacaaacaaaattaaatgcaaatatcatcggggcttattaatttgataaagtaaaaaggtacaaaactgtctgcttattaactgaatactgtaaccaaaccataccaaaaaagtggaaaaaaatcatgaatacagtaaccagatcgtatcaaatgacggcttattgataaatgaatagagagaaacaaaaccgtatcagaaatatagagctacaattaaatgccgaatactgtatcaccacgtattacagaaccacgacttttcaattggtcctgaaagcacgcacaagctgaacaaatatggccaacatttccatttgctgatcaatgcgacggccaaacattttgcgatcagaattgatcaagtcggctttcaactggattgcaaatatggaatttcgaaaaaattctcatatgataaatactacatatacccaccatgggcagtggataaaattcaagtaaaattgga

SEQ ID NO: 25050 - DNA, 2109 bp, Heterodera glycines
  unsure (1)..(2109): unsure at all n locations
tttagaataaaatattaaatgaagaataaatatgcggttgacatgaagaaagaggaggaatggcggattcaattcaaagaaatgattggaatttgggaaaacgctgcttctaagaagaaatgatgagtgatgtgagggaggggggagaaaatacagcaaaaagtgacgaattgggatttcttggacaaatccctaaaaaatgactaatggaaataaaaggccattcccaaggagaatattttgtggaatcatttcactattcagagacaccagcagacggtggaaatcaaagacaaattttagaaaaaacagtcgaaaagttaaaactttaattttacaatgattatgaagagaatgaaaaattttgacctacctattcattgtgtttgaattaaattaataaaatgctttaaaattgtgccaattccgggccacactttcacgatggctagccaaaagaatggctgagaattgaaaatgcgtatcagagaagcaaagtgaatttgagaaaaactggagagagggggcggagagtgttttttttgtatttcgcatattttttcatcttttgccacataaatttattctgcgattgtgcacctatcgttaaaacaggggaatatttaaaaatgttatcgtcgccgagggaatggaaaagaaagaaaaaaaatggaaaaggcgacaaaaatgcggtgattcattcattggtcggccgcccgacccctttttgtaaatggcatcatcaccacgccacctgcggccggagaataattcattttccgtaaacaaaataaacactcattcttaacaacacaaacaaaaaaagagggattttgaaatttatacggaaaataaatgtgaaatgatcaacccattttgtcgggtttttacagttgaacgttcggacaaattggcttcaactgctaatgtcgcaccgtctgaccaatgttttgatcaaaggttttaaagcaaaagtcagttttcactgaattcgtcgtcctttttctgctgcgtttgttttcttttctttttgattgaaatttttgatcagtcaaacgccgtgtggcgatcgcaaatgggtggacagtgaaatgagtaatgagtgatcgatgcactcgaacccaaatcagtcacttcatcatcaaattatcaccgatcaccagcggacaaaccttcgcccaccccaaggcgtctccgacgccctaattttcccgaaattcacaattaaataaaactaattacatgaatgaatggatttgatatataaacacattcgcaaaacaatattacagagtgattggacccgattatttttcagaattattaatttttaaaaatatttaaaaacacttttaaattggaaggattgttttttttttaaattttgtagatgagttgcccgtggatgagttgccaccatctgataaaagctgaccaaaataaattgtacttttttgaattttttttaattgatcagaccaaaaattaattaaaaaagattttattttcaatttaggagtttacctcttattgaaaatgaacaagagcacttccatttacatactgtaacggcgatgaactcacaataatactatggtagtcagtcataagttacttatatattacgatttatttataaaaaattttattttattttatattataatatttttatttttatattttaaataaatctatttcattatttcacgtgtaattgtatgaaacacctttcaataatggacttacataatacaattgtaacgtatttttaacattcacttccatcccaacctctaaatgactaaaattttattcggactaattctatttttcttagccttgactcgtctatttggtatgtatattatttttataaatatttgcaaaaattaccggtaaaaattcttgtaagttttaaataaatttgtattttttattcgaaataccattgtcccttaccgaaggaaaaagcactatatctaggcgtccaagtccatttagttcaaacagaggccaagatatcccatgaatttcattcagaaactccatgggcacttgnggcggtccggtaccactgggcaccaccgactggacgctgactaactg

SEQ ID NO: 25051 - DNA, 1156 bp, Heterodera glycines
cagagacggtcggggggtcattttgtcaaaagaggactagaaatttgcaaatacaataatttttgaataaaaaatgatgaatggcttcttgtccgatgaaaacgggaaaatgaaatattatgatgattattggcacaaagtgtgtaatataattttgaaatatatataaatttgtgtataaatttaaatgtgcaagcaaaaattaatgaattaacgaacgtctttcacactttttttgttgaaaaaatgtatgcatatgtaaatgtatatagaatatatgaaacaatcctctttctttgttgggggagtgatacataattttttttgtgtaaaaagagagaactaaaaaaggcattgtgagattttcaataaaaccaatcaattcggcaattggaaggagagggaagagaggaacaacaaacgaacggaacagagaacacaacaacaacaaacaaaacacatcataatacaccgcgtattttgtacataatttgtatgtttggaggtgggaagagatttcaaaaagtaaaataaaaaatggatgaaattttgtggagacatatagggagagagatgatgatgatgatgagaggatgaatgattgattgattgacgatggcagacacatacacacacaaaaagataaagaaagtaaaaaacaaaaattcaaaatctaagaaaatcgaaaattttgacaaaatgagcgccggggggcaaaatggcggcgttctaaacgattcaaatccgtcgaagaaccgcggatgccatgccaccggcgcctgtgccgagcacatcctcggcaccgccgctggtgctgttgctgctcacgccgctgtccacgctgctgggcattgcgtaggagcggaattggccctccgcggtggcgaggccgagcagcacgcgctgcttgtggaaacgcattgcggccggcggtggtggaccggtagtgccagtctgttgttgtcgccgttgtggtgacgtgaagtggggacttcaaaaaggcaggggaagggagagtgagtaaattagcggatatattatgcgggtgcacttcatttcccccccccgttaaaattaaaaaaaaaatttttcaaacctagaaaattttcataaaaaaattcataggaaatttcttagtaagaaaatttcaagaaaa

SEQ ID NO: 25052 - DNA, 966 bp, Heterodera glycines
  unsure (1)..(966): unsure at all n locations
tatcggaaggcnggagaacaggatgaccctttggccttatttgtaagatttgtccttattttgagggtccaaatcttacaaattttaaatgtccttatttgtaagatttgtccttatttaagctctttgtccttattttcgtcttattttttggatttagggagaaatttagtttttaatgataatttttgaaagaaatgttttttaaagcgaattaatatgcaaaatcttaacaagattcagttaatattcaaatttttctctcggcggtttcttattctctttaaaaaattggctcaaaatcgtaattttgtcattttttgaacaaaatcgttaagaattcgtattaaaaattacaaaaatttttccggcagcgtctattagagctgttgtatctgttattatttctaagaaatgttctgatttggggtagtgccttattttcatttaaagaggaaatttctgaaaaatttggctaattcctaacaaaattcattaaaattcttaaaatttcccccagcggcgcctatcggcaccgccggccccccaaaagtcctatttttttcttaaaattagcccaagatcgcaaattttgtcatttttggacagaacttgttaaaaatcctttcgcttttggtaaggctaatagagcatgttaagagctttcgaatgataccaagattgttggatttggatgccaaagaaaaaagcttaagtggaaaaacgagctggcgccgaaacgccagcgcccaaacggccgcgcccaaacgtgtgggtcccctttaaatgagagaaaatgggatcgacaaaagagataaaaagagaaaagttatttgatttgagtcatttatgcattttctaattgcctttgattgttcagggcaaatcggtgacccaaaaagacaggcacaaactgctgcaggcgaaagaaagagttcggaaaacggcagaaatgagataaaaatg

SEQ ID NO: 25053 - DNA, 1406 bp, Heterodera glycines
tttgaggatttttgaggcttttgggggaaaatcgtcagaatcttttaaattttgataaattttaacataatgtttgacatttatttaatttgaattttggtttttacataatagaatatcaaacggaaatctcacccaaatttagccagaaaattacaattttttcgaaaatccacaaaattatgaattttttaaaatgaaaatctgctaaaaatatggtcaaaattctcaatttttccaacaccggcggtgccggacgctaaaaatcctttttttttaatttgctcaaaattgcaaaatttggccatttttgtggacaaatctgttaacaaatcacattaaaaattacaaaaatgtttccggcggcgcctatcggcaccgccggccccccaattccccaagttttttggaaaaagcgccgcaaaaaatcaacttcgatttttcatgctcagtctcacaaaatgcttatttctaacaaaaaaattgctcaaatagatcatggaaaatcaaaaatatcacatttgaacattttaaacgtgttttgaataaatttgtaaaaatgaggctttttgacccaaaatgaggcgtttttacctgccaaatgagtcttttgaaaattttgatctggaagccctgataaaaagccaactcgtactgacccgactcgtactgctttttgacaaatctttgtcaagtggatcataaagattcttggtacatatcattggataacccttaagctcctctacatatttccttaaaaattcaaaaaattaccaattaattatttttgatgtccttctatagatattaaagttctctcttagccttcaaaatttaattttttttttttgtcaatttacaaaaaaattatggccaaaaaacctaaaattgactttttcatggctttttcagcgccgtttgccataactttttttacgcttgcatgatttatttctatttaacatgaaaatattgagcacacttgggatgtgatttttatcaagaattggtgtcccgacgaaaaaaaatgttaaaaatttgtcgggtattttttctaggcttaaaaaatgcgctgatcacgaatctgagctcaggttttgaaaatttttgatttttatctaggatttttcatcaactacttgattttttttaaaaattttaagaaaattagtcggacataaaactgatacacatatgttgtagagcctaaaaagagctttcgaatgagctataaatgtatgaagaagacaagtttccaatttttttacgattttttgaaatttaattattaatccctaggggtcggatgagacgggggtctggggttcaagtccgcttggatgcggattattttttttatgacacttgatgaaaatcatatacaaaatgaaagatcatgcata

SEQ ID NO: 25054 - DNA, 1077 bp, Heterodera glycines
ccgtactgaaatgaccccatccctctgaaagtctctcactgatatttttgtcacttcgtcctagcacctgtccattcacttttcccttcccaaggcattcatgtccaatcacttgtccaaatggcgtgcgattcgcggcttttggacgccgattcgcggcagagggcgatgcaaacaatcgccacaaatgtcgaagaagcattgcacgtcaaacaccaggcaaaatgctattagatgttagggttgctgagcatgattatgtcattttggactgttatgattttgtcttttttaaattttcccaacaaaaatgtcccccttttgcttccgactttgccctctttcagttgggcggcaatcgcttcagaatgctgaacatgatcatctgcacgaggagcagcggtgcggccgtcacattcctttacatttccgtcaaaatgctttataccgtaatgcggcatttattaattgctcgcccgttaattataaaaagggaattaggcaattaattaattgcttccttaattaggtgaacattgttggccaaatctttctgctgaacacttttctgggcaacagaagtcgttggtacgggctgcaggtgctgaacgatctgatgaatgggcacgagtgggaggagagcggacacttccctcgggtcactctgtgcgatttcgaagtcaaagtgttgggcaatgttcacagacacacggtgcaatgtgtgctgatgataaacatgtcagttattgtaaattggacattttccttattattattttaatggaatgctcttatttattcgttttttgtaaaaaaaaatatatcaaaaataccaatttttagaataaaaatacataaaattgactatttttgcaaatcttagtcaaatcactcaaaatagtttgggcaataaaaaatgtgattcacttcaaaagtataaatttttagctttatataataattttttaaccttcatatttttggtcccaaaatcttattttgatcattgatctctgatttaaatgtttggtttaaatagagaatttgcacagaaaattagcagcaataaacggcaaa

SEQ ID NO: 25055 - DNA, 1068 bp, Heterodera glycines
ccgaaaacaaaaaaatcgattttttcaagtgtccgtttggggtactcaaacaattatgggggagcaaaaatccaaagcagaattaaagtacaggctatagggaagctattccggaaggattcggtctccccataaatctgggcgcatcggttcggggggactgccccgaaaacaaaaaaatcgattttttcaagtgtccgtttggggtactcaaacaattatggggagcaaaaatccaacgcagaattaaagtacaggctatagggaagctattccggaaggattcggtctccccataaatctgggcgcatcggttcagggggactgccccgaaaacccaaaaaaaattttttggataaaaattatttaaatgaactgactagataatatttaaaataggttatttctcttcctttcagtatccctgcaaagtttggtgcgcttctgatcagtttctgaaaaaaaagttaagcctaaactttttggcctgtttaaaaaggaattaaaaatttttaaaaattttattcatctccctttttgatagaaaaagcatcagagtgcctaaactaacatgtaaataaaatttggtgcgtttcagaaccctttctgaaaaaatatttatgaattaattttgcaaataaataaaaacgaaagactcagattttcgaaaaattttgtttgagccagctagctcggcgctcatttcagtgtaagttaatcctttaccggggagtatccctgataagtttggcacgcttctgctcaattagcaataaatatgagtgatcgaattttcactaaaaaagattaagcctacattttttgggatatttaaaaagcaattaaaaaattttaaaatttaataattttcctgcaccgaaggtactcactcggcctcttcgcggcctcgtggtgggccttcaacaatctttcttcagaaaatttggaaaaacaattatttttacatcacaatttattgctttatgggtttgactatgaatgaaatctgcttctgaaaagtttcggatttttcgaatcatatcgtacgaaaatgtctattttttcgtt

SEQ ID NO: 25056 - DNA, 1649 bp, Heterodera glycines
ttgtccttttccaatgtttggctttgcatttgcttatcttacatttcgaaattcgtccaaaaacaggccaattcttccataatcttttcaaattcgaaaaagcgtctaatttcacgttggaattcctttgtcaattgattgtgcactcgcaatgaccaattgcgtaattcttaatcccgattatactgtaattgcctgaattggctaccgtaatgatgcgccgattcatttggagaaggcgttggaattgcattctgtagcgaactgagtaaatgttcgcgcatttcatttggtttttctttcgtggcgaattccttataatgcgtgcgatacggtatcaatattccggtatttaatttcccactgtaattaccatccattcgtccaatgtttgccgcgtttgctgttccccgttcaattgggtcttccaaattcgaattttcgattttaaaatacccagcttttccaaaactcggaagcggcactgctcaaaaagcatttgtgccatggcattcctctgtttttctgaaagtgcgtcaaaacgacgcctcaaatcgccaagcaaatgcatcggttggagaagcgaatcgaaaggagaaacggagccgatttgatgttccaattcatagagaagggcacgctgatcagaaaaaatacggaagaattgctagaaccaatcaataaaattaattggctaattaatccaagtcagagaatcaattaaatgtaattgaaagagaagcgcacttccaatcgaccaatggccgcttccaatcgccgcaaagtttcgtccactttgccggcattcaacagctgatcaatgccattgtattcactcgatgaaagcaatcgttcaccggaggaaatccaatcagaaagaggggctaattgggccgagtgactgtccggaaaataagtgcacaaatggcacttccaatcaccgatggcacactgtccaagaaggaaaaattaagttcagaattgtaatttaactaattattcggttgattaatgtcccgtccgtgatattacattaatagttaatcaattttcatggcaattttctcacttccaattgttccatttcgtcctcaatttcccgtgccgttttctccctctccgcctcctccgttgcactttttctaattgccaccagcaaatggtcgacaatcgccgcccgccgttcccaaaattcttcgcgcatttgcgtgaaccactgaaaaatttggcaaatgttgtgccttccaatgcccgtacaataaaatgccgaattgtgattcgttgccgtgccaccaatttgagccgttcgtccgtggcgactgaatgcaaccaatggagccattctttgaacacaaaaaactgaaaaaggaattcaaattgaattgcccaatttaaacaaatgtttcactttttcttcttccatttccttcttttgttggcattgtccggcgacaacagaaacatcggcagagacagaagaagaaattggaaccaaagaatgaatgaatcatttggtgggaacgaaggcaaacgaattgagagacgtaagcgatcagagaacgtttgtcccgcacatattcagagacagtcacatctcgcgcctccaacaatgggcttaaattaaacaaacgactaatactgtcataaat
